United States Patent Application Publication US 2014/0199313 A1 - sequence listing, part 4

SEQ ID NO: 7477 - protein, 473 aa, Gloeobacter violaceus
MQPLDRRTKVVATIGPASSSPEVLRQLVKAGINVARLNFSHGSYEDHARMVKLLREVSEELDTPITLLQDLQGPKIRVGQMPEGGLALGEGDELTLLPVAEFAGEPGTVSIDYPYLVEEATPGTQVLLDDGLLEFAVVEVKGNAVRCRVVRGGVLKSRKGVNLPSLDLRLPSMTEKDKQDLEFGLEQGVDWVSLSFVRRGEDIRVLKGLLAEHGAADVPVIAKIEKPQAIANLEEILDEVQGIMVARGDLGVEMSPEKVPLLQKRIIRLCNRRGIPVITATQMLDSMIRNPRPTRAEASDVANAILDGSDAVMLSGESAVGDFPVQSVEMLVRIAKEVEREFTFDNNPPAKSDEIHALCESLGTIDKILALHCIATFTTTGFSASIAAAERPKAPVVAFTPDLKVYHRLNLVWGVKPLLLEHPAAELEKLIEQMESCLVERNLAAPGDRMLVLGGSPVQRAGGTNFLKIHTLH

SEQ ID NO: 7478 - DNA, 1407 bp, Chromobacterium violaceum
  CDS (1)..(1407)
atgcttcgcaataccaaaatactcgccacgctcggcccctcctccagcgccccggaaaaaatcctggaactggcccgttccggggtcaacatcttccggctcaacatgagccacggcagccatgacgaccatcgcgcgcgcctggcggccatccgcgccgccgaaaaaacgctggatcgcccgatcggcgtgctggtggacctgcagggccccaagctgcgcatcggcaagtttccgcaaccaaccacggtgaaaaccggcgaccgctacgaattcgtgctggatgaaacggaaggcaatgccgaacgcgccaccctgccgcacccggaagcgttcgaggcgctggagcccggccacctgatcctggtgaacgacggcaagctcgccttcgaagtggcggaaatgcatccgcgccgcatcgtcacccgcgtcaccgtcggcggggaactgtccagcaacaagggcttcaacctgcctcacaccgtgctgccgctgtcggccatcaccggcaaggaccgcaaggacgcggagttcgcgctggaagagggcgccgactgggtggcgatgtccttcgtccagaccgcggccgacgtcaaggcgctgcgcgacatcgtcggcaaacgcgtcggcatcgtcgccaagatcgaaaaaccgtcggcggtggacgatctggaagccatcgccgagctggccgacggcgtgatggtggcgcgcggcgacctgggcgtggagctgccgccggaagacgtgccggtggtgcagcgccgcatcgtccaccactgccgccacctgggccgcccggtgatcgtggccacccagatgctggaatcgatgatcaccgcgccgaccccgacccgcgccgaggccaacgacgtggccaccgccgtctacgaaggcgcggacgcggtgatgctgtcggccgaaaccgccgccggccagtacccgctggaggcggtgcagatcatggaccgcatcatccgccgcgtggagaacgcgcccgactaccgcaaggtgatggcgctggattacagcgccgccgacgagccggaccgcaccgacgccatcgccgcctgcgtgcgcaaggtcagcaccctgctgccggtcaccgtggccgtcgccttcaccaccagcggcgccagctgtctgtcgctggcgcgcgagcgcccgtccacccccatcctgggcatctcgcccaggctggaaaccgcgcgccgcctgaccctggtgtggggcgtggtcgcctaccacggcccggacgccgagaacctggaagacatggtggtgaagaccaccttctgcgccaccaagctcagcctggccgagcagggcaagccgatggtgatcatcgccggcgtgcccttcggcacccccggctccaccaacctgctgcgcatcgtctatccataa

SEQ ID NO: 7479 - protein, 468 aa, Chromobacterium violaceum
MLRNTKILATLGPSSSAPEKILELARSGVNIFRLNMSHGSHDDHRARLAAIRAAEKTLDRPIGVLVDLQGPKLRIGKFPQPTTVKTGDRYEFVLDETEGNAERATLPHPEAFEALEPGHLILVNDGKLAFEVAEMHPRRIVTRVTVGGELSSNKGFNLPHTVLPLSAITGKDRKDAEFALEEGADWVAMSFVQTAADVKALRDIVGKRVGIVAKIEKPSAVDDLEAIAELADGVMVARGDLGVELPPEDVPVVQRRIVHHCRHLGRPVIVATQMLESMITAPTPTRAEANDVATAVYEGADAVMLSAETAAGQYPLEAVQIMDRIIRRVENAPDYRKVMALDYSAADEPDRTDAIAACVRKVSTLLPVTVAVAFTTSGASCLSLARERPSTPILGISPRLETARRLTLVWGVVAYHGPDAENLEDMVVKTTFCATKLSLAEQGKPMVIIAGVPFGTPGSTNLLRIVYP

SEQ ID NO: 7480 - DNA, 1662 bp, Giardia lamblia ATCC 50803
  CDS (1)..(1662)
atgcttaacaataagtttacagcaaatcagatcaccgagtacaacctcacaaacctcaagaagctcgtcgagcagggcctcaaaggtgtggataagaatcacccgcacttcaatcgcgtgaagatttgctgcacgctgggcccgtcttcgttcaacgttgaggtcatagcaggaatgatcagggcaggtgccgatattattcgcatcaacttctctcatggcaacacagacgatcatactcaaattttccacaaagtccagcaggcaatgcaactgaccggcaagactgtcgcaataatgggggatatccagggaccgaagctcaggattgccggcttctctaacccagacaactgtatagagctcaaggaaggccaggagttcactttggatcataacaacgtgaacggcgatgagtccagggtgtatcttccccataaagagttctttgctgtctgcgagcctaacgatgacatcatcctcaacgacggctacatccgtttggttgccacgagcgttgatcgtcaagccatgagaatcgtcacgagagtgaaaaccggcgggaagctcggagcccgcaaggggataaccattcccacgcgcattctcccactgagtggactatcacccaaagatctgggagacatcagaaatgcatgcagactcgggatggactggattgccctctcgtttgtgcagactaaggctgacgttattgaagcccgagattacattgcgaagctccacgcagaaaatccggcaagcttctgcccgcgcgtatgcagcaagattgaaaagcccacggcagtccttgacatcgacgacattgcactactttctgacatgctcatggtcgctcgcggggacctggctatcgaaacatgcctatctaaggtttgctctatccagaagtacatctgtgaacgagcgcgttatcacggctgccaggcaatggtcgcgacgcagatggttgagtctcttatcgagaacaccgttcccacaagagcagaggtgacagatgttgcgtcggtgtgctttgacggggctaattctgtgttggtcaccgccgaaaccgcggccggacacgacccggtcaacgttgtcaaggtcctccgttcaatccttactaccacagaacagtctgaggcctttatcaagcaggttctgacagacaactatatcaaccaacgcacctcgaaggagcacaagcgtcctgattccatagcactgggggcgtgtctactcgctcgagagcttggagcgaaactaatcattgttttctcgaagagtggcaactcaactggtcgtgttcttcgtcaactcccgcactgccctgtcctttgcatcacatcggagcagcgatcctaccagtggctccacatgtgctggggatgccgccctgttctccaccccggaaacattgacagcatgaagactctgatcagtgtggctgacacacatgcgcttgaatcagggcaggcggagcgtggagacgcagttgtcctcgtctttggcacgccgttctctgacgtgaaccgcaagggctgcaacaatataatggcgcacgttgttggtgggggctccttcaacaacagtaccgacgtggagtacggtgttacccctcagttggcagagctgactcccgtggtcggggatagttaa

SEQ ID NO: 7481 - protein, 553 aa, Giardia lamblia ATCC 50803
MLNNKFTANQITEYNLTNLKKLVEQGLKGVDKNHPHFNRVKICCTLGPSSFNVEVIAGMIRAGADIIRINFSHGNTDDHTQIFHKVQQAMQLTGKTVAIMGDIQGPKLRIAGFSNPDNCIELKEGQEFTLDHNNVNGDESRVYLPHKEFFAVCEPNDDIILNDGYIRLVATSVDRQAMRIVTRVKTGGKLGARKGITIPTRILPLSGLSPKDLGDIRNACRLGMDWIALSFVQTKADVIEARDYIAKLHAENPASFCPRVCSKIEKPTAVLDIDDIALLSDMLMVARGDLAIETCLSKVCSIQKYICERARYHGCQAMVATQMVESLIENTVPTRAEVTDVASVCFDGANSVLVTAETAAGHDPVNVVKVLRSILTTTEQSEAFIKQVLTDNYINQRTSKEHKRPDSIALGACLLARELGAKLIIVFSKSGNSTGRVLRQLPHCPVLCITSEQRSYQWLHMCWGCRPVLHPGNIDSMKTLISVADTHALESGQAERGDAVVLVFGTPFSDVNRKGCNNIMAHVVGGGSFNNSTDVEYGVTPQLAELTPVVGDS

SEQ ID NO: 7482 - DNA, 1536 bp, Plasmodium yoelii yoelii
  CDS (1)..(1536)
atgaatccttttaaatttaaaaacgcaaccgctggagctagcttacaaagcgcagctaacattactttaaggcaaattttagaacctaataatgtgaatttacgttcaaaaaaaactcacattgtttgtacattaggcccagcatgtaaatctgttgaaacactcgtgcaaatgatagatgcaggaatggatatatgccgttttaacttttctcatggaactcatgatgatcacaagcaaatgtttgaaaatgttttaaaagcacaagcccaaagaccaaattgcacattaggtatgttattagatactaaaggacctgaaataagaacaggtttattaaaaaataaagaagctcatttaaaagaaggaagcaaattaaagttggttactgattattcctatttgggagatgaaacttgtattgcttgttcatacacaaaattaccacaaagtgtaaagccaggaagtattatattaatagctgatggatccgttagttgtagagtattagaaacacacgatgatcatgtaattacagaagtattaaataatgcaacaattggtgagaaaaaaaatatgaacttaccaaatgttaaggttgatttaccaattataagtgaaaaagataaggatgatatacttaactttgctataccaatgggatgcaattttattgctgcatcatttattcaatctgctgaagatgtgcgtttaatcagaaatttgttaggcccacgaggaagacatattaaaattattccaaaaatcgaaaatattgaaggtattataaattttgacaaaatattagctgaagccgatggaattatgattgcaagaggagatcttggtatggaaatatccgcagagaaggttttcttagcccaaaaacttatgatatcaaaatgtaatttacaaggaaagccaatcattacagccactcaaatgcttgaatctatgacaaagaacccaagaccaacaagagcagaagttacagatgtagctaatgcagttttagacggaaccgattgtgttatgctttcaggtgaaacagcaggcggtaaatttccagtagaagcagttactattatgtctaaaatatgtttagaagcagaagcatgcattgattataaattattatatcaatcattagtaaatgccatccaaaccccaataagtgtacaagaagcagtagctagatctgcagttgaaacagcagaatcgattgaagcatctgttattattacattaacagaaaccggatacactgctagactaatagctaaatacaaaccaagctgtactatattagctttaagtgcatctgattcaacagttagatgcttaaatgtacacagaggtgttacatgcattaaagttggatcattccaaggaactgataacgtattaagaaatgcaattgaaattgcaaaagaaagaaatatcgttaaacctggagatagtgccatatgtattcacggaattaaagaagaagtttctggaagtactaacttaatgaaagtaatacaagtagaataa

SEQ ID NO: 7483 - protein, 511 aa, Plasmodium yoelii yoelii
MNPFKFKNATAGASLQSAANITLRQILEPNNVNLRSKKTHIVCTLGPACKSVETLVQMIDAGMDICRFNFSHGTHDDHKQMFENVLKAQAQRPNCTLGMLLDTKGPEIRTGLLKNKEAHLKEGSKLKLVTDYSYLGDETCIACSYTKLPQSVKPGSIILIADGSVSCRVLETHDDHVITEVLNNATIGEKKNMNLPNVKVDLPIISEKDKDDILNFAIPMGCNFIAASFIQSAEDVRLIRNLLGPRGRHIKIIPKIENIEGIINFDKILAEADGIMIARGDLGMEISAEKVFLAQKLMISKCNLQGKPIITATQMLESMTKNPRPTRAEVTDVANAVLDGTDCVMLSGETAGGKFPVEAVTIMSKICLEAEACIDYKLLYQSLVNAIQTPISVQEAVARSAVETAESIEASVIITLTETGYTARLIAKYKPSCTILALSASDSTVRCLNVHRGVTCIKVGSFQGTDNVLRNAIEIAKERNIVKPGDSAICIHGIKEEVSGSTNLMKVIQVE

SEQ ID NO: 7484 - DNA, 1584 bp, Neurospora crassa
  CDS (1)..(1584)
atggccgctactgcgcttgaccatctcagcctcggcggcaagattcagtggctcgctcagcttaacactgagttccagcccgctcgcgagttccgtcgcacttccatcatctgcaccattggtcccaagaccaactcggtcgaggccatcaacaagctccgcgatgctggtctcaacgtcgttcgcatgaacttctcccacggaagctacgagtatcaccagtccgtcattgacaatgctcgccaggctgagaaggttcatcccggccgccctattgccattgcccttgacaccaagggccctgagatccgtaccggcaacaccaagaacgatgaggatattcccatctccgccggtaccatccttaacatcaccactgatgaaaagtacaaggatgagtgcactatcgagcacatgtacgtcgactatgtcaacatcaccaaggtcattgctcctggccgtatcatctacgtcgacgatggtgtcctcgctttcgaggtcctcgagattgtcgatgacaagaccatcaaggttaaggcccgcaacaacggctacatctcctcccgcaagggtgtcaaccttcccaacaccgatgtcgatctccctgctctttccgagaaggataaggccgatctcaggttcggtgtcaagaacaaggtcgacatggtctttgcttcttttatccgtcgcggccaggacatcaaggacattcgtgaggtccttggcgaggatggcaagcagatccagatcattgccaagatcgagaacaggcagggtctcaacaactttgctgagattctcgccgagaccgatggtgtcatggttgcccgtggtgacttgggtattgagatccccgccgccgaggtgttcgctgcccagaagaagatcatcgccatgtgcaacattgccggcaagcccgtcatctgcgctacccagatgctcgagtccatgatcaagaaccccagacccaccagagccgagatcagcgatgtcggtaacgctgttaccgatggtgctgactgcgtcatgctttctggtgagaccgccaagggtgcttaccccaccgaggccgtccgtgagatgagcgaggccgttcttaaggccgagaacaccatcccctacgtcagccacttcgaggagctttgcagcttggccaagcgccccgtctccattgtcgagtcctgcgccatggcctctgtccgcgcctcccttgaccttaacgccgctgccattcttgttctctccacctccggcgagtccgctcgtctcatctccaagtaccgccctgtgtgccccatcatcatgatcaccaggaacgactctgcttcgaggtacgcccacctttaccgtggcgtctaccccttccttttccccgagtccaagcccgactttagcaaggtcaactggcaggaggatgttgatcgtcgcatcaagtggggtctcagccacggtattggcctcaaggtcctcaacgagggcgaaaccgttgtcgttgttcagggctggaagggtggtatgggtaacaccaacaccttccgtatcgttaaggccgatgtcaaccacctcggtcttggccagccttaa

SEQ ID NO: 7485 - protein, 527 aa, Neurospora crassa
MAATALDHLSLGGKIQWLAQLNTEFQPAREFRRTSIICTIGPKTNSVEAINKLRDAGLNVVRMNFSHGSYEYHQSVIDNARQAEKVHPGRPIAIALDTKGPEIRTGNTKNDEDIPISAGTILNITTDEKYKDECTIEHMYVDYVNITKVIAPGRIIYVDDGVLAFEVLEIVDDKTIKVKARNNGYISSRKGVNLPNTDVDLPALSEKDKADLRFGVKNKVDMVFASFIRRGQDIKDIREVLGEDGKQIQIIAKIENRQGLNNFAEILAETDGVMVARGDLGIEIPAAEVFAAQKKIIAMCNIAGKPVICATQMLESMIKNPRPTRAEISDVGNAVTDGADCVMLSGETAKGAYPTEAVREMSEAVLKAENTIPYVSHFEELCSLAKRPVSIVESCAMASVRASLDLNAAAILVLSTSGESARLISKYRPVCPIIMITRNDSASRYAHLYRGVYPFLFPESKPDFSKVNWQEDVDRRIKWGLSHGIGLKVLNEGETVVVVQGWKGGMGNTNTFRIVKADVNHLGLGQP

SEQ ID NO: 7486 - DNA, 1455 bp, Synechococcus sp
  CDS (1)..(1455)
atgggccagttcgatcagaaccgtcggaccaagatcgtggccaccatcggtccagccacggaaagttccgagcgaatcaaggaactggttcaggctggagccaccacctttcggttgaatttctcccacggcgaccacagcgagcatgcggcgcggatttcgaccatccgccaggtgtctgaagagctcgggatcaacatcggcatccttcaagacctgcagggaccaaaaatccgcctgggccgttttgctgagggaccgatcacccttgccaatggcgacagcttctccctgacgtccaggccggtgagttgcaaccaatccatcgccaccgtcacctacgacaaactcgctgacgaagtcaccgcaggaagccgcatccttctcgacgacggccgcgttgagatgaaagtcgagcaggtggatcaggctgaacagaccctgcactgcaccgtcaccgttggcggtgttctctccaacaacaaaggagtgaacttccccgacgtgcagctgtccgtccgcgctctgacggacaaggacaaggtggatctggaattcggtctctcccagggggtcgactgggtggccctgagcttcgtacgcaacccctccgacatggaggaaatccgtggtctgatccgtgagcatggccacgagacccccgtcgtcgccaagattgagaagtttgaggccatcgaccagatcgatgccatccttcccctgtgcgatggcgtgatggtcgccaggggtgacctgggggtagagatgcccgctgaggaggttcctcttctgcagaaggaattgatccggaaagccaacagcctgggcattccgatcatcacggccacccagatgctggattcgatggcctccagcccgcgacccacccgcgctgaagtgagcgatgtggccaacgccattttggatggcaccgatgcagtgatgctctccaacgaaacggccgtcggcgatttcccggtggaagccgttcaaacgatggcgaccatcgcctgccggatcgaaaaggattatccccagcgttccgttgacagccatctggccagcacggtgccgaatgccctgagtggcgccgtcagcaccatcgccagtcagctgaacgcctcggcgatccttcctctcaccaaaagcggagcgacggctaagaacgtcagcaagttccgtcccgcatcgccgattctggccattacccctgatccaaccgtggcctgccgtctgcaactggtttggggagtgaagccgctggtgatcccgcagcacgaactcaccactcacacgttccttgccgcgatgacccaggccaaaacaatggggcttctgaaggaaggtgatctggtcgttcagacggccgggacccacacgggtgtctccggttccaccgatctggtcaaggtgggcatcgtcagttcagaggaagcacccgtcaacatgatctga

SEQ ID NO: 7487 - protein, 484 aa, Synechococcus sp
MGQFDQNRRTKIVATIGPATESSERIKELVQAGATTFRLNFSHGDHSEHAARISTIRQVSEELGINIGILQDLQGPKIRLGRFAEGPITLANGDSFSLTSRPVSCNQSIATVTYDKLADEVTAGSRILLDDGRVEMKVEQVDQAEQTLHCTVTVGGVLSNNKGVNFPDVQLSVRALTDKDKVDLEFGLSQGVDWVALSFVRNPSDMEEIRGLIREHGHETPVVAKIEKFEAIDQIDAILPLCDGVMVARGDLGVEMPAEEVPLLQKELIRKANSLGIPIITATQMLDSMASSPRPTRAEVSDVANAILDGTDAVMLSNETAVGDFPVEAVQTMATIACRIEKDYPQRSVDSHLASTVPNALSGAVSTIASQLNASAILPLTKSGATAKNVSKFRPASPILAITPDPTVACRLQLVWGVKPLVIPQHELTTHTFLAAMTQAKTMGLLKEGDLVVQTAGTHTGVSGSTDLVKVGIVSSEEAPVNMI

SEQ ID NO: 7488 - DNA, 1431 bp, Rhodopirellula baltica
  CDS (1)..(1431)
atgcaggactaccgtcacacaaaaatcattgccacgatcggcccggcaaccgagtcccccgaaaaactagcggcgttgatcgaagcgggcgtcgatgtcatgcgactcaatatggcacacggaacgcctgaatgggtcggcgaaatcgtcgcacggatccgaaaggtttccaaggatattagtcgtcacgttgcggtgatgatggacgtcaaaggcccagagattcgaaccggtgcggtggaggatgcgatcgaattgaaagccggcgacgagctggtcctgttcaccgaagactgcgcggatcaatcggcggtcgaatccgacggaactccgcgggtcagtgtgaactatctgggcctgcccggtgcgatcgacttggacagcacgattttggtcgacagcggtttgttgcattggcatgtactgaagaaagacgccaccaccgttcgctgccgcgtgatcacgcccggcgttctggaatctcgacgtcacatcaacttgcctggcgtccaagtcaacttgcccgcgatcacggacaaagaccgcaccgatttggcggcgggcgtcaaagcgggcatcgacttcgttgcgctttcgtttgttcgccaagcggaagacgtccgcacgctgcgtgcattcttagacgaacacggctcacccgcacgaatcatttcaaagatcgaagaccaagccggtgttcgcaacatgaaggcgatcatccggcaatccgatgcgatcatggtcgctcgtggtgacctcggcgttgaaattgattaccaccgattgccgcttgttcaaaccgatttgattcgtgcctgccaagaagatggcaagcccgtcatcatcgccacgcacctgctcgagtcgatgattcaatcgccggttccaactcgtgcggaagtgtcggacgtctccaacgcaattcgcgaacaagccgatgcggtgatgctgtctggtgaaacgaccacgggtaaatacccgctggagtccgttggtgtgctgcaaaacattgtcgccagcatcgagccaacggtcagccgccaactgaactcaaagatcgtgcttcgagagcccaaatcgatgatgctgcgatcggcgtgcaccttggcacaggagatgggtgattcaggaatcgttgtcttcacccgcagcggttttctcgcttacgtcctgggggccctgaggcctcggggtgtgccaattttcgccttcaccgatgtcgagcatacgttccgtcacttaatgttgccgtggggtgtggagccgttcttcatggagttctccgaagatcacgatcaaaccatcaccaacgcattggaagttctgaaggagagcggttggtgcaaaccgggcgtttggttgggggtcatcaccaacgctttggccgacgaaaaaatcatcgacacgcttcagttgcgtcaggtccagtaa

SEQ ID NO: 7489 - protein, 476 aa, Rhodopirellula baltica
MQDYRHTKIIATIGPATESPEKLAALIEAGVDVMRLNMAHGTPEWVGEIVARIRKVSKDISRHVAVMMDVKGPEIRTGAVEDAIELKAGDELVLFTEDCADQSAVESDGTPRVSVNYLGLPGAIDLDSTILVDSGLLHWHVLKKDATTVRCRVITPGVLESRRHINLPGVQVNLPAITDKDRTDLAAGVKAGIDFVALSFVRQAEDVRTLRAFLDEHGSPARIISKIEDQAGVRNMKAIIRQSDAIMVARGDLGVEIDYHRLPLVQTDLIRACQEDGKPVIIATHLLESMIQSPVPTRAEVSDVSNAIREQADAVMLSGETTTGKYPLESVGVLQNIVASIEPTVSRQLNSKIVLREPKSMMLRSACTLAQEMGDSGIVVFTRSGFLAYVLGALRPRGVPIFAFTDVEHTFRHLMLPWGVEPFFMEFSEDHDQTITNALEVLKESGWCKPGVWLGVITNALADEKIIDTLQLRQVQ

SEQ ID NO: 7490 - DNA, 1791 bp, Prochlorococcus marinus subsp
  CDS (1)..(1791)
atgtcgaatattgatttaaaaaggagaaccaagattgttgcaacaattggaccagctactcaatcagaagaaattattactgatcttattaaggctggagtcacaacatttcgattaaatttttctcatggcgatcataaagatcatcaagaaagaatacaaaccataagaaaagtttctgaaaagctagatctagatattggaatacttcaggatcttcagggtcctaaaataagattaggaagatttaaagatggtcctgtaaaagtaaaaaaaggagataaattctcattaacttccaatgaagttgaatgtacaaaaagtatagctaatgttacctacaacaaacttgcccaggaagtaacttcaggtaaaagaatattgttagatgatggaaaaattgaaatgattgttgaaaaggttgatataggaaataatttattagagtgtaaagtaactgttggaggagtcctttctaacaacaaaggtgtaaattttccagatgtacaattatctgttaaagctttaactgataaagatatagaagatcttgaatttggattaactgctggtgttgattggatagctctgagttttgtaagaaatccgtctgatattaatgaaataaaaaatttaataaataagaatggacattcaattcctgttgtagccaagattgaaaaatttgaagcaatagatcaaatagattcaatattacctttgtgtgatggggttatggttgcacgaggagacttaggagttgaaatgccagcagaagaagtccctcttttacaaaaagagttaattagaaaagcaaatacactagggatccccattattaccgccacacaaatgcttgactcaatggcatcaaatccaaggccaactcgcgctgaagtaagtgatgtagctaatgcaattcttgatggtacagatgctgtaatgctttcaaatgaaacagctgtgggtgattatccagtagaagctgttgagaccatggcgacaattgctagaagaattgaacgtgattatccactaaaagcaattgagagtcaccttcctagtactattccaaatgcaataagcgccgcagtcagcaacattgctagacaacttgatgctggggcaataatccctttaaccaaatccggttcaacagcccgtaatgtgagtaaattcagacctcctactcctattcttgctaccactacagagcgatgtgtcgcgagaagattgcaattagtatggggagtgactcctttattagtcaagaatgacgataggactgcaaaaacattcagtattgcaatgcaaatagcacaagaactagggattcttaagcaaggagacctggtagttcagactgcagggacactaacaggtataagtggttcgactgatctaataaaggttgggttagtaagaaaagtggtaactcgaggaatatcagtaggggagataggtgtaactggcaaagcaagaaatataaagactaatcttgatttatcattgatttctccaggtgaaattttatttgtaccaaaaaatatcttaatggatttacctttcaccaaaataattactggaatagttacggatgaaaatatagatgaatgctataaagtattcaaaaaaaataatattaagatatccactatttgtaatttatctgctattgacaatcttgtatcgaacggggatttaataacgttacaactcaatgaaggggttgtttatatggggcagatagaagacgatgaggatgcactagataaatataagtatgtctag

SEQ ID NO: 7491 - protein, 596 aa, Prochlorococcus marinus subsp
MSNIDLKRRTKIVATIGPATQSEEIITDLIKAGVTTFRLNFSHGDHKDHQERIQTIRKVSEKLDLDIGILQDLQGPKIRLGRFKDGPVKVKKGDKFSLTSNEVECTKSIANVTYNKLAQEVTSGKRILLDDGKIEMIVEKVDIGNNLLECKVTVGGVLSNNKGVNFPDVQLSVKALTDKDIEDLEFGLTAGVDWIALSFVRNPSDINEIKNLINKNGHSIPVVAKIEKFEAIDQIDSILPLCDGVMVARGDLGVEMPAEEVPLLQKELIRKANTLGIPIITATQMLDSMASNPRPTRAEVSDVANAILDGTDAVMLSNETAVGDYPVEAVETMATIARRIERDYPLKAIESHLPSTIPNAISAAVSNIARQLDAGAIIPLTKSGSTARNVSKFRPPTPILATTTERCVARRLQLVWGVTPLLVKNDDRTAKTFSIAMQIAQELGILKQGDLVVQTAGTLTGISGSTDLIKVGLVRKVVTRGISVGEIGVTGKARNIKTNLDLSLISPGEILFVPKNILMDLPFTKIITGIVTDENIDECYKVFKKNNIKISTICNLSAIDNLVSNGDLITLQLNEGVVYMGQIEDDEDALDKYKYV

SEQ ID NO: 7492 - DNA, 1818 bp, Prochlorococcus marinus
  CDS (1)..(1818)
atggtagtttccgcgatgtttcaggtcccgttgatggcccagattgatctgacacgacggaccaaaattgttgccaccataggtccggcaaccgagagcgccgaacgaatccgagaactcgttgaggtaggtgctaccaccttccggctgaatttctcacacggcgaccatgacgagcacgccaagcgcatctccaccatccgtcaggtttctgatgaattgggaatgcacatcggcattcttcaagacttgcaaggccccaaaattcgcctgggtcgttttgataaggggcctatcactctggccaatggcgattccttcgcactgacctccaaacaagttcaatgcaatcagtcagtggcaaccgtcacttacgacaagcttgcagacgaagtcacgaccggcagccgaatcttgcttgatgacggtcgagtggagatgaaagtcttaaaaatcgatcaaagcgaacaaaccttgcactgcatcgtcacggtgggaggggtgctctcaaataacaagggagtgaatttccctgatgtacagctttcggttcgcgcccttacagagaaagatcgccaagatctcgcctttggcctccagcaaggggtggactgggtcgcactgagctttgtgcgaaacccttcggacatgaaagagatccgcaaactcatccgcgatcatgggcacagcaccccagtgatcgcgaagatcgagaaatttgaggcgattgatcaaatcgattcaatccttcctctctgtgatggagtcatggttgcaaggggggacttaggcgttgagatgccagccgaagaagtgcctctactgcaaaaggatttgattcgcaaggccaacagccttggaattccaatcatcacagccacccagatgctcgactcgatggcctcaagcccgaggcccaccagagcagaagtcagtgatgtagcaaatgcgatccttgatggtactgatgcagtgatgctctcgaacgaaaccgctgtaggagactatccagtggaggcggttcaaacgatggccaccattgccagacggattgaacgggactatccacagcgtccaatcgaaacttatctagccagcaccatttccaacgcgattagttcagccgtaagcagcatcgccagtcatctcaacgcggcagcaatcgtgccactaactgaaagtggtgcaactgctcacaacgtcagtaaattccgcccagcagcgccaattttggccgtaaccaacaaattggctgtagcaagaaaacttcaattggcatggggtgttaccccactgcttgtcccaacccaaaaaagtaccactgcaaccttcagtgatgcaattgctgttgcccaggaattgggtcttctcaaagaaggagatctaacaattcaaactgcaggaacccttgctggcgtgagcgggtccacagatcttgtcaaagtaggaattgtcagtgcagtacttggccaagggatcggtattggcaatggaaccgttagcggcaaggtcagatttgctttctccccaaacgactcaacaaaaattgaaccaggcgagattctggtcattcatgaaacaagcgatgactatctcgatgcaatcagaaagtctgcaggagtgattacagaacaagaaggagaggaataccacgcagaaatgatctcaaaacgactagggattccgttcatcattgggatagcacatgccacgagaaacctgcttgaaggagaggtggtaacaatgcagctcagtaatggcaaagttcatcgcggcacaggcggcaagctgccaatgaagctcgactcaatggactga

SEQ ID NO: 7493 - protein, 605 aa, Prochlorococcus marinus
MVVSAMFQVPLMAQIDLTRRTKIVATIGPATESAERIRELVEVGATTFRLNFSHGDHDEHAKRISTIRQVSDELGMHIGILQDLQGPKIRLGRFDKGPITLANGDSFALTSKQVQCNQSVATVTYDKLADEVTTGSRILLDDGRVEMKVLKIDQSEQTLHCIVTVGGVLSNNKGVNFPDVQLSVRALTEKDRQDLAFGLQQGVDWVALSFVRNPSDMKEIRKLIRDHGHSTPVIAKIEKFEAIDQIDSILPLCDGVMVARGDLGVEMPAEEVPLLQKDLIRKANSLGIPIITATQMLDSMASSPRPTRAEVSDVANAILDGTDAVMLSNETAVGDYPVEAVQTMATIARRIERDYPQRPIETYLASTISNAISSAVSSIASHLNAAAIVPLTESGATAHNVSKFRPAAPILAVTNKLAVARKLQLAWGVTPLLVPTQKSTTATFSDAIAVAQELGLLKEGDLTIQTAGTLAGVSGSTDLVKVGIVSAVLGQGIGIGNGTVSGKVRFAFSPNDSTKIEPGEILVIHETSDDYLDAIRKSAGVITEQEGEEYHAEMISKRLGIPFIIGIAHATRNLLEGEVVTMQLSNGKVHRGTGGKLPMKLDSMD

SEQ ID NO: 7494 - DNA, 1785 bp, Prochlorococcus marinus
  CDS (1)..(1785)
atgacaacgatagatctaaaacgtaggacaaagatcgttgcgacaataggccctgcaacagaaagtccagagaaaatcacagagcttattaaagcaggtgctacaacctttagactgaatttctcgcatggagatcatgaagaacatgcaaaacggataaaaaccatcagatctgttgcatcagatttaggagtaaacataggcattcttcaggatttacaaggtcctaaaatcagattaggaagatttaaagagggtccagtcaacctaaaaacaggagatgtatttgccctaacttcagaaaacaaagactgcaatcaggaaatagctaatgtcacctatgaaaaccttgtcaatgaggtggaaaaaggaaaaagaatattattagatgatggaagagtcgaaatgattgtagagaatgtagacaagaaaaacaaatcacttatttgcaaagtcacagttggtggaattctttcaaacaacaaaggggttaatttccctgacgtacaactatcaattaatgctttaactgaaaaagataaaatagacctttcatttggtctaaaacaaggagttgactgggtagctctaagttttgttaggaatccagcggatattcaagaaatcaaggaattaatcagacggcatggttataccactccaatagttgcaaaaatagagaaatttgaagcaatagaccaaatagattcaatactcagcctttgtgatggggtgatggttgcaagaggcgatttgggtgttgaaatggatgcagaagaagtacctttgctgcagaaagaattaattaaaaaggccaatagccttgggataccaattattacagctacccagatgttggattcgatggcctcgagtcctagaccaactagggcagaagttagcgatgtagctaatgcaatacttgatggtacagatgcagtaatgctttctaacgaaacagcagtgggagattatccaatagaagctgtcgaaaccatggcaaaaatagcaagaagaatcgagagggattacccacaaagagctttagaaagccaccttccaagtacaattcctaatgcaattagtgccgcagtaagtactattgcaagacaattaaacgcagcagcaatacttcccctaactaaaagtggtgcaactgctcataatgtgagtaagtttcgtcctgctaccccaattcttgccataacaagtgaaattagcgtcgcaagaagacttcaattggtatggggtgtatctcccttgttgatagatgctcaaaaaagcacaagcaaaacctttggaatagcaatggagcaggcaatggacatgaaattattaaagcccggagatcaagtagtagaaacagcaggaaccctaacaggcataagtggttcaacagatttaattaaagtaggaattgtcagcaagatagtagcgagcggaaaaacaaaaccaatcgttaaagaaggaacaataagtggcaaacttagagttataaataaagcaaccgatctgtcagatttaaaatcaggcgaaatactagtacttgcagaaaatgtacaatataatttggacactaaaactcatatatcagcaatgatatttgaaggcgaatattcattaatcaatacaaataatcaaattgaagataataatataattcctgctatatataatgtagaaggagcatgtactaaatttaaaaatggcgagattgtcacactagatcttaaagatggaaatataataaagggtcttgctcaggacctgaaaacatataattaa

SEQ ID NO: 7495 - protein, 594 aa, Prochlorococcus marinus
MTTIDLKRRTKIVATIGPATESPEKITELIKAGATTFRLNFSHGDHEEHAKRIKTIRSVASDLGVNIGILQDLQGPKIRLGRFKEGPVNLKTGDVFALTSENKDCNQEIANVTYENLVNEVEKGKRILLDDGRVEMIVENVDKKNKSLICKVTVGGILSNNKGVNFPDVQLSINALTEKDKIDLSFGLKQGVDWVALSFVRNPADIQEIKELIRRHGYTTPIVAKIEKFEAIDQIDSILSLCDGVMVARGDLGVEMDAEEVPLLQKELIKKANSLGIPIITATQMLDSMASSPRPTRAEVSDVANAILDGTDAVMLSNETAVGDYPIEAVETMAKIARRIERDYPQRALESHLPSTIPNAISAAVSTIARQLNAAAILPLTKSGATAHNVSKFRPATPILAITSEISVARRLQLVWGVSPLLIDAQKSTSKTFGIAMEQAMDMKLLKPGDQVVETAGTLTGISGSTDLIKVGIVSKIVASGKTKPIVKEGTISGKLRVINKATDLSDLKSGEILVLAENVQYNLDTKTHISAMIFEGEYSLINTNNQIEDNNIIPAIYNVEGACTKFKNGEIVTLDLKDGNIIKGLAQDLKTYN

SEQ ID NO: 7496 - DNA, 1440 bp, Haemophilus ducreyi
  CDS (1)..(1440)
atgtctagaaaacttagaagaaccaaaattgtttgtacaatggggcctgcaactgatcgtagcaataatttggaaagaattatcgctgcaggagcaaacatggttcgtatgaacttctcacacggcgtgcctgaagaccatattgaacgagcaaataaagttcgtgaaatagctgcacgcttgggtaaacatgttgctattttaggtgacttacaaggtccaaaaattcgtgtatcgacgttcaaagaaggaaaaattttcttaaacataggcgataaatttaccttagatgctgatttacctcgtggtgaaggagatcaacaagtggtcggtttagattataaaaacttacccaacgatgtcgtacccggtgatatccttttattagatgatggtaatgtacaattaaaagttatttctgtagagggtgctaaagtacatactgaagtcacgcttggtggccctttatcaaataataaaggcattaataagttaggcggtggtttatctgctcctgcactaacggaaaaagataaagaagatattaaattagctgcgcgtatcggtgtagattatttagcggtttcatttccacaatctagtcaagacttacactatgcacgtcaattagcagaagaagcgggcttagatgccaaaattgtcgccaaagtagaacgtgctgaaactgtagcaactgaagaagcaatggacgatatcattttaggtgctgatgtggtgatggttgcacgtggtgacttaggtgttgagattggtgatgctgcattagttggcgtacaaaaacgattaattcgtcgtgcaagaaagttaaaccgcgtagtgatcaccgcaactcaaatgatggaatcaatgatcaagaaaccaatgccaacacgtgctgaagtaatggatgtggctaatgccgtgttagatggcactgatgccgtaatgttgtcaggcgaaactgcaagcggtgattaccctgtagaaactgttaaatcaatggcagaagtctgtttaggtgcagaaactatgccaagtattaatatttctcgccaccgcatgcaaggcaaattcgccgccattgatgaagccgttgcaatgtctgcgatgtacacggctaaccatctagaaagcgtttctgcaatcattgcattgactcactccggtgaaacggcaaaattaatgagccgtattagttctggcttaccaatttatgcgctatcacgtaatcaacaagcattaaatcgtaccgcactttatcgtggtgtaacgcccgtatactataacgaagaaagccgtacaatcgaaggagctaaaaaaggtattgcattgctcaaagaaaaaggctatttgatgaccggtgatttagtcttattaacacaaggtagcgaatcaaaagatggcggtactaatacttgtcgaattttaaaagtggaataa

SEQ ID NO: 7497 - protein, 479 aa, Haemophilus ducreyi
MSRKLRRTKIVCTMGPATDRSNNLERIIAAGANMVRMNFSHGVPEDHIERANKVREIAARLGKHVAILGDLQGPKIRVSTFKEGKIFLNIGDKFTLDADLPRGEGDQQVVGLDYKNLPNDVVPGDILLLDDGNVQLKVISVEGAKVHTEVTLGGPLSNNKGINKLGGGLSAPALTEKDKEDIKLAARIGVDYLAVSFPQSSQDLHYARQLAEEAGLDAKIVAKVERAETVATEEAMDDIILGADVVMVARGDLGVEIGDAALVGVQKRLIRRARKLNRVVITATQMMESMIKKPMPTRAEVMDVANAVLDGTDAVMLSGETASGDYPVETVKSMAEVCLGAETMPSINISRHRMQGKFAAIDEAVAMSAMYTANHLESVSAIIALTHSGETAKLMSRISSGLPIYALSRNQQALNRTALYRGVTPVYYNEESRTIEGAKKGIALLKEKGYLMTGDLVLLTQGSESKDGGTNTCRILKVE

SEQ ID NO: 7498 - DNA, 1467 bp, Candidatus Blochmannia floridanus
  CDS (1)..(1467)
atgccgcaattattaagaagaactaaaattatcgctactctaggacctgctactgatcaaaaaaatactcttgaaaaaatcattatttcaggagttaatatagtaagattaaatttttcacatggaaattcttcagaacattttttcagagcaaataaagttcgaaaacttgctaatcaactacataaatatatagctattttaggcgacctacaaggccccaaaatcagaatttcaacctttcaaactaataacatatatttacagtctggagatgattttttaatagattctacgttaaaaaatagtcataataatcaaaaatatgtaggagtaaactataaagaattaccacaagatgtttctccaggagattatttattattggatgacggaaaaattcaattaaaagttataaaaattcaaaatacccaaattttcactaaagtagtaattggaggattattatctaataataaaggaatcaacaaattaggcggaggattatctgcaaaagtattaacaaataaagataaattagatattatcactgcagccaaaatcggagtagattatctagcgatatcctttcctcgcaacagtatggatttaaactttgcccgaaaactaattacagatgctggaagcaatgcaaaaattatatctaaaatagaaagagctgaagtagttaaatccgatgacacaatagatgatattattaaagcatctgatgcagttatgatagctagaggagatttaggaatagaaattggagaaccacaattagtaggaatacaaaaaaaaattatacaaagagcacatctcctaaatagagctgttattacagcaacacaaatgatggaatccatgataattaattcggttcctactcgagcagaaatcatggatgtcgccaatgcagtattggatggaacagatgcggttatgttatccgcagaaactgcaaccggacagtatccatctgaaaccgtttcttctatggctgatgtctgtttaggagcagaaaaaactctaaataatactaataatcaattaatatttatcaatcaactacaaaaaaaaattaacaataccaaagaagctattgcagcatcaacaatgcatatagctaattgtttaagtaaaatacgtgcaattatttctataactgattgggaacatattgtattattattatctcgatttaactctcaattacctatttttgctttatccaaacacattcatattcttaacattgttactttatataaaggagtaatacctatttattttaatcgaactggtaataatataatagatgcaagacaggcgagtaacttattgcgagatcaaggttttctaacacctggagaactagtaataataatacaagataatattgtgaatcaatctaatattaataacgtaactcatattcttacaatagaagaacaatgtaaataa

SEQ ID NO: 7499 - protein, 488 aa, Candidatus Blochmannia floridanus
MPQLLRRTKIIATLGPATDQKNTLEKIIISGVNIVRLNFSHGNSSEHFFRANKVRKLANQLHKYIAILGDLQGPKIRISTFQTNNIYLQSGDDFLIDSTLKNSHNNQKYVGVNYKELPQDVSPGDYLLLDDGKIQLKVIKIQNTQIFTKVVIGGLLSNNKGINKLGGGLSAKVLTNKDKLDIITAAKIGVDYLAISFPRNSMDLNFARKLITDAGSNAKIISKIERAEVVKSDDTIDDIIKASDAVMIARGDLGIEIGEPQLVGIQKKIIQRAHLLNRAVITATQMMESMIINSVPTRAEIMDVANAVLDGTDAVMLSAETATGQYPSETVSSMADVCLGAEKTLNNTNNQLIFINQLQKKINNTKEAIAASTMHIANCLSKIRAIISITDWEHIVLLLSRFNSQLPIFALSKHIHILNIVTLYKGVIPIYFNRTGNNIIDARQASNLLRDQGFLTPGELVIIIQDNIVNQSNINNVTHILTIEEQCK

SEQ ID NO: 7500 - DNA, 1443 bp, Bordetella parapertussis
  CDS (1)..(1443)
atgcccgtactgcgccgcaccaaaatcgttgccaccctggggcccgccacgtccacgcccgagcggctcgacgggctgatacgcgccggcatggacgtggcccgcctgaatttctcgcacggcagcgcgcaggaccatcgcgagcgcgtgcggctggtgcgcgagctggcggccgagcaagggcgcttcgtggccctcatgggcgacttgcagggcccgaagatccggatcgcccgcttcaccgaccagcaggtcaccctgcaggccggccagcctttcacgctgtcgcgttcacattccaaggaggccggcgacgcaaccatcgtgggtatcgattatcccgagctggtgcaggactgccgccctggcgacgagctgctgctcgacgatggccgcgtggtgctggtggtcgacagcgtgggggccgaggaggtccacaccaccgtgacggtgggcgggccgctgtcgaacaacaagggcatcaaccggcgcggcggcggcctttcggcgcccagcctcaccgacaaggaccgcaccgacatcaagctggccgccgagatggagctggactacgtggccgtatcgtttccgcgctatggggccgacatcgatgaagcccgcgcgctgctgcgcgcggccggcagccaggcctggatcatcgccaagatcgagcgcgccgaggcggtggccgacgacgacgcgctggatgcgctgatccgcgccagcgacggcgtgatggtggcgcgcggcgacctgggcgtggaagtgggcgacgccgaactggtcggcatccagaagcgcatcatccagcacgcgcgtacgctgaacaaggtggtcatcacggccacccagatgatggagtccatggtggccagccccatgcccacgcgcgccgaggtgtcggacgtggccaacgcggtgctcgactacacggacgccgtcatgctgtcggccgaaagcgcctcgggccagtatccgatcgaggcggtggcggcgatggcacgggtctgtctgggggcggagaagcaccccaccaccacgcattcgcaccatcgcctgggcgagacgttcacgcgctgcgacgagaccatcgcgctggcggccatgtacgcggccaaccatttcccgggcgtgaaggccatcatcgcgctgaccgaaagcgggcacacgccgctgatcatgtcgcgcatccgttcgggcgtgccgatctactgctacagcccgcatggccccacgcagcggcgcgcggcgctgtttcgcggcgtctacacggtgcccttcgcgccggccgaatacgacccggccgacttgagcaacgcggccatcgatgagctgaagaagcgtggccgtgtcgcggcgggcgactgggtcatcctgaccaagggcgatttctaccgcgacagcggcggcaccaacggcctgaagatcctgaaggtggaatag

SEQ ID NO: 7501 - protein, 480 aa, Bordetella parapertussis
MPVLRRTKIVATLGPATSTPERLDGLIRAGMDVARLNFSHGSAQDHRERVRLVRELAAEQGRFVALMGDLQGPKIRIARFTDQQVTLQAGQPFTLSRSHSKEAGDATIVGIDYPELVQDCRPGDELLLDDGRVVLVVDSVGAEEVHTTVTVGGPLSNNKGINRRGGGLSAPSLTDKDRTDIKLAAEMELDYVAVSFPRYGADIDEARALLRAAGSQAWIIAKIERAEAVADDDALDALIRASDGVMVARGDLGVEVGDAELVGIQKRIIQHARTLNKVVITATQMMESMVASPMPTRAEVSDVANAVLDYTDAVMLSAESASGQYPIEAVAAMARVCLGAEKHPTTTHSHHRLGETFTRCDETIALAAMYAANHFPGVKAIIALTESGHTPLIMSRIRSGVPIYCYSPHGPTQRRAALFRGVYTVPFAPAEYDPADLSNAAIDELKKRGRVAAGDWVILTKGDFYRDSGGTNGLKILKVE

SEQ ID NO: 7502 - DNA, 2002 bp, Oryza sativa
  CDS (113)..(1648)
gagccagcacaactcacacaactctctctctctctctctctctctctctctcgtcgtctgcaagcttccgcctcccggatcgcggcgaccaccggaggaggagggagcagccatggcgaacatcgacatggggaagatcctggcggggctggagaacgacgacgcgcgggtgcccaagaccaagctggtctgcacgctcggcccggcctcccgctccgtccccatgctcgagaagctgctccgcgccgggatgaacgtcgcgcgcttcaacttctcccacggcacccacgagtaccaccaggagaccctcgacaacctccgccaggccatgcacaacaccggcgtcctctgcgccgtcatgctcgataccaagggtcctgagattcgtactggatttttgaaggatggcaagccaatcaagctaacaaagggtcaagaactcactgttaccaccgattatgagatcaagggtgatgagaacatgattaccatgagttacaagaaactgccagttgatgtgaagcctggaaatgtcattctctgcgccgatggtacaatctctttgactgttttgtcctgtgatccaaaggctggaactgtgaggtgtaggtgtgagaacacagcaatgcttggcgagagaaagaattgcaatctgccaggaattgttgtggaccttcctacactgactgagaaggataaagaagacattttgggatggggtgtgccaaatgacatagacatgattgctctgtcgtttgtccgtaaaggatcagatttggttaccgtcagacaacttcttggacagcatgcaaagcgcatcaagctgatgtcaaaggttgaaaaccaagagggtgttgtaaacttcgatgagatcttgagggaaacggatgcatttatggttgctagaggtgatcttggaatggagattccagttgagaagatattccttgcacagaagatgatgatttacaagtgcaaccttgctggaaagcctgttgtgactgctactcagatgcttgagtcgatgatcaaatcaccacgtccaactcgtgctgaggcaactgacgttgcaaatgcagttcttgatggaactgactgcgtcatgcttagtggagagagtgctgctggagcataccctgaagtagctgtgaagatcatggcacgtatatgtgttgaggcagagtcttcccttgacaacgaagctgtcttcaaggagatgatcaggtctgcgccccttccgatgagcccattggagtctctcgcatcctctgctgtacgcacagccaacaaggccaaggcagccctgattgttgtcttgactcgtggtggtaccacggcaaagctggttgccaagtatcgtcccagggttccaatcctctctgtggttgtccccgtgttgacaaccgattcattcgactggacaatcagctcggagggcccagcaaggcacagcctaatctacagaggtcttgttcctctcctggctgagggttctgccaaagccaccgattcggagtcgacagaggtcatccttgatgctgctctcaagtcagctgtacagaagcagttgtgcaagcctggtgatgctgttgttgctctgcaccgtattggcgtcgcatccgtgatcaagatctgcatcgtgaagtaatcgctacacggtgtcttcttagcgccattttgctgggttaagtggcaaaacaaaaactgctatgcttgtttttactcccatagtccatctttgggagacaatttaattaccgtatcagcccctgcagttcgcagggtgcctttcgttacatagatttgctggtaaaatgaggagagatagaactccattatgtagagctctatttatcgtcgatgccatgtagtatggcaggtggtttctattccatgcctgcacaattttctggtagctactgtgttgtttgattactgttttttcaggtgatgtcgatggagttgataataatattggcatcattgtcgttgtatacgagtt

SEQ ID NO: 7503 - protein, 511 aa, Oryza sativa
MANIDMGKILAGLENDDARVPKTKLVCTLGPASRSVPMLEKLLRAGMNVARFNFSHGTHEYHQETLDNLRQAMHNTGVLCAVMLDTKGPEIRTGFLKDGKPIKLTKGQELTVTTDYEIKGDENMITMSYKKLPVDVKPGNVILCADGTISLTVLSCDPKAGTVRCRCENTAMLGERKNCNLPGIVVDLPTLTEKDKEDILGWGVPNDIDMIALSFVRKGSDLVTVRQLLGQHAKRIKLMSKVENQEGVVNFDEILRETDAFMVARGDLGMEIPVEKIFLAQKMMIYKCNLAGKPVVTATQMLESMIKSPRPTRAEATDVANAVLDGTDCVMLSGESAAGAYPEVAVKIMARICVEAESSLDNEAVFKEMIRSAPLPMSPLESLASSAVRTANKAKAALIVVLTRGGTTAKLVAKYRPRVPILSVVVPVLTTDSFDWTISSEGPARHSLIYRGLVPLLAEGSAKATDSESTEVILDAALKSAVQKQLCKPGDAVVALHRIGVASVIKICIVK

SEQ ID NO: 7504 - DNA, 1071 bp, Bacillus cereus
  CDS (1)..(1071)
atggtgacaaaaatgacaatcgatcgaatttgtacaattggacccgcaagtaataataaagaaacgttagcacagttaataaagaatggtatgaaaattgttcgactgaatttatcgcatggcacgcatgaaagtcataaagacatcattcgtttagtgaaatcattagatgactctattaaatttttgggtgatgtacaaggtcctaaaataagattaggtgaagtgaagggagagcaaattacacttcaggcaggagattcttttattttacatacacaaccagttacagggagtaatacagaagcaagcgttgattatgaaggaattgcgaatgatgtgaaagtaggcagtagaattttaattaatgatggagaagttgaattaattgttgaaaagataagtacggacaaaatagaaacgaaggtaaaaacaggtggcaatatctcatctcataaaggagttaatttaccagatgcggctgttcgtttaccagctattacagagaaagataaaaaagatattcagtttcttttagaagagaatgttgattttatcgcgtgttctttcgtaagaaaacctagtcatataaaagaaatacgagattttatacaacagtataaagaaacgtcacctaatgtaattgcaaaaatagaaacgatggaagcaatcgagaattttcaagatatatgtaaagaagcagatggaattatgattgcaaggggcgatttaggagtagagttaccgtatcaatgcattccgcttttacagaaaatgatgattcaggaatgtaatcgaacgaatacatatgtcattacagcaacacaaatgcttcaatctatggtagatcattctattccaacaagggcagaggtgactgatgtgtttcaagctgtactggacgggacgaatgcagttatgctttcagctgaaagtgcatcaggagagcatccaatcgaaagtgtgagaacattacgtctcgtttcagaatttgcggaacatgttaaaaaagatggaccttttgcgatgaaagatgtactgcaattactgcgtgagtctctggatgagtaa

SEQ ID NO: 7505 - protein, 356 aa, Bacillus cereus
MVTKMTIDRICTIGPASNNKETLAQLIKNGMKIVRLNLSHGTHESHKDIIRLVKSLDDSIKFLGDVQGPKIRLGEVKGEQITLQAGDSFILHTQPVTGSNTEASVDYEGIANDVKVGSRILINDGEVELIVEKISTDKIETKVKTGGNISSHKGVNLPDAAVRLPAITEKDKKDIQFLLEENVDFIACSFVRKPSHIKEIRDFIQQYKETSPNVIAKIETMEAIENFQDICKEADGIMIARGDLGVELPYQCIPLLQKMMIQECNRTNTYVITATQMLQSMVDHSIPTRAEVTDVFQAVLDGTNAVMLSAESASGEHPIESVRTLRLVSEFAEHVKKDGPFAMKDVLQLLRESLDE

SEQ ID NO: 7506 - DNA, 1059 bp, Bacillus anthracis
  CDS (1)..(1059)
atgacaatcgatcgagtttgtacaattgggccagcaagtaataataaagaaacgttagcgaagttaataaacaatggtatgaaaattgttcgtctaaatttatcacatggtacgcatgaaagtcataaagatattattcgtttagtgaaatcgttagatgattctattaaaattttaggcgatgtacaaggtcctaaaataaggttaggtgaaataaaaggagaacaaattacacttcaggcgggagattcttttatgttacgtacgcaaccagttacagggagtagtacggaagcaagtgttgattatgaaggaatcgcgaatgatgtgaaagttggaagtagaattttaatgaatgatggcgaagttgagttaattgttgagaaggtaagtacggataaaatagaaacaaaggtcaaaacaggtggtaatatctcatcacataaaggagtgaacttaccaggggcaatcgttagtttaccagctattacagagaaagataaaaaagatattcagtttcttttagaagaggatgttgattttattgcgtgttctttcgtaagaaaacctagtcatataaaagaaatacgagattttatacaacagtataaagaaacgtcacctaatttaattgcaaaaatagaaacgatggaagcaatcgagaattttcaagatatatgtaaagaagcagacggaattatgattgcaaggggcgatttaggagttgagttgccgtatcaatttattccgctcttgcagaaaatgatgattcaggaatgtaatcgaacgaatacatatgttattacagcgacacaaatgcttcaatctatggtagatcattcgattccaacaagggctgaggtaactgatgtgtttcaagctgtactggatggaacgaatgctgttatgctttctgctgaaagtgcttcaggagagcatccggttgaaagtgtgagtacactacgtctcgtttctgaatttgctgagcatgtaaaaaaagacggtccttttgtgatgaaagatgtactggaattgctgcataaatctttggatgagtga

SEQ ID NO: 7507 - protein, 352 aa, Bacillus anthracis
MTIDRVCTIGPASNNKETLAKLINNGMKIVRLNLSHGTHESHKDIIRLVKSLDDSIKILGDVQGPKIRLGEIKGEQITLQAGDSFMLRTQPVTGSSTEASVDYEGIANDVKVGSRILMNDGEVELIVEKVSTDKIETKVKTGGNISSHKGVNLPGAIVSLPAITEKDKKDIQFLLEEDVDFIACSFVRKPSHIKEIRDFIQQYKETSPNLIAKIETMEAIENFQDICKEADGIMIARGDLGVELPYQFIPLLQKMMIQECNRTNTYVITATQMLQSMVDHSIPTRAEVTDVFQAVLDGTNAVMLSAESASGEHPVESVSTLRLVSEFAEHVKKDGPFVMKDVLELLHKSLDE

SEQ ID NO: 7508 - DNA, 1446 bp, Chlamydophila caviae
  CDS (1)..(1446)
atgatcgcaagaacgaaaatcatttgtactataggtccagcaacaaacactccagaaatgcttgagaagcttttagatgcgggtatgaatgttgctaggttgaattttagtcatggtactcatgaaagtcatggtgagacaattcgtcttcttaaggaattgcgagaaaagaaaggggctcctttagcgattatgttggataccaagggtccagaaattcgtttagggaatattcccacaccaattcaggtatctcgaggtcagaaaattaccttagtaggaaaagaggtagagggatctgccgaaggtggcgttaccttacatcctcaatgtgttttcccttatgtgcgtgagggtgttgatgtcttgatagacgatggttatattcaagctgttgtgacctctgttggtgaggatcatctagaattagagtttattaactctggagaattaaagtcgcacaagtctttaagcataagagaaattgatttagctcttccttttatgacggataaggatatcaatgatcttcagtttggcgttgcgcagggcgttgatgttattgctgcttcttttgtccgttatgctgaggatatcgaaagtatgcgcaagtgcttagcagatgctggccgtccggatatgcccattattgctaagatagaaaatcgtttgggagtagagaatttttctcagattgctaaagcttccgatgggattatgattgcccgtggagatttagggattgagctttctgttgttgaggtccctaatttacagaagtttatggcaaagatgtctcgtgaaatgggacgtttttgcattaccgctacgcaaatgttagaatctatgattcgcaatgttttaccgacacgagcagaagtttctgatgttgctaatgctatttatgatggtacctcagcagtaatgttatctggggaaacggcctcgggaagttatcctgtcgcggctgtgaaaattatgcgttctgtgattcaagagacagaaaaaaatcttaattataagtctttcttagaacttagcgatagtgaatgtgctgttaaggtatccccttatcttaagtctataggtttatcaggaattcaaattgctgagaaagctgatgctaaagccattatcgtttacacggaatccggaggatcacccattttcctttctaaataccgtccgcgttttccaattattgctgttacaccaaatctatctgtgtattacaggcttgctttagagtggggagtctatcctatgcttacgcaagagtcagaccgtgcagtatggagacatcaagcttgtatttatggaatcgaaagaggaattttatcaaattatgataagattttagttttgagtcgtggcgctcaaatgaaagatactaataatcttaccttaacaacggtaaatgatatcatcacagcatcagctaaataa

SEQ ID NO: 7509 - protein, 481 aa, Chlamydophila caviae
MIARTKIICTIGPATNTPEMLEKLLDAGMNVARLNFSHGTHESHGETIRLLKELREKKGAPLAIMLDTKGPEIRLGNIPTPIQVSRGQKITLVGKEVEGSAEGGVTLHPQCVFPYVREGVDVLIDDGYIQAVVTSVGEDHLELEFINSGELKSHKSLSIREIDLALPFMTDKDINDLQFGVAQGVDVIAASFVRYAEDIESMRKCLADAGRPDMPIIAKIENRLGVENFSQIAKASDGIMIARGDLGIELSVVEVPNLQKFMAKMSREMGRFCITATQMLESMIRNVLPTRAEVSDVANAIYDGTSAVMLSGETASGSYPVAAVKIMRSVIQETEKNLNYKSFLELSDSECAVKVSPYLKSIGLSGIQIAEKADAKAIIVYTESGGSPIFLSKYRPRFPIIAVTPNLSVYYRLALEWGVYPMLTQESDRAVWRHQACIYGIERGILSNYDKILVLSRGAQMKDTNNLTLTTVNDIITASAK

SEQ ID NO: 7510 - DNA, 1437 bp, Streptomyces avermitilis
  CDS (1)..(1437)
atgcgccgagcaaagatcgtctgtactctgggccccgccaccgactcgtacgaccagatcaaggcactggtcgaggccggaatggacgtagcccgcttcaacctcagccacggcacctacgccgagcacgaggagcgttaccagcacgtccgcaaggcctccgacgagaccgggcgcagcgtcggagtcctcggcgaccttcaaggtccgaagatccgcctcggccgcttcaacgaaggacccgtactccttgaacgcggcgacaccttcaccatcaccgtcgaggaaggcgtcgaaggcgaccgccagacctgcggcaccacctacgccggcctcgccgccgacgtcactcccggtgagcgcatcctcgtcgacgacggcaaggtctgcctcgaagtcacctccgtcgacggcccccgcgtccacaccaccgtcgtcgaaggcggcatggtctccgaccacaagggcctgaacctgcccggcgtggccgtctcggtccccgccctctccgacaaggacgaggccgacctccgctgggccctccgtcagggcttcgacgtcatcgcgctgtccttcgtacgcagcggcaaggacatcaaggacgtccaccggatcatggacgaagaaggccgccggctccccgtcatcgccaaggtggaaaagccccaggccgtcgagaacatcgacgacatcgtcgccgccttcgacggaatcatggtcgcccgcggagacctcggcgtggaaatgccgctcgaacaggtcccgatcgtccagaagcgcgccatcaaactcgccaggcgcaacgcgaagccggtcatcgtcgcgacgcagatgctggactccatgatcgacaactcccgcccgacccgcgcggaggcctcggacgtcgccaacgccgtcatcgacggcaccgacgcggtgatgctgtccggcgagacgagcgtgggcaagtaccccgtcgaaacggtccgcaccatgtcccgcatcgtggaagcggcggaagaggacatcctggccacgggcctgccgccgctgaccgaacgcaacaagccccgcacccagggcggcgcggtggcccgcgcggcggccgagatgggcgacttcctcggcgccaagttcctggtggcgttcacgcagtccggagacacggtccgccgcctctcgcgctaccgttccccgatcccgctcctggccttcaccccgatgccggcgacgcgctcccagctcaacctgacatggggcgtggagacgttcctgggcccgcacgtggattcgacggacgcgatggtggaccaggtcgacgagctgctgctcaagtacggccgctgcgagaagggcgacgtggtggtcatcacggcgggctcaccccccggcgtctcgggctcgacgaacctggtccgagtccaccacatcggcgaggacgacagccccaagtag

SEQ ID NO: 7511 - protein, 478 aa, Streptomyces avermitilis
MRRAKIVCTLGPATDSYDQIKALVEAGMDVARFNLSHGTYAEHEERYQHVRKASDETGRSVGVLGDLQGPKIRLGRFNEGPVLLERGDTFTITVEEGVEGDRQTCGTTYAGLAADVTPGERILVDDGKVCLEVTSVDGPRVHTTVVEGGMVSDHKGLNLPGVAVSVPALSDKDEADLRWALRQGFDVIALSFVRSGKDIKDVHRIMDEEGRRLPVIAKVEKPQAVENIDDIVAAFDGIMVARGDLGVEMPLEQVPIVQKRAIKLARRNAKPVIVATQMLDSMIDNSRPTRAEASDVANAVIDGTDAVMLSGETSVGKYPVETVRTMSRIVEAAEEDILATGLPPLTERNKPRTQGGAVARAAAEMGDFLGAKFLVAFTQSGDTVRRLSRYRSPIPLLAFTPMPATRSQLNLTWGVETFLGPHVDSTDAMVDQVDELLLKYGRCEKGDVVVITAGSPPGVSGSTNLVRVHHIGEDDSPK

SEQ ID NO: 7512 - DNA, 1431 bp, Streptomyces avermitilis
  CDS (1)..(1431)
atgcgccgttcgaaaatcgtctgtactctcggccccgcggtcgactcccacgagcagctcgtcacgctgatcgaggccggcatgaacgtggcccgcttcaacttcagccacggcacgcacgccgagcaccagggccggtacgaccgggtccgggccgcggccgccgagaccggcaaggccatcggtgtcctcgcggacctccagggcccgaagatccggctggagaccttcgccgagggtcccgtcgagctggtgcgcggtgacgagttcatcatcaccaccgaggacgtgccgggcgacaagcacatctgcggcacgacgtacaagggcctgcccggggacgtctccaagggcgaccagatcctcatcaacgacggcaacgtcgagctgcgggtcgtcgaggtcgacgggccgcgggtcaagacggtcgtcatcgagggcggcgtgatctccgaccacaagggcatcaacctgcccggcgcggccgtgaacgtgcccgcgctgtccgacaaggacatcgaggacctgcgcttcgccctgaagatgggctgcgacctggtcgcgctgtccttcgtgcgcgacgcgagcgacgtgaaggacgtccacaaggtgatggacgaggagggccgccgggtccccgtcatcgccaaggtggagaagccgcaggcggtggagaacatggaggccgtcgtcgcggccttcgacggcgtgatggtggcgcgcggcgacctggccgtcgagtacccgctcgagaaggtcccgatggtgcagaagcgcctcgtggagctgtgccgccgcaacgccaagccggtgatcgtcgcgacccagatgatggagtcgatgatcaccaactcccgcccgacgcgcgccgaggcgtccgacgtggccaacgcgatcctcgacggcgcggacgcggtgatgctgtccgccgagtcgtcggtcggcgcctacccgatcgagacggtcaagacgatgtcgaagatcgtcacggcggcggaggaagagctgctgtcgaagggcctgcagccgctggtccccggcaagaagccccgtacgcagggtggttcggtcgcccgcgcggcctgcgagatcgccgacttcctgggcggcaagggcctggtggccttcaccaagtcgggcgacaccgcccgtcggctctcccgctatcgcgcggcccagccgatcctggccttcaccacggacgagggcacgcgcaaccagctcgcactgagctggggcgtcgagtcccacgtcgtgccgttcgtgaacagcaccgacgagatggtcgacctggtcgactccgagctgcagaacctgaagcggttcaacgacggcgacgtcgtcgtgatgaccgccggctcgccccccggcgtcccgggcacgacgaacatggtgcgagtgcaccacctgggcgagggcaagcgcgcctga

SEQ ID NO: 7513 - protein, 476 aa, Streptomyces avermitilis
MRRSKIVCTLGPAVDSHEQLVTLIEAGMNVARFNFSHGTHAEHQGRYDRVRAAAAETGKAIGVLADLQGPKIRLETFAEGPVELVRGDEFIITTEDVPGDKHICGTTYKGLPGDVSKGDQILINDGNVELRVVEVDGPRVKTVVIEGGVISDHKGINLPGAAVNVPALSDKDIEDLRFALKMGCDLVALSFVRDASDVKDVHKVMDEEGRRVPVIAKVEKPQAVENMEAVVAAFDGVMVARGDLAVEYPLEKVPMVQKRLVELCRRNAKPVIVATQMMESMITNSRPTRAEASDVANAILDGADAVMLSAESSVGAYPIETVKTMSKIVTAAEEELLSKGLQPLVPGKKPRTQGGSVARAACEIADFLGGKGLVAFTKSGDTARRLSRYRAAQPILAFTTDEGTRNQLALSWGVESHVVPFVNSTDEMVDLVDSELQNLKRFNDGDVVVMTAGSPPGVPGTTNMVRVHHLGEGKRA

SEQ ID NO: 7514 - DNA, 1491 bp, Nitrosomonas europaea
  CDS (1)..(1491)
atgatgcgaagaacaaaaattgtagcaacgttaggaccggcttccagtaatgctgaagttctggggcgaatgctcgaagctggtgtcgatgttatccgtatcaatttctcacacggaacaaaagatgagcacatcgcttccgtagaactggttcgttcgctcgcccgctcgcttggccgtacagtcggtgtactggctgatttacaggggccaaaaattcgtatcggtaagtttgaacagggaaaaattcgactcaaaaccggggatgaattcatactcgatgcagaatgccagctgggaaaccaggaacgggtcggactggattatcgggaacttcctaatgatgtcgaagcaggcgccacgctcttattggatgatggacgtatcgttctgacggtggccaaagtcagagaaagtgaaatcttttgtgaagtgttgcagggcgggattctttccaacaataaaggtattaaccggaaaggcggagggttgagcgcacctgcactcactgcgaaagatttactggatatcaagacttccgcagtcattcgagcagattatctcgcagtatccttccctcgctccggtgacgatatcagacgcgcgcgcgcactgatgcaggaagctcaggggcatagtttgctcatggcaaaaatcgagcgctcagaagccattctggcactggatgatattctggaagcgtctgatgccatcatggtggcccgtggagatctggcagtcgaagtaggagatgccgctgttcccgccttgcaaaaacgcatgatacgatctgcacgtgaagcaaataagctggtaattaccgctacgcaaatgatggaatccatgatttccaaccctattccgacacgcgcagaagtatcagatgttgccaatgccgtactggatggtaccgatgcagtcatgctgtccgctgagtcggccgcagggcaatacccggttgaagccgtcgaagccatggccagagtttgtctcgaagcagaaaaggaatatacacccagtttgagagcacgccgttcccccgatacacagtcaatcagtattgaagatgccattgcgcgcgctaccatgtacgcagccggttcactcaatatccaggcaattgcagcattgacacaaagtggtgtaacagcgttgttcatgtcacgcagaagttcgaaagcacccatctttgcactcagcccgcaagaagataccctgggtaaagtcacccttttccgaggcgtttatcccatagaattcggacaaggactgtgtgatcccgaaatcatcctaggcatggctgaagacgagttactcaagcgtggtgcggtacgcgacgaagatctgataatcatgacgatcggtgaaccggttggcaaagctggcgggacgaacaccatgaagatcatcaaagtaggcagttccaagaaagctgcacaagcagtaagagaagtggcgcaacaacccttttctgatccgcagaatctgtaa

SEQ ID NO: 7515 - protein, 496 aa, Nitrosomonas europaea
MMRRTKIVATLGPASSNAEVLGRMLEAGVDVIRINFSHGTKDEHIASVELVRSLARSLGRTVGVLADLQGPKIRIGKFEQGKIRLKTGDEFILDAECQLGNQERVGLDYRELPNDVEAGATLLLDDGRIVLTVAKVRESEIFCEVLQGGILSNNKGINRKGGGLSAPALTAKDLLDIKTSAVIRADYLAVSFPRSGDDIRRARALMQEAQGHSLLMAKIERSEAILALDDILEASDAIMVARGDLAVEVGDAAVPALQKRMIRSAREANKLVITATQMMESMISNPIPTRAEVSDVANAVLDGTDAVMLSAESAAGQYPVEAVEAMARVCLEAEKEYTPSLRARRSPDTQSISIEDAIARATMYAAGSLNIQAIAALTQSGVTALFMSRRSSKAPIFALSPQEDTLGKVTLFRGVYPIEFGQGLCDPEIILGMAEDELLKRGAVRDEDLIIMTIGEPVGKAGGTNTMKIIKVGSSKKAAQAVREVAQQPFSDPQNL

SEQ ID NO: 7516 - DNA, 1758 bp, Enterococcus faecalis
  CDS (1)..(1758)
atgaaaaaaacgaaaatcgtatgtacgattggaccagctagtgaatccgttgatatgctagtaaacttaattaatgcaggtatgaatgtttgccgtttgaacttttcacatggtgactacgaagagcatggtgctcgtattaaaaacattcgtgaagctgtaaaaattacagggaaacgcgtagcgatcttactagatacaaaaggtcctgaaatccgcacaaatgacatggaaaatggcgcaatcacaatgaaaattggtgactcagtacgtatttctatgacagaagttttaggaacaaatgaaaaattctcaatcacttatccagaattaatcaatgatgtaaacgtaggttcacacattcttttagatgatggtttaatcgatttagaagtaactgatatcgaccgtgatgcaaacgaaatcgtaacagttgttaaaaacgaaggcgtcttgaaaaacaaaaaaggcgttaacgtaccaggcgtttctgtaaacttaccagggatcactgaaaaagatgctaacgatatccgtttcggaattggtcaaggaattgactttatcgcagctagcttcgttcgtcgtgcttctgacgttttagaaatcactaaaattttagaagaagaaaacgcaacacacatccaaatcattcctaaaatcgaaaaccaagaaggtatcgataatatcgatgaaatcttaaaagtttctgatggtttaatggttgctcgtggtgacatgggtgttgaaattccaacagaagatgttccagttgtccaaaaagctttaattaaaaaatgtaatgctttaggtaaaccagttatcactgcaacacaaatgttagattcaatgcaacgtaacccacgtccaacacgtgcggaagcaaatgacgtagcaaacgcaatctacgatggaacagatgcagtaatgttatcaggcgaaactgcagcaggggattacccattagaagctgttcaaacaatggctcgtattgcagttcgtacagaagaaacattagttaaccaagattcattcgcattgaaattatatagcaaaacagatatgactgaagcaatcggacaatctgttggccatacagcacgtaacttgggtatccaaacaatcgttgcggcaacagaatcaggccatacagcacgtatgatctctaaataccgtccaaaagcacatatcgttgcaattacgttctcagaacaaaaagcacgtagcttgtcattatcatggggtgtttacgcaacagttgctgacaaaccatcaagcacagatgaaatgtttaatttagcttcaaaagtatcacaagaagaaggttatgcttcagaaggtgatttaatcattatcactgctggtgttccagttggcgaaaaagggacaacaaacttaatgaaaattcaaatgatcggttctaaattagttcaaggtcaaggtgtcggcgaagaagcaattattgcaaaagccgttgtggcagcaactgctgaagaagcagttgctaaagcgactgaaggagctattttagttacaaaaacaacagataaagaatacatgccagcaattgaaaaagcatcagcattagttgttgaagaaggtggtttaacttctcatgcagctgttgtagcgattgcgcaaaatattccagttatcgtaggtgctgcagatgcaacatcattaattaataatgacgaagtgattactgttgatcctcgtcgtggtattgtttaccgcggagcaacaacagctatctaa

SEQ ID NO: 7517 - protein, 585 aa, Enterococcus faecalis
MKKTKIVCTIGPASESVDMLVNLINAGMNVCRLNFSHGDYEEHGARIKNIREAVKITGKRVAILLDTKGPEIRTNDMENGAITMKIGDSVRISMTEVLGTNEKFSITYPELINDVNVGSHILLDDGLIDLEVTDIDRDANEIVTVVKNEGVLKNKKGVNVPGVSVNLPGITEKDANDIRFGIGQGIDFIAASFVRRASDVLEITKILEEENATHIQIIPKIENQEGIDNIDEILKVSDGLMVARGDMGVEIPTEDVPVVQKALIKKCNALGKPVITATQMLDSMQRNPRPTRAEANDVANAIYDGTDAVMLSGETAAGDYPLEAVQTMARIAVRTEETLVNQDSFALKLYSKTDMTEAIGQSVGHTARNLGIQTIVAATESGHTARMISKYRPKAHIVAITFSEQKARSLSLSWGVYATVADKPSSTDEMFNLASKVSQEEGYASEGDLIIITAGVPVGEKGTTNLMKIQMIGSKLVQGQGVGEEAIIAKAVVAATAEEAVAKATEGAILVTKTTDKEYMPAIEKASALVVEEGGLTSHAAVVAIAQNIPVIVGAADATSLINNDEVITVDPRRGIVYRGATTAI

SEQ ID NO: 7518 - DNA, 1434 bp, Coxiella burnetii
  CDS (1)..(1434)
atgttacgcagcaccaaaattattgccactttagggccggcaaccgatgatctttctatacttgaggaaattattcacgagggggttgacattattcgcttgaatttctcgcacggcactcacgagaaacacaaacaacggattgaaatggttcgcaaggcggcgaaaaaacaagaacgggtaatcggaattttagcggatttgcaagggcctaaaattcgcatatccagttttaaaactggcaaaattaatttaaaaaaaggcgagttatttattttggacgccgggctcccgcccgaagaaggtacagagaaaagcgttgggattgattataaaaatttgccgaaggacgtaaaagccgaagatattttattgttggatgatgggcgccttaccttaaaggtgcaaaacgtcaagggagaacaaattatttgtcgcgttgttgaaggcggcgcgttgtcagatcacaaaggcattaatcgattaggcggcgggctttcagcggaagcgatgacggaaaaagatatcaacgatttgaaatttgcagttgattttgatgtggattatgtggctatttcatttccccgcgatgcgcaggatattttaaaagccaagcatctggtgcaaggttacaaaggaaaggcgggtatcattgctaaaattgaacgtactgaagcggttaaaaatatcgacgccattattgaagcgagcgacggcgtcatggtggcgcgaggcgatttagcggtcgaaattggcgatgcacaagtgcctttggtgcaaaaagatattattcatcgcgctcgttccatggataaacccgtcattatcgcgactcaaatgatggagtccatgattcacgcgaccgtgcccacacgggctgaagtgtctgatgtggcaaatgccgtactcgataataccgatgccgttatgttgtcagcggaaaccgctgttggcgattatcccgttttagccgtagccgcgatggcgcgaacgtgcgttgtttcggaatctcagccgcgttcgcatatttctcgtcatcgcgttgaatgccgtttcaaacggattgatgaagccattgcgatggcaactatgtatgcagctaatcatctcgatatcaaagccatcatcaccttaaccgaatcgggaatcacccccttgtggatgtcgcgtatccgtacggctatccctatttatggtctcagtcgattcgataaatcgctcgggcgaatgacactttatcgcggtgtttaccctattaaatttgatccaactcaatacacgcgcgacgaaattaatgtaaaagccgttgaaacgttgcaaagtcaggacttattgaaaaacggcgatttagtggtcttaaccaaaggcgattacatgggcgtgggtggcgggtctaacgcaatgaaaattatggtggtggggaaagtcgtttaa

SEQ ID NO: 7519 - protein, 477 aa, Coxiella burnetii
MLRSTKIIATLGPATDDLSILEEIIHEGVDIIRLNFSHGTHEKHKQRIEMVRKAAKKQERVIGILADLQGPKIRISSFKTGKINLKKGELFILDAGLPPEEGTEKSVGIDYKNLPKDVKAEDILLLDDGRLTLKVQNVKGEQIICRVVEGGALSDHKGINRLGGGLSAEAMTEKDINDLKFAVDFDVDYVAISFPRDAQDILKAKHLVQGYKGKAGIIAKIERTEAVKNIDAIIEASDGVMVARGDLAVEIGDAQVPLVQKDIIHRARSMDKPVIIATQMMESMIHATVPTRAEVSDVANAVLDNTDAVMLSAETAVGDYPVLAVAAMARTCVVSESQPRSHISRHRVECRFKRIDEAIAMATMYAANHLDIKAIITLTESGITPLWMSRIRTAIPIYGLSRFDKSLGRMTLYRGVYPIKFDPTQYTRDEINVKAVETLQSQDLLKNGDLVVLTKGDYMGVGGGSNAMKIMVVGKVV

SEQ ID NO: 7520 - DNA, 1422 bp, Tropheryma whipplei
  CDS (1)..(1422)
atgtttatgcgtagggccaagattgttgttactctcggtccggcagtatcagatcttgattctgtgagagatcttatatccgctggtgccgacgtctttcgcatgaatctcagccacggatcgttggattttcacagggaggtatttctgaatgttaggacggctgctgctgagctagacaggcatattgctatatttgctgatcttcagggtccaaaaatacgtttagggcgttttgcttctgggccgtataccctacaagagggtgatatctttacaatcacaaccgagcaggtgttgggaacgaaagagctttccagcacaactttgccgacattaccagataatgtctcagagggggatttgcttttaattgatgatggcaaagttgccctgagggcgattgggaatgacggggttcggatcactacacgtgttgaagttccgggaaaggtctcgaataataagggtattaaccttccgggtgttggagttaaagttccggccttatctgaaaaggatattgactcactccgctgggccctttctcttccagttgatatgattgccttgagttttgtgcgctgcgcatcagatgtggatgctgtgcacaaggttatggatgaagagggtattcgccttcctgttattgcaaagatagaaaagcctcaagcagtatctgccatagaggagattgcactgcggtttgatgcgattatggtagcaaggggtgatcttggggttgaactgccgcttgaagatgtgccggtagcccagaaggaaattgttaaggttgcacgcaggtttgctcggccggttattatcgcaacccagatgcttgagtcaatgatctcttcctcgcggcccaccagggctgaggcgagtgatgttgcaaacgctgttcttgatggagccgatgcactgatgctaagcggtgagacaagtgttggtgagtggcccgttgaagctgtgcgggtcatgtcgagggttattgaaaaaacagaggaaaaggcaatttcacaaatagtcggttttggtacaactccaaaaacacagggtggtgccctcgcctgggccgcagcaaaggttgctgagtttatcgatgcgcgttatctgtgtgtctttagtgaaagtggagattcaataagacgggtgtcgcgactgcgtcatgatatacccattattggatttagtccggttgggtccgttgtccgacaggtctctctctcttggggtgttcgatgttttttgatagagaggctccatcagactgatcagatgatgcgtaaggctgaacatgttctcctcacaaacaatttggccgagattggagagaagattgtgattatttcaggatcaccagttggggtgccggggagtacaaaccatatgagaatccacgagcttggaagcacgtcctag

SEQ ID NO: 7521 - protein, 473 aa, Tropheryma whipplei
MFMRRAKIVVTLGPAVSDLDSVRDLISAGADVFRMNLSHGSLDFHREVFLNVRTAAAELDRHIAIFADLQGPKIRLGRFASGPYTLQEGDIFTITTEQVLGTKELSSTTLPTLPDNVSEGDLLLIDDGKVALRAIGNDGVRITTRVEVPGKVSNNKGINLPGVGVKVPALSEKDIDSLRWALSLPVDMIALSFVRCASDVDAVHKVMDEEGIRLPVIAKIEKPQAVSAIEEIALRFDAIMVARGDLGVELPLEDVPVAQKEIVKVARRFARPVIIATQMLESMISSSRPTRAEASDVANAVLDGADALMLSGETSVGEWPVEAVRVMSRVIEKTEEKAISQIVGFGTTPKTQGGALAWAAAKVAEFIDARYLCVFSESGDSIRRVSRLRHDIPIIGFSPVGSVVRQVSLSWGVRCFLIERLHQTDQMMRKAEHVLLTNNLAEIGEKIVIISGSPVGVPGSTNHMRIHELGSTS

SEQ ID NO: 7522 - DNA, 1416 bp, Tropheryma whipplei
  CDS (1)..(1416)
atgcgtagggccaagattgttgttactctcggtccggcagtatcagatcttgattctgtgagagatcttatatccgctggtgccgacgtctttcgcatgaatctcagccacggatcgttggattttcacagggaggtatttctgaatgttaggacggctgctgctgagctagacaggcatattgctatatttgctgatcttcagggtccaaaaatacgtttagggcgttttgcttctgggccgtataccctacaagagggtgatatctttacaatcacaaccgagcaggtgttgggaacgaaagagctttccagcacaactttgccgacattaccagataatgtctcagagggggatttgcttttaattgatgatggcaaagttgccctgagggcgattgggaatgacggggttcggatcactacacgtgttgaagttccgggaaaggtctcgaataataagggtattaaccttccgggtgttggagttaaagttccggccttatctgaaaaggatattgactcactccgctgggccctttctcttccagttgatatgattgccttgagttttgtgcgctgcgcatcagatgtggatgctgtgcacaaggttatggatgaagagggtattcgccttcctgttattgcaaagatagaaaagcctcaagcagtatctgccatagaggagattgcactgcggtttgatgcgattatggtagcaaggggtgatcttggggttgaactgccgcttgaagatgtgccggtagcccagaaggaaattgttaaggttgcacgcaggtttgctcggccggttattatcgcaacccagatgcttgagtcaatgatctcttcctcgcggcccaccagggctgaggcgagtgatgttgcaaacgctgttcttgatggagccgatgcactgatgctaagcggtgagacaagtgttggtgagtggcccgttgaagctgtgcgggtcatgtcgagggttattgaaaaaacagaggaaaaggcaatttcacaaatagtcggttttggtacaactccaaaaacacagggtggtgccctcgcctgggccgcagcaaaggttgctgagtttatcgatgcgcgttatctgtgtgtctttagtgaaagtggagattcaataagacgggtgtcgcgactgcgtcatgatatacccattattggatttagtccggttgagtccgttgtccgacaggtctctctctcttggggtgttcgatgttttttgatagagaggctccatcagactgatcagatgatgcgtaaggctgaacatgttctcctcacaaacaatttggccgagattggagagaagattgtgattatttcaggatcaccagttggggtgccggggagtacaaaccatatgagaatccacgagcttggaagcacgtcctag

SEQ ID NO: 7523 - protein, 471 aa, Tropheryma whipplei
MRRAKIVVTLGPAVSDLDSVRDLISAGADVFRMNLSHGSLDFHREVFLNVRTAAAELDRHIAIFADLQGPKIRLGRFASGPYTLQEGDIFTITTEQVLGTKELSSTTLPTLPDNVSEGDLLLIDDGKVALRAIGNDGVRITTRVEVPGKVSNNKGINLPGVGVKVPALSEKDIDSLRWALSLPVDMIALSFVRCASDVDAVHKVMDEEGIRLPVIAKIEKPQAVSAIEEIALRFDAIMVARGDLGVELPLEDVPVAQKEIVKVARRFARPVIIATQMLESMISSSRPTRAEASDVANAVLDGADALMLSGETSVGEWPVEAVRVMSRVIEKTEEKAISQIVGFGTTPKTQGGALAWAAAKVAEFIDARYLCVFSESGDSIRRVSRLRHDIPIIGFSPVESVVRQVSLSWGVRCFLIERLHQTDQMMRKAEHVLLTNNLAEIGEKIVIISGSPVGVPGSTNHMRIHELGSTS

SEQ ID NO: 7524 - DNA, 1584 bp, Shigella flexneri
  CDS (1)..(1584)
atgacgatcgctaaaagcgactgtcactgtcctaatcttatacgacatccgaatgagattaatttatcgccatcgcggcgttatttcattcggatttcatgttcaagcaacacctggttgtttcagtcaacggagtattacatgtccaaaaggcttcgcagaacaaaaatcgttaccacgttaggcccagcaacagatcgcgataataatcttgaaaaagttatcgcggcgggtgccaacgttgtacgtatgaacttttctcacggctcgcctgaagatcacaaaatgcgcgcggataaagttcgtgagattgccgcaaaactggggcgtcatgtggctattctgggtgacctccaggggcccaaaatccgtgtatccacctttaaagaaggcaaagttttcctcaatattggggataaattcctgctcgacgccaacctgggtaaaggtgaaggcgacaaagaaaaagtcggtatcgactacaaaggcctgcctactgacgtcgtgcctggtgacatcctgctgctggacgatggtcgcgtccagttaaaagtactggaagttcagggcatgaaagtgttcaccgaagtcaccgtcggtggtcccctctccaacaataaaggtatcaacaaacttggcggcggtttgtcggctgaagcgctgaccgaaaaagacaaagcagacattaagactgcggcgttgattggcgtagattacctggctgtctccttcccacgctgtggcgaagatctgaactatgcccgtcgcctggcacgcgatgcaggatgtgatgcgaaaattgttgccaaggttgaacgtgcggaagccgtttgcagccaggatgcaatggatgacatcatcctcgcctctgacgtggtaatggttgcacgtggcgacctcggtgtggaaattggcgacccggaactggtcggcattcagaaagcgttgatccgtcgtgcgcgtcagctaaaccgagcggtaatcacggcgacccagatgatggagtcaatgattactaacccgatgccgacgcgtgcagaagtcatggacgtagcaaacgccgttctggatggtactgacgctgtgatgctgtctgcagaaactgccgctgggcagtatccgtcagaaactgttgcagccatggcgcgcgtttgcctgggtgcggaaaaaatcccgagcatcaacgtttctaaacaccgtctggacgttcagttcgacaatgtggaagaagctattgccatgtcggcaatgtacgcagctaaccacctgaagggcgttacggcgatcattaccatgaccgaatcgggtcgtaccgcgctgatgacctcccgtatcagctctggtctaccaattttcgccatgtcgcgccatgaacgtacgctgaacctgactgctctctatcgtggcgttacgccggtgccctttgatagcgctaatgacggcgtagcagctgccagcgaagcggttaatctgctgcgcgataaaggttacttgatgtctggtgacctggtgattgtcacccaaggcgacgtgatgagtaccgtgggttctactaataccacgcgtattttaacggtagagtaa

SEQ ID NO: 7525 - protein, 527 aa, Shigella flexneri
MTIAKSDCHCPNLIRHPNEINLSPSRRYFIRISCSSNTWLFQSTEYYMSKRLRRTKIVTTLGPATDRDNNLEKVIAAGANVVRMNFSHGSPEDHKMRADKVREIAAKLGRHVAILGDLQGPKIRVSTFKEGKVFLNIGDKFLLDANLGKGEGDKEKVGIDYKGLPTDVVPGDILLLDDGRVQLKVLEVQGMKVFTEVTVGGPLSNNKGINKLGGGLSAEALTEKDKADIKTAALIGVDYLAVSFPRCGEDLNYARRLARDAGCDAKIVAKVERAEAVCSQDAMDDIILASDVVMVARGDLGVEIGDPELVGIQKALIRRARQLNRAVITATQMMESMITNPMPTRAEVMDVANAVLDGTDAVMLSAETAAGQYPSETVAAMARVCLGAEKIPSINVSKHRLDVQFDNVEEAIAMSAMYAANHLKGVTAIITMTESGRTALMTSRISSGLPIFAMSRHERTLNLTALYRGVTPVPFDSANDGVAAASEAVNLLRDKGYLMSGDLVIVTQGDVMSTVGSTNTTRILTVE

SEQ ID NO: 7526 - DNA, 1425 bp, Microbispora rosea subsp
  CDS (1)..(1425)
atgagtcgtcgagcaaagatcgtctgtaccctcgggcccgccacctcctccccggagcgcctacgcgagctcatcaaggcgggaatgaacgtcgcccgcttcaacctctcgcacggcagccacgagctgcacaaggaggtgttcgaccgggtcagggccgccgccgacgagctgggctgcgccgtcggcgtcctcgccgacctgcagggccccaagatccgtgtcggacgcttcgcctccggtcccgtacggctcggctacggcgacgtcttcacgatcactaccgaggacgtccccggtgaccgggacatcgtctccaccacgtacgagggcctgccgggcgatgtgaagcccggcgacacgatcctcgtggacgacggccggctgaacctcgaagtgaccgcagtggacgggccgcgcgtcgtcaccaaggtcgtcatcggaggcatgatctccgacaacaagggcctcaacctccccggcgtcgccgtcagcgccccggcgctcacggagaaggacgaggaggacctgcgctgggcgctgcgcaccggcttcgacatgatcgccctgtcgttcgtccggtgcccggacgcgctcgtccgcgcgatcatggaggaggagggcgtccggctcccgcttctcgcgaagatcgaaaagccgcaggccgtcgaacgcctcgaggagatcgtggacaccttcgacggcgtcatggtcgcccgcggcgacctcggcgtcgagctgccgctggagcaggtgccgatcgtccagcgccgcatcatcgacctgtgccgggagaaggcccaccccgtcatcgtggccacccagatgctcgactcgatgatgagctcaccccgccccacccgcgccgaggcctccgacgtcgcgtacgccgtcatggacggcgcggacgcggtcatgctgtccggcgagacctcggtcggcaactaccccgtcgaggcggtctccacgatggcccgcatcgcgtcgccgcggagagcaacacgctgcaggccacccacaccctggaccgcctgcccgagaccaccggcggcgcatcgcccgcgcggcgccgaggtcggcgcgatcgtcggggccaaggccctggtggcgtacacgatgtccggcgagaccgcccggcgcctggcccgctaccgctcgcccatcccgctgctggccttcacctccaacccgctggtgcgcggccagctcgcgctgacctggggcgtggagacgttcgaggtgccgttcgtgcaccacaccgacgacatggtccgccaggtcgaggcctcgctgctgtcgctcggcatctgcgagaagggcgacaaggtcgtcgtcgtcgccggctccccgcccggcaaccacggctccaccaactcgctgcgcgtccacaccatcggctcggcggtcgcccacccggcggtctga

SEQ ID NO: 7527 - protein, 474 aa, Microbispora rosea subsp
MSRRAKIVCTLGPATSSPERLRELIKAGMNVARFNLSHGSHELHKEVFDRVRAAADELGCAVGVLADLQGPKIRVGRFASGPVRLGYGDVFTITTEDVPGDRDIVSTTYEGLPGDVKPGDTILVDDGRLNLEVTAVDGPRVVTKVVIGGMISDNKGLNLPGVAVSAPALTEKDEEDLRWALRTGFDMIALSFVRCPDALVRAIMEEEGVRLPLLAKIEKPQAVERLEEIVDTFDGVMVARGDLGVELPLEQVPIVQRRIIDLCREKAHPVIVATQMLDSMMSSPRPTRAEASDVAYAVMDGADAVMLSGETSVGNYPVEAVSTMARIASPRRATRCRPPTPWTACPRPPAAHRPRGAEVGAIVGAKALVAYTMSGETARRLARYRSPIPLLAFTSNPLVRGQLALTWGVETFEVPFVHHTDDMVRQVEASLLSLGICEKGDKVVVVAGSPPGNHGSTNSLRVHTIGSAVAHPAV

SEQ ID NO: 7528 - DNA, 1806 bp, Oryza sativa
  CDS (75)..(1721)
gcatcgcatcctccgccgccgccgccgccatcaccctcctctccgccgcattagcagtagaatcctaagccataatggcaacctccgccgccgccgccgcgagcaccttgccttacctcgtcgccgccgcctcctcctccgcggcggcgcgccgccgcggggcccaccggatccgggcgtcgtcggcggcggcggaggtggagggggcgatggacgtggtgtcggaggcggagctgcgggagaaggggttcatggggctccggaagacgaagctggtgtgcacggtggggcccgcttgcgtgggggctttgccggcgctggcgcgcggcgggatgggcgtggcgcgggtcaacctgtgccacgggggccgcggctggcaccgcgccgtgatgcgcgaggtgcggaggctcaacgaggaggaaggcttctgcgtctccctcatggtcgacaccgaggggtcccagctcctcgtcgccgaccacggcggcgccgcctccgtcaaggccgaggatggctctgaatggctatttacaagtaaaagaaccgatgaatctcatccattcacaatgcatgttaactttgataagttttctgaagacattctagttggtgatgagcttgtaattgatggaggaatggcaacatttgaagttattgagaaggtcggaaatgatttgcgctgtaagtgcacagacccaggtttgcttcttcctcgagccaaactgtcattctggaggaatggaaaattagttgaaaggaactttgggcttcctacattgtcagcaaaggattgggctgacattgaatttgggatagctgaaggagttgattgcatcgctctttcatttgtaaaagatgctaatgacatcaagtatctcaagacttacctctccagaaaatcattagaacacatcaaaatattcgcgaaggttgagagtcttgaatcactcaagaaccttaaagacatcatagaggcatctgatggagttatggtagcacgtggtgatcttggagttcagattcctttagaacaaatcccagccatccaagaggcaattgttgatctttgtcgacggttgaacaagccagtgatagttgcctctcagcttcttgaatcaatggttgagtatccaacaccaactcgtgcagaggtagcagacgtttctgaagcagtacggcaatatgctgatgccgtaatgttatcggcagagtcagctataggtgcatatccccagaaagctctagcagtcctccgtgctgctagtgagaggatggaatcatggagccgtgaggaaaacatgcagaaacttcttccacaacatcagcttgcaatagctttgcctgataggatctcagagcaaatttgcaccagtgctgcagaaatggcaaacaaccttgcggtggatgccatctttgtttacacaaagtatggtcacatggcgtcgcttctttcgcgcaaccggcccaaccctcccatttttgctttcactgataatgccaactcaagaaagagcatgaacctctactggggagtaattccacttcagctaccactgtcaaataacatggaagataacttcaatcaaaccatcaagcttatgaagtcgaagggttcagtgaaatctggagacacagtcttggtcgtcgccgactctgatctgaaccgaccccgtgctgctacctcagttttccaatccattcaagttcgaatagtggactaggttagtcattgctgagctagttgctagcagctgcagatctggatggatatttacaaattatacgatgattcttgaaattgttctg

SEQ ID NO: 7529 - protein, 548 aa, Oryza sativa
MATSAAAAASTLPYLVAAASSSAAARRRGAHRIRASSAAAEVEGAMDVVSEAELREKGFMGLRKTKLVCTVGPACVGALPALARGGMGVARVNLCHGGRGWHRAVMREVRRLNEEEGFCVSLMVDTEGSQLLVADHGGAASVKAEDGSEWLFTSKRTDESHPFTMHVNFDKFSEDILVGDELVIDGGMATFEVIEKVGNDLRCKCTDPGLLLPRAKLSFWRNGKLVERNFGLPTLSAKDWADIEFGIAEGVDCIALSFVKDANDIKYLKTYLSRKSLEHIKIFAKVESLESLKNLKDIIEASDGVMVARGDLGVQIPLEQIPAIQEAIVDLCRRLNKPVIVASQLLESMVEYPTPTRAEVADVSEAVRQYADAVMLSAESAIGAYPQKALAVLRAASERMESWSREENMQKLLPQHQLAIALPDRISEQICTSAAEMANNLAVDAIFVYTKYGHMASLLSRNRPNPPIFAFTDNANSRKSMNLYWGVIPLQLPLSNNMEDNFNQTIKLMKSKGSVKSGDTVLVVADSDLNRPRAATSVFQSIQVRIVD

SEQ ID NO: 7530 - DNA, 1506 bp, Kluyveromyces lactis
  CDS (1)..(1506)
atggaatctagattaggctggttgaccgatttgagtaccgaaactggtaccaacttgagaagaacctcaattatttgtaccattggtccaaagaccaacaacccagaaactttggttgaattgagaaaggctggtatgaacattgttcgtatgaacttctcccacggttcttacgaataccatcaatctgtcattgacaacgccagaaaatctgaagaactataccaaggtagacctctggctattgcattggacactaagggtcctgaaatcagaactggtaccaccactaacgatgtggattacccaattcctccaaaccacgaaatgatcttcactactgatgacaagtacgctaaggcttgtgacgacaaaaccatgtacgttgattacaagaacatcaccaaggtcattgaagctggtagaattatctacgtcgatgatggtgttttgtcattcgaagttttggaagttattgatgacaacaccttgaaggttaagtctttgaacgccggtaagatttgttctcacaagggtgtcaacttgccaggtaccgatgtcgatttgccagctttgtccgaaaaggacaagtctgacttgaaattcggtgtcaagaacggtgtccacatggtcttcgcctctttcatcagaaccgctcaagatgttttgactatcagagaagttttgggtgagcaaggtaaggatatcaagatcattgttaagattgaaaaccaacaaggtgtcaacaactttgacgatatcttgaaggtcactgacggtgttatggttgctagaggtgatttgggtattgaaattccagctcctcaagtgtttgctgtgcaaaagaagttgattgctaagtgtaacttggctggtaagccagttatctgtgctacccaaatgttggaatccatgacctacaacccaagaccaaccagagctgaagtctctgatgttggtaacgccgttcttgatggtgctgactgtgttatgttgtctggtgaaactgccaagggtaactacccaatcaatgccgttaagaccatggctgaaactgctttgattgctgaacaagccatcccatacatcccaacttacgatgacttaagaaacttgactccaaagccaacctcaaccactgaaactatcgctgctgcttctgtttctgctgtatttgaacaaaaggccagagctttgattgtcctatccaccaccggtgacactccaagattggttgccaagtacaagccaaatgtcccaattgttatggttactagaaacccaagagctgctagattctctcatctatatagaggtgtcttcccattcgtatacgatgaatcctctgactccgaatggactgtcgatgttgaaaagagaatcaacttcggtgtcaagaaggccaaggaattcggaattttggttgacggtgacaccattgtcaccattcaaggtttcgccgctggtgtcggtaactccaacactctacgtgtcttgaccgtttaa

SEQ ID NO: 7531 - protein, 501 aa, Kluyveromyces lactis
MESRLGWLTDLSTETGTNLRRTSIICTIGPKTNNPETLVELRKAGMNIVRMNFSHGSYEYHQSVIDNARKSEELYQGRPLAIALDTKGPEIRTGTTTNDVDYPIPPNHEMIFTTDDKYAKACDDKTMYVDYKNITKVIEAGRIIYVDDGVLSFEVLEVIDDNTLKVKSLNAGKICSHKGVNLPGTDVDLPALSEKDKSDLKFGVKNGVHMVFASFIRTAQDVLTIREVLGEQGKDIKIIVKIENQQGVNNFDDILKVTDGVMVARGDLGIEIPAPQVFAVQKKLIAKCNLAGKPVICATQMLESMTYNPRPTRAEVSDVGNAVLDGADCVMLSGETAKGNYPINAVKTMAETALIAEQAIPYIPTYDDLRNLTPKPTSTTETIAAASVSAVFEQKARALIVLSTTGDTPRLVAKYKPNVPIVMVTRNPRAARFSHLYRGVFPFVYDESSDSEWTVDVEKRINFGVKKAKEFGILVDGDTIVTIQGFAAGVGNSNTLRVLTV

SEQ ID NO: 7532 - DNA, 1506 bp, Saccharomyces kluyveri
  CDS (1)..(1506)
atggaatctagactaggttggttaactgaattgcaaactgaaaccggtgctaacttgagaagaacctctatcatcggtaccattggtccaaagaccaacaacccagaaaccttggttgccttgagaaaggctggtttgaacattgttcgtatgaacttctctcacggttcttacgaataccaccaatctgtcattgacaacgctagaaagtctgaagagctatatccaggtagaccattggctattgctttggacaccaagggtccagaaatcagaactggtaccaccactaacgaagtcgactacccaatcccaccaaaccacgaaatgatcttctccattgacgacaaatacgccaaggcttgtgatgacaaggttatgtacattgactacaagaacatcaccaaggttatcgaaaagggtaagatcatctacgttgatgacggtgtcttgtctttcgaagttttggaagtcgttgacgaacaaactttgaaggttaagtccttgaacgctggtaagatctgctcccacaagggtgttaacttgccaggtaccgatgtcgacttgccagctttgtccgaaaaggacaagtctgacttgagattcggtgtcaagaacggtgtccacatggtcttcgcttctttcatcagaaccgctcaagatgttttgaccatcagagaagttttgggtgaagacggtaaggacgtcaagatcattgtcaagattgaaaaccaacaaggtgttaacaactttgacgaaatcttgaaggttactgacggtgtcatggttgccagaggtgacttgggtatcgaaatcccagctccacaagttttcgctgtccaaaagaagttgattgctaagtgtaacttggccggtaagccagttatctgtgccacccaaatgttggaatctatgacttacaacccaagaccaaccagagctgaagtttccgatgtcggtaacgctgttttggacggtgctgactgtgtcatgttgtctggtgaaaccgctaagggtaactacccaattaacgccgttaccatcatggctgaaaccgctttgattgctgaacaagctatcccatacgtcgccacttacgacgacttgagaaacttcactccaaagccaacttctaccactgaaaccatcgctgccgccgctgtctcttctgttttcgaacaaaaggccaaggctatcattgtcttgtctaccaccggtgacaccccaagattggtctccaaatacaagccaaacgttccaattgttatggttaccagaaacccaagagctgctagattctctcacttgtacagaggtgtcttcccattcgtctacgaatctgacactgaatccgaatggaccaaggatgttgaaagccgtttgaacttcggtattgccaaggccaaggaattcggtatgttgaaggaaggtgacaccattgtcactatccaaggtttcgctgctggtgttggtcactctaacactttgcgtgtcttgaccgtctaa

SEQ ID NO: 7533 - protein, 501 aa, Saccharomyces kluyveri
MESRLGWLTELQTETGANLRRTSIIGTIGPKTNNPETLVALRKAGLNIVRMNFSHGSYEYHQSVIDNARKSEELYPGRPLAIALDTKGPEIRTGTTTNEVDYPIPPNHEMIFSIDDKYAKACDDKVMYIDYKNITKVIEKGKIIYVDDGVLSFEVLEVVDEQTLKVKSLNAGKICSHKGVNLPGTDVDLPALSEKDKSDLRFGVKNGVHMVFASFIRTAQDVLTIREVLGEDGKDVKIIVKIENQQGVNNFDEILKVTDGVMVARGDLGIEIPAPQVFAVQKKLIAKCNLAGKPVICATQMLESMTYNPRPTRAEVSDVGNAVLDGADCVMLSGETAKGNYPINAVTIMAETALIAEQAIPYVATYDDLRNFTPKPTSTTETIAAAAVSSVFEQKAKAIIVLSTTGDTPRLVSKYKPNVPIVMVTRNPRAARFSHLYRGVFPFVYESDTESEWTKDVESRLNFGIAKAKEFGMLKEGDTIVTIQGFAAGVGHSNTLRVLTV

SEQ ID NO: 7534 - DNA, 1506 bp, Saccharomyces castellii
  CDS (1)..(1506)
atggaatccagattagccagattaaccactttacaagttaccgccggtgacaacttaagaagaacctctattattggtactattggtccaaagaccaacaacccagaagtcttggttgctctaagaaaggctggtttgaacattgtccgtatgaacttctctcacggttcttacgaataccatcaatccgttattgaaaacgccagaaagtctgaagaactttacccaggtagaccattagctattgctttggacaccaagggtccagaaatcagaactggtaccaccaccggtgaagttgactacccaattccaccaaaccacgaaatgatcttctctactgatgaaaagtacgctaaggcttgtgatgacaaggttatgttcgtcgactacgctaacatcaccaaggttatctccaagggtaagatcatctacgtcgatgacggtgtgttgtctttcgaagttttggaagtcgttgatggtaagactttgaaggttaagtccttgaacgccggtaagatctgttctcacaagggtgttaacttaccaggtaccgatgtcgatttgccagctttgtccgaaaaggataaggctgatttgagattcggtgttaagaacggtgtccacatggtcttcgcttctttcattagaaccgctcaagatgttttgaccatcagagaagtcttaggtgaagatggtaaggacatcaagattgttgtcaagattgaaaaccaacaaggtgttaacaacttcgacgaaatcttgaaggtcactgatgccgttatggttgccagaggtgatttaggtattgaaattccagccccagaagtcttagctgtccaaaagaaattgattgctaagtctaacttggccggtaagccagttatctgtgctacccaaatgttggagtctatgacttacaacccaagaccaaccagagctgaagtttccgatgtcggtaacgctatcttggatggtgctgactgtgttatgttgtctggtgaaaccgccaagggtaactacccaatcaatgctgtcaccaccatggctgacactgctttgattgctgaacaagccattgcttaccaaccattgtacgatgacttgagaaacttgactccaaagccaacttctaccactgaaaccgttgctgcttccgctgttgccgctgtctacgaacaaaaggccaaggctatcattgtcttgtctacttccggtaccactccaagattggtctccaagtacagaccagactgtccaattatcttggttaccagaaacccaagagctgctagattctctcacttgtctagaggtgttttcccattcgtctacgaagctgactccgttgctgactggactgaagatgtcgaattgagattgaagttcggtattgaaaaggccatcgaaatgggtgtcatgaagaagggtgacacttacgtctccattcaaggtttcaaggctggtgaaggtcactccaacactttgcaagtctctaacgcttaa

SEQ ID NO: 7535 - protein, 501 aa, Saccharomyces castellii
MESRLARLTTLQVTAGDNLRRTSIIGTIGPKTNNPEVLVALRKAGLNIVRMNFSHGSYEYHQSVIENARKSEELYPGRPLAIALDTKGPEIRTGTTTGEVDYPIPPNHEMIFSTDEKYAKACDDKVMFVDYANITKVISKGKIIYVDDGVLSFEVLEVVDGKTLKVKSLNAGKICSHKGVNLPGTDVDLPALSEKDKADLRFGVKNGVHMVFASFIRTAQDVLTIREVLGEDGKDIKIVVKIENQQGVNNFDEILKVTDAVMVARGDLGIEIPAPEVLAVQKKLIAKSNLAGKPVICATQMLESMTYNPRPTRAEVSDVGNAILDGADCVMLSGETAKGNYPINAVTTMADTALIAEQAIAYQPLYDDLRNLTPKPTSTTETVAASAVAAVYEQKAKAIIVLSTSGTTPRLVSKYRPDCPIILVTRNPRAARFSHLSRGVFPFVYEADSVADWTEDVELRLKFGIEKAIEMGVMKKGDTYVSIQGFKAGEGHSNTLQVSNA

SEQ ID NO: 7536 - DNA, 1521 bp, Saccharomyces bayanus
  CDS (1)..(1521)
atgccagaatcaagactgcagagactagccaacttgaaaataggcactccgcaagagcttagacggacctccattataggcaccatcgggcccaagactaatagctgcgaggcaatcaccgctttgaggaaggctgggctgaacatcatccgaatgaacttctcccacggctcttatgaattccaccaatcggtgatagacaatgccttgaagtcggaacagcaattccccggaagaccgcttgccattgctctggacaccaagggccctgagattaggacaggccgcaccccgaacgaccaggacttccacatcctcgttgaccaccagatgatcttcaccaccgacgcgaagttcgaacactcctctaatgacaaaatcatgtatatagactatgccaatttgacaaaggtaattgtgcccgggaaactcatctacgtcgatgacgggattctgtcttttaaagtgctccagatcatggacgatgccaacataagggtccaagctctcaattcgggctatatctcatcccgtaaaggtgtcaacttacccaataccgacgtggatttgccccctctttccgcaaaggatattcaggacttgcaattcggcatgcggaatggaatccacatggtgtttgcctctttcattagggcccccgaagacgtcttgaccattaggaaagtcctgggcaccgaaggcgaggacatcaaaatcatctccaagatcgaaaatcaacaaggcctggataatttcgacgaaatcctgcaagtcacagatggtgtcatgatagccaggggtgatctgggcattgagatcctggcaccagaagtgctggccattcagaaaaaactcattgccaaatgtaacgtggcgggcaaacctgtcatttgcgcgacccaaatgctggagtcaatgacctacaacccaagacccacaagggctgaagtctctgatgtcggaaacgccgttttggatggtgccgattgtgttatgttgtctggcgaaacggcaaagggcgattatccagttaatgcagtcaagataatggcggccacagctctaattgcagagagtactattgcgcatttggctctatacgatgatcttagagacgccacttctaagcccacctccactacagaaaccgttgcagccgcagccactgcagcgatcttggagcaaaatggtaaagccatcgttgtattatccactacgggaaacacagcaaggctgttgtctaagtacagaccaagttgtcctatcatactagtgacgaggcacgcaagaacggcaagaatcgcacatttatacagaggtgtttttccatttgtctttgagccaaaacggctgtacgattggggtgaagacgttcacagacgcttaaagtttggcgtggaaatggcaagatcttttggaatggttgaaagtggtgataccgttgtatccatccaaggcttcagaggcggtattggtcattcaaacaccttgcgtgtttctaccgttggtgaagagttttag

SEQ ID NO: 7537 - protein, 506 aa, Saccharomyces bayanus
MPESRLQRLANLKIGTPQELRRTSIIGTIGPKTNSCEAITALRKAGLNIIRMNFSHGSYEFHQSVIDNALKSEQQFPGRPLAIALDTKGPEIRTGRTPNDQDFHILVDHQMIFTTDAKFEHSSNDKIMYIDYANLTKVIVPGKLIYVDDGILSFKVLQIMDDANIRVQALNSGYISSRKGVNLPNTDVDLPPLSAKDIQDLQFGMRNGIHMVFASFIRAPEDVLTIRKVLGTEGEDIKIISKIENQQGLDNFDEILQVTDGVMIARGDLGIEILAPEVLAIQKKLIAKCNVAGKPVICATQMLESMTYNPRPTRAEVSDVGNAVLDGADCVMLSGETAKGDYPVNAVKIMAATALIAESTIAHLALYDDLRDATSKPTSTTETVAAAATAAILEQNGKAIVVLSTTGNTARLLSKYRPSCPIILVTRHARTARIAHLYRGVFPFVFEPKRLYDWGEDVHRRLKFGVEMARSFGMVESGDTVVSIQGFRGGIGHSNTLRVSTVGEEF

SEQ ID NO: 7538 - DNA, 1467 bp, Xylella fastidiosa
  CDS (1)..(1467)
atgtctgaacgccagcgccgtaccaggattcttgccactcttgggccagcgacagatccgcctggtgtgcttgatgcgctgtttaaggcgggagttaatgtggtgcggctgaatttcagccatggcgatgtttcggatcaggccaggcgtgttgctgaagtgcgtgcggcggcggcgcatgtgggcgttgagattggcattcttgcggatctacccggcccgaagatccgtattggacgttttaccgggggaaaagtgcggcttgtggctggtgcgcgctttgatctgcttgccgatagcaatgcgtcgctgggggatacgactcaagttggggtcagttatctggggttgccgcaggatgtcgccgccggagatgtgttgttactggatgatggcctcatgcaattgcaagtggtgcaagtgcagggtgcgcggattgtgacgacggttcttaacgatggtgtgttgtccgaccgtaaggggctgaataagcaaggtggcggtttgtcgctgggtgcgctgacggatcgtgatcgcgaactgattggtatcgttgccaggatggggatcgactttattgcagtttcgttttgtcgtcatgctgaagagatgcatgaggcgcgtcgcattgctcgggagtgcggctgtgatgctgcgttggtgtctaagatcgagcgtgctgaggctatcgtgaatcttgccgagattgttgcggcttcggatgtggtgatggttgcgcgtggtgatttaggtgtggagattggtgacgctcaattgccgggcttgcaaaaaaagatcatcaaagaagcgttgttacagaacaaggtggtgattactgccacgcagatgctgcaatcaatggttgaaagtccgataccgacccgtgctgaggtgctggatgtggccaatgcggtgattgatgggaccgatgcggtgatgctgtcggctgaaacggcgacaggtgattatccagtcaaggcagtagaggcgatggcgcgtatctgtctgggagcggaacaccagtttgagtttgatactgattatgagatggcgcagcgtaatttgcagcgtgcagatcatgcgattgcaatggcaacgatgttcttatctgagcacatttgccttggtggtgtggttgcgttgacggagtccggtacgacgccacggtttctctcgcggttccggtcgcacgtcccgatctatgcgtttacgcgtcacgaggatgtgcggcggcgcatggtgctgatgcgtggtgtatttccgatgcgttttgacagccgtggtttaacgccgcgtgaggcagctagggcgacaatccgtcttttggtggaatgtggttgtatgagtccgggtgatcgtgtggtgttcacgagcggcgagcatatggaaacgcttggcgcaaccaatacactgcgtttacttgaagtaggcgctgatgggtgtgtcagtggtctgtgggaactctaa

SEQ ID NO: 7539 - protein, 488 aa, Xylella fastidiosa
MSERQRRTRILATLGPATDPPGVLDALFKAGVNVVRLNFSHGDVSDQARRVAEVRAAAAHVGVEIGILADLPGPKIRIGRFTGGKVRLVAGARFDLLADSNASLGDTTQVGVSYLGLPQDVAAGDVLLLDDGLMQLQVVQVQGARIVTTVLNDGVLSDRKGLNKQGGGLSLGALTDRDRELIGIVARMGIDFIAVSFCRHAEEMHEARRIARECGCDAALVSKIERAEAIVNLAEIVAASDVVMVARGDLGVEIGDAQLPGLQKKIIKEALLQNKVVITATQMLQSMVESPIPTRAEVLDVANAVIDGTDAVMLSAETATGDYPVKAVEAMARICLGAEHQFEFDTDYEMAQRNLQRADHAIAMATMFLSEHICLGGVVALTESGTTPRFLSRFRSHVPIYAFTRHEDVRRRMVLMRGVFPMRFDSRGLTPREAARATIRLLVECGCMSPGDRVVFTSGEHMETLGATNTLRLLEVGADGCVSGLWEL

SEQ ID NO: 7540 - DNA, 1479 bp, Vibrio parahaemolyticus
  CDS (1)..(1479)
atgtgtaaaaccaaaattgtggctacgctaggcccagcaagtgaaagccgcgaaacactaactaagttgattcgagcaggcgcgaacgtagtcagactcaacttttctcacggaacggcgcaagaacacattgcccgcgcgaatttagttcgtgaaattgcggctgaactcgacacttatgttggtgtgttagtcgatttacaaggccctaagattcgtatttcttgcttcgaaaatggcgcagttctactcaatcaaggcgacgtattcaccctgagcggcacacttgacgcacaatctggaacccaagaaatggttgggcttgattacccagagctgattcaagacgtgaacgaaggcgatattctgctgctagatgatggccgcattcagctaaaagtaagccaattacaccgtgacgagcagtggattaaaaccacggtattgaacagcggtaaattgtctaaccgtaaaggcattaacttgttaggtggaggtctttccgctccggctcttaccgcgaaagacattcaagacatcgacaccgcagctaaacttcgagccgacttccttgccatttctttcccgcgcaatgcacaagatatcgaatacgctcgcagcttggcgcaaaaagcaggttgtcacgccaagattgtcgcgaaggtagaacgcgcagaagtggttgaaaccaaagaagccatggatgatgtcattaaagcatcagacatcattatggttgctcgcggcgatttgggcgtagagattggcgacgcacgactgccaatggtgcaaaagtcattgatcaatcgttctaaacattggggtaagcctgtcattaccgcgacccagatgttggaatcgatgatcgagaatcctctcccaactcgcgctgaagtgttagacgtggcaaacgcgattatcgacggaacagacgccgtgatgctgtcggcggaatcggcggcgggcaaatacccaatcgaagcggtcgaagccatggttcgcatcgcacaaggtgcagagcacgagctggaatgcaaccatgactgctgggatactctgcaacacttatgttctaacccaggcaaaagtttcgcgctttcatcaatgatttcggcttctcgcgttcatcaagaccttggcgttgcgattttaacccaacatggtgaaacacccctgttgatgtctcgctgccaaagtaaaactaagatttgggctctgagcgacaacccagctttacttgcacaaatgaccattctacgcggtgttgaacctttgtatttcaaagcagcagaaagccacgttgatctcgcgccacaattagtggaatgcttacgtcaaaaggccaacgaagcacatatttcctccattttgatgacccagctcgattccatcgaaggcatgggtgaaatcaacgcttgtcgcttgcttagcttgaatgtgtcatctcacatgaagccagcggaagaaatcgcagcttag

SEQ ID NO: 7541 - protein, 492 aa, Vibrio parahaemolyticus
MCKTKIVATLGPASESRETLTKLIRAGANVVRLNFSHGTAQEHIARANLVREIAAELDTYVGVLVDLQGPKIRISCFENGAVLLNQGDVFTLSGTLDAQSGTQEMVGLDYPELIQDVNEGDILLLDDGRIQLKVSQLHRDEQWIKTTVLNSGKLSNRKGINLLGGGLSAPALTAKDIQDIDTAAKLRADFLAISFPRNAQDIEYARSLAQKAGCHAKIVAKVERAEVVETKEAMDDVIKASDIIMVARGDLGVEIGDARLPMVQKSLINRSKHWGKPVITATQMLESMIENPLPTRAEVLDVANAIIDGTDAVMLSAESAAGKYPIEAVEAMVRIAQGAEHELECNHDCWDTLQHLCSNPGKSFALSSMISASRVHQDLGVAILTQHGETPLLMSRCQSKTKIWALSDNPALLAQMTILRGVEPLYFKAAESHVDLAPQLVECLRQKANEAHISSILMTQLDSIEGMGEINACRLLSLNVSSHMKPAEEIAA

SEQ ID NO: 7542 - DNA, 1443 bp, Vibrio parahaemolyticus
  CDS (1)..(1443)
atgacttccaaattaagaagaacgaaaattgtcaccactcttggcccttcaactgataaagacaatgtactggaggaaatcattaaagctggagcgaacgtcgttcgtatgaacttttctcacggtacaagtgaagaccacattcaacgcgctaaaaaagtacgcgcgattgccgcaagattagggcgtcaggttgccattcttggcgatttacagggacctaaaattcgtgtttcgacctttaaagacggtaaaatcacactcaaagtcggcgataaattcacactagatagcgacttaccaaaaggcgaagggaaccaagaatccgttggtttggattacaaagaactgcctcaagatgtttcaccgaacgacattctactgcttgatgatggcagagttcaattgcaagtcaccagcgtagaaggaaataaagtccatacccgtgtgaccgttggtggcccattatccaataacaagggcatcaacaaaaaaggcggtggcttatcagccgatgcactcacggaaaaagacaaagctgacataatcacagccgcagaaattaaggtcgactatttggccatttctttcccacgcaatggcgaggacatgcactatgccagacgcttggcccgggatgccggcttagaagcaaaactcgtcgcaaaagtagaacgtgcagaaaccgtcgccacgagcgagtcgattgacgatatcatcctagcttctgacgtcgtgatggtcgctcgcggcgatttaggcgttgagattggcgatcctgagctgatcggtgttcagaaaaaactcattcgtcgagctcgcagtttgaaccgcgtcgtcattactgcaactcaaatgatggaatccatgatcaatagcccaatgccaacgcgtgcagaagtcatggacgtagcaaacgccgttttggatggcaccgatgccgtgatgctgtctggagagaccgctgccggtcaatatccggtagagaccgtgaaatcaatggcggatgtctgtattggcgcagaaaagatgtctgaagcaagtctatcgacctaccgtctcgaccgcacctttgaaacagcagaagagaccattgcaatggcaaccatgtactcagcgaatcacatggaaggcattaaagcgatgattgcattaacagagtcaggaagaacagctttgatgatgtcacgcctaagctctggtttgccgatttttgctttatcgcgtaacgaatcgacgctcaaccgcgcagcgttatatcgtggcgtgacgccagtgtactttgatgcgaaatgcgatgcgggcttaccaaccgctcaagccgcaatttctagcctcaaagatcaaggttacttacatgaaggtgacttagtgatcatcactcaaggtgacgtgatggacgtcgttggttcaaccaactgcatgcgtattctgccagtctaa

SEQ ID NO: 7543 - protein, 480 aa, Vibrio parahaemolyticus
MTSKLRRTKIVTTLGPSTDKDNVLEEIIKAGANVVRMNFSHGTSEDHIQRAKKVRAIAARLGRQVAILGDLQGPKIRVSTFKDGKITLKVGDKFTLDSDLPKGEGNQESVGLDYKELPQDVSPNDILLLDDGRVQLQVTSVEGNKVHTRVTVGGPLSNNKGINKKGGGLSADALTEKDKADIITAAEIKVDYLAISFPRNGEDMHYARRLARDAGLEAKLVAKVERAETVATSESIDDIILASDVVMVARGDLGVEIGDPELIGVQKKLIRRARSLNRVVITATQMMESMINSPMPTRAEVMDVANAVLDGTDAVMLSGETAAGQYPVETVKSMADVCIGAEKMSEASLSTYRLDRTFETAEETIAMATMYSANHMEGIKAMIALTESGRTALMMSRLSSGLPIFALSRNESTLNRAALYRGVTPVYFDAKCDAGLPTAQAAISSLKDQGYLHEGDLVIITQGDVMDVVGSTNCMRILPV

SEQ ID NO: 7544 - DNA, 1413 bp, Vibrio parahaemolyticus
  CDS (1)..(1413)
atgaaaaagaccaaaatcgtttgtacgattggccctaaaactgaatctgtagagaagctaactgaactagtaaacgcaggcatgaacgtaatgcgtcttaacttctctcacggtgactacgaagaacacggcactcgtatcgcgaacttccgcaaagtaatggaagctactggcaaacaactagcaatccttctagatactaaaggtccagaaatccgcactatcaaactagaaggcggtaacgacgttgatctagtagctggtcaagaattcactttcacaactgacacttcagttgtaggtaacaaagacaaagttgcagtaacttacgctggcttcgcagctgacctaaacgttggtaacactatcctagtagacgacggtctaatcgagatggaagttatcgcaacaactgacactgaagttaaatgtaaagttcttaacaacggtgctctaggcgaaaacaaaggtgttaaccttcctggcgtttctgtaaacctacctgctctatctgaaaaagataagaacgaccttaaattcggttgtgagcaaggcgttgatttcgtagctgcatctttcatccgtaaagcttctgacgttcaagaaatccgtgaagttctagctgcaaacggcggcgagaacatccacatcatctctaagatcgaaaaccaagaaggtgttgataacttcgatgagatcctagaactttctgacggcatcatggttgctcgtggcgacctaggtgttgaaatcccagctgaagaagtaatcttcgctcagaaaatgatgatcgagaagtgtaaccgtgcacgtaagatggttatcactgcaactcaaatgcttgattctatgatcaacaacccacgtcctactcgtgcggaagcaggcgacgttgcaaacgcagtaatggacggcacagacgcagtaatgctttctggcgaaacagcaaaaggtaaataccctgttgaagcggtaactatcatggctcaaatcgctaagcgtactgactctgtacttaaagctgaactaggttctcgtctagacagcccacgtctacgcatcactgaagcagtatgtaaaggcgcagtagacacagctgaaaaactggctgctccactgatcgttgttgcaactgaaggcggtaagtctgcacgttcagtacgtaagtacttcccaactgcaaacatcctagcgctaacaactaacaagaaaactgcagcacaactagttctaactaagggtgttactccagttgttgttgacgctatcgaaagcactgacgcattctacgtagcaggtaaagaacttgctctagaatctggtctaggtaacaaaggcgatatcgtagtaatggtttctggtgctctagtcgcttcaggtactacgaacacagcttctgtacacgtactataa

SEQ ID NO: 7545 - protein, 470 aa, Vibrio parahaemolyticus
MKKTKIVCTIGPKTESVEKLTELVNAGMNVMRLNFSHGDYEEHGTRIANFRKVMEATGKQLAILLDTKGPEIRTIKLEGGNDVDLVAGQEFTFTTDTSVVGNKDKVAVTYAGFAADLNVGNTILVDDGLIEMEVIATTDTEVKCKVLNNGALGENKGVNLPGVSVNLPALSEKDKNDLKFGCEQGVDFVAASFIRKASDVQEIREVLAANGGENIHIISKIENQEGVDNFDEILELSDGIMVARGDLGVEIPAEEVIFAQKMMIEKCNRARKMVITATQMLDSMINNPRPTRAEAGDVANAVMDGTDAVMLSGETAKGKYPVEAVTIMAQIAKRTDSVLKAELGSRLDSPRLRITEAVCKGAVDTAEKLAAPLIVVATEGGKSARSVRKYFPTANILALTTNKKTAAQLVLTKGVTPVVVDAIESTDAFYVAGKELALESGLGNKGDIVVMVSGALVASGTTNTASVHVL

SEQ ID NO: 7546 - DNA, 1452 bp, Pseudomonas syringae
  CDS (1)..(1452)
atgaccgttcgccgcaccaaaatcgtcgccacacttggccctgccagcaactcgccggaagtcatcgaacaactgatcctctcgggtctggacgttgctcgtctgaacttctctcacggtactccggatgagcacaaggcacgcgccaaactcatccgcgaaatcgccgccagacacgggcgcttcgtcgctctgctgggcgacctgcagggtcctaaaatccgtatcgcaaagttcaccgacaagcgaatcgagctgaaggtcggtgacaagttcaccttctcgactgctcacccgctgaccagtggcaaccagcagatcgtgggtatcgactacccggatctggtcaaggattgcggcgtaggcgacgagctgttgctcgacgacggtcgcgtggtcatgcgcgtcgacacccagaccgcacacgaactgcactgcaccgtgctgatcggcggtccgctgtccgaccacaaaggcatcaaccgtcgtggtggtggccttaccgctccggcgttgaccgaaaaagacaagcaggacatcaagctcgctgccgaaatggacctggattacctggccgtttccttcccgcgcgatgccgccgacatggaatatgctcgccagctgcgtgacgaatccggtggcactgcctggctggttgccaagatcgaacgcgctgaagcggtcgccaacgacgaagtgctcgatgcactgatccgtgccagtgacgctgtgatggttgcccgtggcgacctgggcgttgaaatcggcgacgccgaactggtcggtgttcaaaaacgcatcattctgcacgcacgtcgccacaacaaggcggtgatcgtcgccacgcagatgatggagtcgatgatctcaagccccatgccgacccgcgccgaagtgtccgatgtggccaacgccgtgctcgattacaccgacgccgtcatgctctcggcagaaagtgcggcaggttcctacccggtcgaagccgtacaggccatggcacgtatctgcgtaggcgctgaaaagcacccgaccggcaaaacgtccagccaccgtatcggtcactcgttcacgcgttgcgacgaaagcatcgcgctggccgccatgtacaccgccaaccacttccctggcgtgaaggcgatcatcgcactgaccgaaagcggctacaccccgctgatcatgtcgcgcatccgctcctcggtgccgatctacgcgttctctccgcaccgtggcactcaagcgcgcgctgcgatgttccgtggtgtctacaccgtgccgttcgacccgggagccctgccgccaggtcaggtcagccaggccgccgtcgacgaactgctcaagcgtggcctggtcgagcaaggtgactgggtcatcctgaccaagggcgacagctaccacaccatcggtggcaccaacggcatgaagatcctgcacgttggcgacccattggtctga

SEQ ID NO: 7547 - protein, 483 aa, Pseudomonas syringae
MTVRRTKIVATLGPASNSPEVIEQLILSGLDVARLNFSHGTPDEHKARAKLIREIAARHGRFVALLGDLQGPKIRIAKFTDKRIELKVGDKFTFSTAHPLTSGNQQIVGIDYPDLVKDCGVGDELLLDDGRVVMRVDTQTAHELHCTVLIGGPLSDHKGINRRGGGLTAPALTEKDKQDIKLAAEMDLDYLAVSFPRDAADMEYARQLRDESGGTAWLVAKIERAEAVANDEVLDALIRASDAVMVARGDLGVEIGDAELVGVQKRIILHARRHNKAVIVATQMMESMISSPMPTRAEVSDVANAVLDYTDAVMLSAESAAGSYPVEAVQAMARICVGAEKHPTGKTSSHRIGHSFTRCDESIALAAMYTANHFPGVKAIIALTESGYTPLIMSRIRSSVPIYAFSPHRGTQARAAMFRGVYTVPFDPGALPPGQVSQAAVDELLKRGLVEQGDWVILTKGDSYHTIGGTNGMKILHVGDPLV

SEQ ID NO: 7548 - DNA, 1416 bp, Pseudomonas putida
  CDS (1)..(1416)
atgacgcctgataaaaaagttaagatccttgccacccttggccctgcgatcaacggcatcgacgatatccgccagctggtcgaagccggggtgaacatcttccgcctcaacttcagccacggcgaacatgccgaccacgccctgcgctaccagtggatccgcgaagtcgagcaacagctgaactacccgctgggcatcctcatggacctgcaagggccgaagctgcgcgttggccgcttcgccgaaggcaaggtgcagttgcaacgcgggcaggccctgcgcctggatctggacaagaccccgggcgacagccgccgggtcaacctgccgcaccccgaaatcatcgccgccctcgaacccggcatggacctgctgctggacgacggcaagctgcgcctgcgcgtgaccgccaagcacagcgacgccatcgacaccgaggtgctgaatggtggcgagctttccgaccgcaagggcgtcaacgtaccgcaagcggtgctcgacctctccccgctcaccgaaaaagaccgccgcgacctggcctttggcctggagctgggtgtggactgggtcgccctgtcgttcgtgcagcgccctgaggacatcgtcgaagcgcgccagctgattggcgaccgcgcctacctgatggccaaaatcgagaaaccatcggcagtcgagcaactgcaagccatcgccgagctggcagacgcgatcatggtggcccgtggtgacctgggcgtggaagtaccggccgagagcgtgccgcagatccagaagcgcatcatcggcacctgccgccagctaggcaaacccgtggtggtggccacgcagatgctcgagtcgatgcgtttctcgccagcgccaacccgcgccgaagtcacggacgtggccaacgcggtggccgaaggtgccgatgcagtgatgctgtcggccgaaaccgcctcgggtgattacccgctggaagccgtgcagatgatgagcaagatcatccgccaggttgagaacggcccggactaccaggcccagctcgacgtcggccggccaaaggccgaagccaccgtgtcggatgccatcagctgcgccatccgccgcatcagcggcatcctgccagtggcggtgctggtcaactacagcgagtcgggtgcctcgaccctgcgcgcggcacgtgaacggccacgggcaccgatcctcaacctgacgccgaacctgaacaccgcgcgccgcctgagcgtggcttggggtgtgcattcggtggtcaacgaccgcctgcgtcaggtcgacgaggtggtttccaccgccctggagattgcccaggcgcaaggcatggccagccgtggcgacacgctgctgatcaccgctggcgtgcctttcggcaagccgggtacgactaacacgctgcggatcgagactttgatctag

SEQ ID NO: 7549 - protein, 471 aa, Pseudomonas putida
MTPDKKVKILATLGPAINGIDDIRQLVEAGVNIFRLNFSHGEHADHALRYQWIREVEQQLNYPLGILMDLQGPKLRVGRFAEGKVQLQRGQALRLDLDKTPGDSRRVNLPHPEIIAALEPGMDLLLDDGKLRLRVTAKHSDAIDTEVLNGGELSDRKGVNVPQAVLDLSPLTEKDRRDLAFGLELGVDWVALSFVQRPEDIVEARQLIGDRAYLMAKIEKPSAVEQLQAIAELADAIMVARGDLGVEVPAESVPQIQKRIIGTCRQLGKPVVVATQMLESMRFSPAPTRAEVTDVANAVAEGADAVMLSAETASGDYPLEAVQMMSKIIRQVENGPDYQAQLDVGRPKAEATVSDAISCAIRRISGILPVAVLVNYSESGASTLRAARERPRAPILNLTPNLNTARRLSVAWGVHSVVNDRLRQVDEVVSTALEIAQAQGMASRGDTLLITAGVPFGKPGTTNTLRIETLI

SEQ ID NO: 7550 - DNA, 1455 bp, Pseudomonas putida
  CDS (1)..(1455)
atgagcatccgccgcaccaaaatcgtcgccacccttggccccgccagcaactcgccggaagtgatcgaacaactgatcctcgccggcctggacgtggcacgtctgaacttctcccacggcacgccggacgagcacaaggcccgcgcgcgcctgatccgtgacatcgccgccaagaatggccgccatgttgcactgctgggcgacctgcagggtccgaagatccgcatcgccaagttcgccaacaagcgcatcgaactgaagatcggtgacaagttcaccttctccaccgcccacccgctgaccgaaggcaaccaggacatcgtcggtatcgactaccccgacctggtcaaggactgcggcgttggtgacgaactgctgctcgacgatggccgcgtggtcatgcgcgtcgaaaccgccactgcagatgccctgcactgcgtggtgatcatcggtggcccactgtcggaccacaaaggcatcaaccgtaaaggtggcggcctgaccgcaccggccctgaccgaaaaagacaaggccgacatcaaactggctgcggaaatggacctggactacctggccgtatccttcccgcgtgacgccagcgatatggaatacgcgcgcaagctgcgtgacgaagccggcggcagcgcctggctggtagccaagatcgaacgcgccgaagcggtggccgatgacgagaccctcgacaagctgatcgccgcctccgacgctgtgatggttgcccgtggtgacctgggcgtggaaatcggcgacgccgagctgatcgctatccagaagaagatcatccagcacgcccgccgcaacaacaaggccgtgatcgtggcgacccagatgatggagtcgatgatccagaacccgatgccgacccgcgcggaagtgtccgacgtggccaacgccgtgctggacaacaccgatgcggtgatgctgtcggccgaaagcgccgccggttcctacccgatcgaagctgtccaggccatggcacgcatctgcctgggtgccgaaaagcacccgaccagccagaagtccagccatcgcctgcacaccaccttccagcgctgcgacgaaagcatcgccttggcggccatgtacactgccaaccacttcccgggcgtaaaggcgatcatcgccctgaccgaaagcggctacaccccgctgatcatgtcgcgcctgcgttcgcatgtaccgatcttcgccctgtcgccgcaccgcgccacccaggcgcgcgcctcgatgttccgtggcgtgtacccgattgccttcgacccggccgcgctgccggccgataaggtgagccaggcggcggtcgacgaactgctcaaacgtggcctggtggagcaaggtgactgggtgatcctgaccaagggtgacagctaccacaccatcggtggcaccaatggcatgaagatcctgcacgtcggtgatccgctggtcggttag

SEQ ID NO: 7551 - protein, 484 aa, Pseudomonas putida
MSIRRTKIVATLGPASNSPEVIEQLILAGLDVARLNFSHGTPDEHKARARLIRDIAAKNGRHVALLGDLQGPKIRIAKFANKRIELKIGDKFTFSTAHPLTEGNQDIVGIDYPDLVKDCGVGDELLLDDGRVVMRVETATADALHCVVIIGGPLSDHKGINRKGGGLTAPALTEKDKADIKLAAEMDLDYLAVSFPRDASDMEYARKLRDEAGGSAWLVAKIERAEAVADDETLDKLIAASDAVMVARGDLGVEIGDAELIAIQKKIIQHARRNNKAVIVATQMMESMIQNPMPTRAEVSDVANAVLDNTDAVMLSAESAAGSYPIEAVQAMARICLGAEKHPTSQKSSHRLHTTFQRCDESIALAAMYTANHFPGVKAIIALTESGYTPLIMSRLRSHVPIFALSPHRATQARASMFRGVYPIAFDPAALPADKVSQAAVDELLKRGLVEQGDWVILTKGDSYHTIGGTNGMKILHVGDPLVG

SEQ ID NO: 7552 - DNA, 1761 bp, Lactobacillus plantarum
  CDS (1)..(1761)
atgaaaaaaaccaagattgtttcaacacttggtcctgccagcaccgatactgacactattgttaaattaatcgaagccggcgcaaatattttccgctttaacttttcacatggtgatcatgaagaacatttagatcgcttaaacaaagttcacgaagcagaaaagattacgggtaagaccgttggtatcatgcttgatactaagggtgctgaaattcggacgaccgttcaagctaacggaaaatctgaatacaagatcggtgacaaggttcgtatcaccatggatgattcattagatacgacccatgataagattgccgttacttacaagaacctctatgatgatgttcatgtaggtggccatgtcctctttgatgatggtttattagatatgaagatcgacgaaaaggacgaagctaaccgcgaattggttacaactgttcaaaacgccggcgttttaggctcacgtaagggtgttaacgctcctggcgtttcaatcaacttacctgggatcactgaaaaagactcaagtgatattcgctttggtttggatcatgaaatcaactacatcgctgcttcattcgttcgtaagccacaagatgtcttagacattcgtgaattacttgaagaaaagcacatggaacacgttcaaatcttccctaagatcgaatcacaagaaggtatcgacaacgccgatgaaattcttaaggtttgtgatggtttgatggttgctcgtggtgacatgggtgttgaaattcctgctgaaaatgtgccattggtacaaaagagtttaatcaagaagtgtaatgctttaggtatgcctgttatcacggctactcaaatgttagactcaatgcaagaaaacccacgtcctactcgtgccgaagcttctgacgttgccaacgctgtctttgatggtactgacgcaacgatgctttctggtgaaagtgctaacggtctttaccctgttgaatctgttgccatgatggctaagattgacgaaaaggctgaaaacactttggctgaaaacggtacgttacaattaaaccgtttcgacaagactagtgttactgaaacaatcggtattgcgattgctcgggcagctaagaacttgaacattaagacgattgttgctgcgactgaatctggctacactgctaagatgatttcgaagtaccgtccaaatgctgatatcttagcaatcacttttgacgaacggactcaacgtggcttaatggttaactggggtgttcaaccaatcgtggctgaaaaaccagaaaccactgatgacatgtttgatttagctgcttctaaggctgttgaacttggctttgccaaggaaggcgacttaatcttgattactgccggtgtgccagttggcgaacgcggtacgactaacatcatgaagatccaattaattggttctaagttagctgatggtcaaggtgtcggtgatgaaacggttatcggtaaagccgtaatcgcaacgtctgctcaagaagctatcgacaaggccgttgaaggtggcgtcttagttactaagacgactgacaaagactacttaccagcaatcgaaaagtctagtgctttagttgttgaaaacggtggtttaacttcacacgctgctgttgttggtatctcaatgggaattcctgttatcgttggtgttaaggacgctactagtgttattgctgatggtcaattgatcacagttgattcacgtcgtggccttgtataccgcggtgcttcaaacgccctttaa

SEQ ID NO: 7553 - protein, 586 aa, Lactobacillus plantarum
MKKTKIVSTLGPASTDTDTIVKLIEAGANIFRFNFSHGDHEEHLDRLNKVHEAEKITGKTVGIMLDTKGAEIRTTVQANGKSEYKIGDKVRITMDDSLDTTHDKIAVTYKNLYDDVHVGGHVLFDDGLLDMKIDEKDEANRELVTTVQNAGVLGSRKGVNAPGVSINLPGITEKDSSDIRFGLDHEINYIAASFVRKPQDVLDIRELLEEKHMEHVQIFPKIESQEGIDNADEILKVCDGLMVARGDMGVEIPAENVPLVQKSLIKKCNALGMPVITATQMLDSMQENPRPTRAEASDVANAVFDGTDATMLSGESANGLYPVESVAMMAKIDEKAENTLAENGTLQLNRFDKTSVTETIGIAIARAAKNLNIKTIVAATESGYTAKMISKYRPNADILAITFDERTQRGLMVNWGVQPIVAEKPETTDDMFDLAASKAVELGFAKEGDLILITAGVPVGERGTTNIMKIQLIGSKLADGQGVGDETVIGKAVIATSAQEAIDKAVEGGVLVTKTTDKDYLPAIEKSSALVVENGGLTSHAAVVGISMGIPVIVGVKDATSVIADGQLITVDSRRGLVYRGASNAL

SEQ ID NO: 7554 - DNA, 1755 bp, Clostridium tetani
  CDS (1)..(1755)
atgcaaaaaactaaaatggtgtttaccataggaccagctagtgatagcgaagaagtattaagtgagttaataaaagcaggaatgagtgcatcaaggcataacttttcacatgggacccatgaagaacataaaataaggattgatttaataagaaaattaagtgacaaatttaataagaatattgctgtaatattagacacaaaaggacctgaaataagaacaggagattttaaagataaaactgtacaattaaaagaaggaaataaattcactatatactgtggggaagaaattttaggagatgaaacaaagtgttctataacttataatgatttgcataatgatgtaaaaacaggagattccatactaatagatgatggacttgtaggattagaagttgaagaagtagagggaagtaaagtacattgtgtagttaaaaatagtggtgctgtaagtaaccataagggtgtaaatgtacctggagtagatgtttcattaccttcattaacagaaaaagataaaagtgatcttgaatttggatgtaaagtaggagtagattttattgcagcatcttttattagaaaaggttcagacgtattggaaataagaaaggttctagaagaaaacggcggtacagatatacaaatattttctaaaatagaaaatcaacaaggggtagaaaatatagatgaaataataaagttttctgatggaataatggtagctagaggagatatgggtgtagaattacaaatggaacaagtacctataattcaaaaaatgattatagagaaatgtaacaaagctggcaaacctgttatcacagctactcaaatgttagactctatgattagaaatccaagaccaacaagagcagaagtttcagatgtagccaatgctatatttgatggaactgatgcggtaatgttaagtggtgaaacagcaggaggaaaatatcctatagaagctgctaaagctatggctaagattgctagaactgcagaagaaacaatggattatgatgaaatatttaacagaaaaagagaagcgcgtgtattaagtgtggctaatgcgataagcatagcaacctgtacaacagcttcagagttaaatgcatctgctatattaacagctactcaaacaggatatacagctagagcagtttccaaatatagaccagcatgtcctattatagcgattacaccaagtaagaatgtagcaagaaagttagcattgagttggggtgtgttcccaatacttactactaaatttacatccacagatgctttaatagaaaactctgttgatatagcattgacagcagaatatataagaaaaggagatttggttgtaatagcagctggaatacctgtaagttattcaggaacaactaacatgctaaaggttcatgtagttggagatatccttgttcagggaagaggtgctggaaatagtgcaggttatggtatagctaaagttgtaaatagtacagaagaagcagaaagggttatagaaagtggagatatattagttgtaaaagatgcagatatagattatgtttctatactaaatagagtatcaggagttataactgaaagaggaggattgacttctcacttagcaatagaatgtataaccaatgaaataccatttatatgtggggcaggtggggcaacagatgtattaaaaagtggatatttcataaccatggatgtaaaaagaggaatagtatataacggtaggattactatataa

SEQ ID NO: 7555 - protein, 584 aa, Clostridium tetani
MQKTKMVFTIGPASDSEEVLSELIKAGMSASRHNFSHGTHEEHKIRIDLIRKLSDKFNKNIAVILDTKGPEIRTGDFKDKTVQLKEGNKFTIYCGEEILGDETKCSITYNDLHNDVKTGDSILIDDGLVGLEVEEVEGSKVHCVVKNSGAVSNHKGVNVPGVDVSLPSLTEKDKSDLEFGCKVGVDFIAASFIRKGSDVLEIRKVLEENGGTDIQIFSKIENQQGVENIDEIIKFSDGIMVARGDMGVELQMEQVPIIQKMIIEKCNKAGKPVITATQMLDSMIRNPRPTRAEVSDVANAIFDGTDAVMLSGETAGGKYPIEAAKAMAKIARTAEETMDYDEIFNRKREARVLSVANAISIATCTTASELNASAILTATQTGYTARAVSKYRPACPIIAITPSKNVARKLALSWGVFPILTTKFTSTDALIENSVDIALTAEYIRKGDLVVIAAGIPVSYSGTTNMLKVHVVGDILVQGRGAGNSAGYGIAKVVNSTEEAERVIESGDILVVKDADIDYVSILNRVSGVITERGGLTSHLAIECITNEIPFICGAGGATDVLKSGYFITMDVKRGIVYNGRITI

SEQ ID NO: 7556 - DNA, 1437 bp, Bradyrhizobium japonicum
  CDS (1)..(1437)
atgaggcgtcttcgccgtatcaagattctcgcgacccttggacctgcctcttcggacctcgcgatgatccgccgcctgttcgaggccggcgccgacctgttccgcatcaacatgagccacaccccgcatgacaagatgcgggagctggtggcgacgatccgcaatgtcgagagcagctacggccggccgatcggcatcctggtcgaccttcagggaccgaagctcaggctcggcgccttcgccgaaggctcggtccagctccagaacggccagaccttcacgctcgattccgacaaggcgccgggcgatgccacgcgcgtcaatctcccgcatccggagatcctcgccgcgctgcggcccggccatgcgctgctgctggacgacggcaaggtccggctgatcgcggaggagacctcgaaagagcacgcggtgacgcgcgtcgtggtcggcggacggatgtccgaccgcaagggcgtcagcctgcccgacaccgacctgccggtctcggcgatgacgccgaaggaccgcgccgacctcgaggcggcgctggtcaccggcgtcgactggatcgcgctgtccttcgtgcagcgcgccgacgacgtgatcgaggccaagaagatgatccgcggccgcgccgctgtcatggccaagatcgagaagccgcaggcgatcgaccgcctcgccgacatcatcgaggcctccgacgcgctgatggtggcgcgcggcgatctcggtgtcgagctgccgctggagcgcgtgccgagcctccagaagcagatgacgcgcatggcgcgccgcgccggcaagccggtggtgatcgcgacccagatgctggaatcgatgatccagtcgccggtgccgacacgcgccgaggtctcggacgtcgccaccgccgtctatgaaggcgccgacgccatcatgctgtcggcggaatcggcggccggaaaattcccggtcgaggcggtctcgaccatgaaccgcatcggcgaagaggtcgagcgcgacccgatttatcggtccgtgctgaccgcgcagcgccccgcgccggaatccaccgcaggcgacgccatcgcggacgccgcccgccagatcgccgagacgctcgacctgccggccctgatctgctggaccagctcgggctcgaccgcggtgcgcgtcgcgcgcgagcggccgaagccgccgatcgtggcgatcacgccgaacatcgcggccggacgccggctggcggtggtctggggcgtgcattgcgtggtggcggaagatgcgcgcgaccaggacgacatggtgagccgcgccggccagatcgcgttccgcgacggcttcgtccgcgccggccagcgcgtgatcatcgtcgccggcgtgccgctcggcattcccggcaccaccaacatggtgcgcatcgcctccgtcggccccgagggcggcgcggatatctag

SEQ ID NO: 7557 - protein, 478 aa, Bradyrhizobium japonicum
MRRLRRIKILATLGPASSDLAMIRRLFEAGADLFRINMSHTPHDKMRELVATIRNVESSYGRPIGILVDLQGPKLRLGAFAEGSVQLQNGQTFTLDSDKAPGDATRVNLPHPEILAALRPGHALLLDDGKVRLIAEETSKEHAVTRVVVGGRMSDRKGVSLPDTDLPVSAMTPKDRADLEAALVTGVDWIALSFVQRADDVIEAKKMIRGRAAVMAKIEKPQAIDRLADIIEASDALMVARGDLGVELPLERVPSLQKQMTRMARRAGKPVVIATQMLESMIQSPVPTRAEVSDVATAVYEGADAIMLSAESAAGKFPVEAVSTMNRIGEEVERDPIYRSVLTAQRPAPESTAGDAIADAARQIAETLDLPALICWTSSGSTAVRVARERPKPPIVAITPNIAAGRRLAVVWGVHCVVAEDARDQDDMVSRAGQIAFRDGFVRAGQRVIIVAGVPLGIPGTTNMVRIASVGPEGGADI

SEQ ID NO: 7558 - DNA, 1458 bp, Bacteroides thetaiotaomicron
  CDS (1)..(1458)
atgttactgaaacagacaaaaatcgtcgcatccatttcggacagacgttgcgatgtggactttataaaacagctgtttgaagctgggatgaatgtggtacgtatgaatacggctcacgctagccgtgaaggttttgaagcgttgattgccaatgtacgttccgtatccaaccggattgcaatcctcatggataccaaaggaccggaagtacgtacaactgccaatgcggaaccgattccatatcagataggtgataaagtaaagattgtcggcaatcctgatcaggagacgactcgtgaatgtatcgctgtttcgtatcctaactttgtgaacgatttgaatatcggaggtctggttctgattgacgatggtgatcttgaactggaagtaatcgataagacagccgattatctgctttgcgaagtgaaaaacgatgcaacgttgggaagccgcaagagcgtgaacgtcccgggtgttcgtatcaatcttccttcattgacagagaaagaccgtaacaatatactttacgcgattgaaaaggatatcgatttcatcgctcactctttcgtgcgcaaccgtcaggacgtacttgatatccgtgaaattctggatgctcacaatagtgatatccggattattgccaagattgagaatcaggaaggggtggacaacatcgacgagattcttgaagtggcggacggcgtgatggtagcccgtggtgacctgggtatcgaagtgccgcaggaacgtattccgggtatccagcgtgtgctgatccgcaaatgtatcctggcaaagaaaccggtgatcgttgcgactcagatgcttcataccatgatcaacaatcctcgtccgacccgcgcggaagtgaccgatatcgcgaatgcaatctactatcgtacggatgctctgatgttgagcggtgagactgcttatggcaaatatccggtagatgcagtcaagacaatgaccaagatcgcggcccaggctgaaaaagataaactggaagagaatgatatccgtatcccgttgaacgaaaacagtaacgatgtaacggccttccttgctaaacaggcagtgaaagctacatcgaaactgaagatacgtgccatcatcacagacagctatagcggacggaccgcccgtaatctggcagctttccgtggtaagttcccggtattggctatctgctataaagaaaagaccatgcgtcatctggcactttcttatggagtggaagcaatctatatgccggagctggccaacggacaggaatattattttgccgctttgcgccgcctgttgaaggaaggacgtttgcagccgactgatatggtaggatatctgagtagcggtaaggcaggtacacaaacttcattcctcgaaatcaatgtcgtggaagatgcgttgaaacatgcgggagaaactgtattgcctaacaacaatcgttatctctaa

SEQ ID NO: 7559 - protein, 485 aa, Bacteroides thetaiotaomicron
MLLKQTKIVASISDRRCDVDFIKQLFEAGMNVVRMNTAHASREGFEALIANVRSVSNRIAILMDTKGPEVRTTANAEPIPYQIGDKVKIVGNPDQETTRECIAVSYPNFVNDLNIGGLVLIDDGDLELEVIDKTADYLLCEVKNDATLGSRKSVNVPGVRINLPSLTEKDRNNILYAIEKDIDFIAHSFVRNRQDVLDIREILDAHNSDIRIIAKIENQEGVDNIDEILEVADGVMVARGDLGIEVPQERIPGIQRVLIRKCILAKKPVIVATQMLHTMINNPRPTRAEVTDIANAIYYRTDALMLSGETAYGKYPVDAVKTMTKIAAQAEKDKLEENDIRIPLNENSNDVTAFLAKQAVKATSKLKIRAIITDSYSGRTARNLAAFRGKFPVLAICYKEKTMRHLALSYGVEAIYMPELANGQEYYFAALRRLLKEGRLQPTDMVGYLSSGKAGTQTSFLEINVVEDALKHAGETVLPNNNRYL

SEQ ID NO: 7560 - DNA, 2797 bp, Staphylococcus epidermidis
  CDS (854)..(2611)
atgatattcataagcttgaattgggttcagtaggggatacaattcaacgaggaggaactttcctcttttccgcaaggtgccctcagttcaaagaagaggatgtacgtaagaaagctattgagaatttacgtaagcgtggtatcgaaggtttagttgttattggaggagatggcagctatagaggggcacaacgaattagtgaggaatgtaaagaaattcaaacaattggtattcctggtacaattgataatgatattaatggtacagattttacaattggttttgatactgcattaaacactattattgaatcagtcgataagattagagatacggcatcaagtcacgcaagaacgtttattgttgaagttatggggcgtgattgtggagatttagctttatgggctggattatctgtaggtgctgaaacgattgttttaccagaagtcaatacagatattaaggatgtagctgaaaagattgaacagggtattaaaagagggaaaaaacattctatcgttatggttgcagaaggttgtatgagcggccaagaatgtgcagatgagttaacgaagtatattaacattgatacacgagtttcagtgttaggtcacattcaacgtggcggtagcccatctggtgctgatcgagtattagcttctcgacttggtggatatgctgttgaactattaaaacaaggcgagacagctaaaggtgttggcattaggaataatcaattaacctctacgccgtttgatgaaatttttgctgaaagtgatcgcaaatttaatagtcaaatgtatgaattagcaaaagaattatcaatttaaatttatttgggaggattataaaaatgagaaagactaaaattgtatgtacaataggaccagcttcagaatcagaggaaatgctcgaaaaactaatgaatgcaggaatgaacgttgcgcgtttaaatttctcacatggtagtcatgaagaacataaagcaagaattgatacaattcgtaaagttgctaaacgtttaaataaaacaattggcttgttattggatactaaagggccagaaattcgtacgcacaatatgaaagatggacttattgttttagaaaaaggcaaagaagtcattgtcagtatgaatgaagttgaaggaacacctgaaaaattctctgtaacatatgaaaatctaatcaatgatgtcaatattggatcatatatactattagatgatggtttagttgaacttcaagtcaaagaaattaacaaagataaaggcgaagttaaatgtgatatcttaaatactggtgaattaaaaaataaaaaaggtgttaacttacctggtgttaaagttaatttacctggtatcactgataaagatgccgatgatatcagatttggtataaaggaaaatgtagactttatagctgcaagttttgtaagacgtccaagtgatgttttagatatccgtcaaattcttgaagaagaaaaagcagaaataacaattttccctaaaatcgaaaaccaagaaggtatcgataatattgaagaaattcttgaagtatctgatggattaatggtagcacgtggtgatatgggtgttgaaattccaccagaaagcgtaccaatggttcaaaaagatttaattagaaaatgtaataaattaggaaaacctgtaattactgcgactcaaatgcttgattctatgcaacgtaatccacgtgcgacacgtgcagaagcaagtgacgtagctaatgcaatatacgatggtactgacgctgtaatgttatcaggcgaaactgcagcaggtcaatatcctgaagaagctgttaaaactatgcgtaatattgcagtttctgctgaagcagcgcaagactataaaaaattattaagtgatcgtactaaattagttgaaacttcattagtaaatgcaattggtgtttctgttgcacatactgccttaaacttaaatgtaaaagctattgtagcagcaactgaaagtggttcaacagcacgtacgatttctaaatatcgtccacattcagatatcattgctgtaacacctagcgaaaaaactgctagacaatgtgcaattgtatggggagtaaatccggtcgttaaagaaggacgtaaaacaactgatgctttactaaataatgctgtagcaacagcagtagaaactggtagagtttcaaacggagatttaattattattactgctggtgtacctactggagaaaaaggaactacaaatatgatgaaaatccacttagtaggtgatgagattgctaaaggccaaggtgttggtagaggatctgttgtaggccatgcaattgtcgcagatagtgctagtgatttagaaggtaaagatttatctgataaagttattattacaaattctgttgatgaaacattagtaccatatgttgaaaaagctataggtctaattacagaagaaaatggtattacttcaccaagcgcaattataggtttagaaaaaggcatacctactgttgttggtgtagaacaagcaactaaagaaattaaaaatgatatgttagtgactttagatgcgtcacaaggtaaagtgtttgaaggttatgctaacgtcctttaatttaacaaatgataaattaaaaaagaggatttgataatcacaaagctttaaagctattcataagagagcctggaacattgatttatgttccaggctcttattatttagggtagttgattattgaaattaaaaatgattaaatcaaccttttataacactagttattgattttaaagtagaacacca

SEQ ID NO: 7561 - protein, 585 aa, Staphylococcus epidermidis
MRKTKIVCTIGPASESEEMLEKLMNAGMNVARLNFSHGSHEEHKARIDTIRKVAKRLNKTIGLLLDTKGPEIRTHNMKDGLIVLEKGKEVIVSMNEVEGTPEKFSVTYENLINDVNIGSYILLDDGLVELQVKEINKDKGEVKCDILNTGELKNKKGVNLPGVKVNLPGITDKDADDIRFGIKENVDFIAASFVRRPSDVLDIRQILEEEKAEITIFPKIENQEGIDNIEEILEVSDGLMVARGDMGVEIPPESVPMVQKDLIRKCNKLGKPVITATQMLDSMQRNPRATRAEASDVANAIYDGTDAVMLSGETAAGQYPEEAVKTMRNIAVSAEAAQDYKKLLSDRTKLVETSLVNAIGVSVAHTALNLNVKAIVAATESGSTARTISKYRPHSDIIAVTPSEKTARQCAIVWGVNPVVKEGRKTTDALLNNAVATAVETGRVSNGDLIIITAGVPTGEKGTTNMMKIHLVGDEIAKGQGVGRGSVVGHAIVADSASDLEGKDLSDKVIITNSVDETLVPYVEKAIGLITEENGITSPSAIIGLEKGIPTVVGVEQATKEIKNDMLVTLDASQGKVFEGYANVL

SEQ ID NO: 7562 - DNA, 1440 bp, Wigglesworthia glossinidia brevipalpis
  CDS (1)..(1440)
atgcatagaataataagaagaacaaaaatagttgctacattaggaccatcaacagatttaaataataatttagaaaaaatgatattagctggagctaatatggttcgtatgaatttttctcatggaaatttttacgatcatgcaagaagaacaaaacaagtgagaaacatttctcataaactaggtaaaaatattgctattttaggagatttacaaggaccaaaaataagaatatctacttttatgacaggcaaagtatttttatcaccaggagatcaattcatactagatgcatcattaagcaaggatcttggaacagttgaaagtgttggaattgattataaatatcttccaaaagatgtatttccaggagatgttttattattagatgacggaaggatacagctaaaagtcaaaaaaattgtaaataaaaaaatttttacaactgtatatataggaggatatttatataataataaaggtattaataaattaggaggaggtttatcggctaattctttgacagaaaaagacaaaaaagatattatttgcgcagctaaaataggaatagattatttagctgtttcttttcctagaacaggaaaagacttaaaatatgcaagaaatttattaaataatgtagaaagtcatgcaaaaattatttcaaaaatagaaagagcagaagcggtagcaaataatgatattatagatgaaataataacagaatcagatgctattatggtagctagaggagatttgggaatagaaattggagatccagaattagtaggagtgcaaaaaaaattaatacaaagagctagagatttaaatcgtgcggtaattactgcaactcaaatgatggaatccatggtttataaccctatgccaaccagagcagaagttatggatgttgctaatgcagtattggatggcacagatgcagttatgttatcagcagaaacagctattggaaaatatccagtagaaactgtagaatctatgtctaatgtatgcataggagctgaaaaaatttctaatattaattctttgaagaatagattaaacattaaatttaaaaccgtagaagaatcaatggcggtatctgcaatgtatattgcaaatcatttaaatatgataaaagctataatttctcttacagaatctggtaaaactccattaattatgtctcgtataagttctggattaccaatttttgctctttcaaaacatgaacatactttaaatttaacagctttatatagaggggttactcctgtttattttaaaaataatgaaaaaggaatttcagctgctgattctgctattaatttgcttaaagaaaaaaaatttttattctctggagattttgtagtaattactcaaggagatgtcatggggactattggaaaaacaaataccagccgtatattaattgtataa

SEQ ID NO: 7563 - protein, 479 aa, Wigglesworthia glossinidia brevipalpis
MHRIIRRTKIVATLGPSTDLNNNLEKMILAGANMVRMNFSHGNFYDHARRTKQVRNISHKLGKNIAILGDLQGPKIRISTFMTGKVFLSPGDQFILDASLSKDLGTVESVGIDYKYLPKDVFPGDVLLLDDGRIQLKVKKIVNKKIFTTVYIGGYLYNNKGINKLGGGLSANSLTEKDKKDIICAAKIGIDYLAVSFPRTGKDLKYARNLLNNVESHAKIISKIERAEAVANNDIIDEIITESDAIMVARGDLGIEIGDPELVGVQKKLIQRARDLNRAVITATQMMESMVYNPMPTRAEVMDVANAVLDGTDAVMLSAETAIGKYPVETVESMSNVCIGAEKISNINSLKNRLNIKFKTVEESMAVSAMYIANHLNMIKAIISLTESGKTPLIMSRISSGLPIFALSKHEHTLNLTALYRGVTPVYFKNNEKGISAADSAINLLKEKKFLFSGDFVVITQGDVMGTIGKTNTSRILIV

SEQ ID NO: 7564 - DNA, 1413 bp, Vibrio vulnificus
  CDS (1)..(1413)
atgaaaaagaccaaaatcgtatgtacgattggcccaaaaactgagtctgtagagaaactgactgaactagtcaactcaggtatgaacgtaatgcgcctgaacttttctcacggtgactacgtagagcacggcactcgtatcgcgaacttccgccaagtaatggaaaacacaggtaagcaacttgctatcttactagacactaaaggtccagaaatccgcactatcaaactagaaaacggcgacgacgttgatctagtagctggtcaagaattcactttcacgactgatacttctgttgttggtaacaaagacatcgtagcagtaacttacccaggttttgctgcggatctatctgctggtaacactatcctagttgacgatggtctaatcgagatggaagttatcgcaacgactgcgactgaagttaagtgtaaagtactgaacaacggtgctctaggcgaaaacaaaggtgttaacctaccaggcgtttctgtaaacctacctgcactatctgaaaaagacaaaaacgaccttaaatttggttgtgagcaaggcgttgacttcgttgcagcatctttcatccgtaaagcatctgacgtaaaagaaatccgtgaagttctagcagcaaacggcggcgcgaacattcagatcatttctaagattgaaaaccaagaaggtgttgataacttcgacgaaatcctagagctttctgacggtatcatggttgctcgtggtgacctaggtgtagaaatccctgcagaagaagttatcttcgcacagaagatgatgatcgaaaaatgtaaccgcgcacgtaaagtggttatcactgcaactcaaatgctagattctatgatcaagaacccacgtccaactcgtgctgaagcgggtgacgttgcgaacgcaatcatggatggtactgatgcagtcatgctttctggcgaaacagcgaaaggtaaataccctgttgaagcggtaactatcatggcgcaaatcgctaaccgtactgattctgtactaaaagcagagctaggctctcgtctagacagcccacgcctacgtatcactgaagcggtatgtaaaggtgcagtagacacagctgagaaactagcagcaccactgatcatcgttgcaactgaaggtggtaagtctgcacgctctgtacgtaagtacttcccaactgcaaacattcttgcgctaacgacgaacaagaagacagcagctcaacttgtactgactaaaggtgttacacctgttgttgttgattcaatcgacaacacggatgcgttctacgtaaccggtaaagagcttgctcttgaatctggcctaggtagcaaaggcgacatcgttgtgatggtatctggtgctcttgttgcatctggtacaacgaatactgcgtcagtacacgtactataa

SEQ ID NO: 7565 - protein, 470 aa, Vibrio vulnificus
MKKTKIVCTIGPKTESVEKLTELVNSGMNVMRLNFSHGDYVEHGTRIANFRQVMENTGKQLAILLDTKGPEIRTIKLENGDDVDLVAGQEFTFTTDTSVVGNKDIVAVTYPGFAADLSAGNTILVDDGLIEMEVIATTATEVKCKVLNNGALGENKGVNLPGVSVNLPALSEKDKNDLKFGCEQGVDFVAASFIRKASDVKEIREVLAANGGANIQIISKIENQEGVDNFDEILELSDGIMVARGDLGVEIPAEEVIFAQKMMIEKCNRARKVVITATQMLDSMIKNPRPTRAEAGDVANAIMDGTDAVMLSGETAKGKYPVEAVTIMAQIANRTDSVLKAELGSRLDSPRLRITEAVCKGAVDTAEKLAAPLIIVATEGGKSARSVRKYFPTANILALTTNKKTAAQLVLTKGVTPVVVDSIDNTDAFYVTGKELALESGLGSKGDIVVMVSGALVASGTTNTASVHVL

SEQ ID NO: 7566 - DNA, 1785 bp, Synechococcus elongatus
  CDS (1)..(1785)
atgtcgaaccagccgttgcaacgccgcaccaaaattgtcgccaccattggtccagcagtcagtcaccccgacaaattgcgcgccattattcaagcgggagcaaccaccctgcgtctaaacttttcccatggcacccatgacgatcaccagcgcagcattcgcctcattcgccaaatttcctatgaactcgggcaaccggtggggattttgcaggacttgcaaggccccaagattcgccttgggcggtttgagcatggctccatttccctcaagcggggcgatcgctttaccctcacgagtcgccctatcctgggcaatcagcacattagctcaattacctatccccccttggcccaagaggtgcccgccggtgccacgattttgctcgacgatggccgcgtggaaatgctcgtggaagaagtggataaagaggcgggggagctccattgccaagtgattgttgggggtaccctctccaatgccaagggtgtgaactttccgggggtttacctttcgattaaagccctaacagagaaagatcgcgaagatctgatgtttggcctcaatcaaggggtggattgggtggccctcagcttcgttcgcaatccccaagatgtactggagatcaaagaactgattgccaacgctgggaagcaggtgccagtcattgccaaaatcgaaaagcacgaggcgatcgagcagatggatgccattctctccctctgtgatggcgtcatggtggcacggggtgatttgggggttgaattgcccgccgaagatgtaccgattctgcaaaaacggctgatcgctgctgccaaccgcttgggcattccggtcattacggccacacaaatgctcgacagcatggtgaaaagccctcgtcctacccgggccgagatttccgatgtcgccaatgccattctcgatggcactgatgccgtgatgctctccaatgaaacggcgatgggggaataccccgtcgaggcggtcaagatgatggccaccattgccgcccgcattgacaatcaacctcaactgcggcaacctcccggggctgagtctacggcggtgcgttctattcccagtgccattagtcaagcggtgggacaggtggcggcgcagctgcatgccaaagcgatcattacccaaactaaaacaggcgcaacggcgcggaatgtttccaagtttcgtccccaaattcctattttggcggcaacaccccatatcgaagtggcccgtcgcctccagttggtctggggcgtcgaaccgctgctgacattggatcatccctcgatgcgcgaatccttccaggcggcgattaatgctgcccaggagcggggcttccttgaggagggggatctggtggtcatgacggcgggcaccctacaaggggtttctggctccacggatatgatcaaggtggaactggttacctcagtgatgggacggggttgtggcattggccatggatctgttagtggtcctgcgcgggtggtacgccaagggatgccggtgcgtacgtttaatcgtggggaaattttggtggctgagcgcaccagtgctgagttggtggaagtgattcgcaaagcggcaggcattattaccgaggaggacagcctcacaagccatgccgccgtcttggggttgcggctgggtattcctgtgattgtgggcgtcaaaaatgccactcgcctgatccgtgagggcaccattctgacgatggatgtggaacggggcgtggtttattccggtgcccgcaatggcggcgagcgatcgccagagtag

SEQ ID NO: 7567 - protein, 594 aa, Synechococcus elongatus
MSNQPLQRRTKIVATIGPAVSHPDKLRAIIQAGATTLRLNFSHGTHDDHQRSIRLIRQISYELGQPVGILQDLQGPKIRLGRFEHGSISLKRGDRFTLTSRPILGNQHISSITYPPLAQEVPAGATILLDDGRVEMLVEEVDKEAGELHCQVIVGGTLSNAKGVNFPGVYLSIKALTEKDREDLMFGLNQGVDWVALSFVRNPQDVLEIKELIANAGKQVPVIAKIEKHEAIEQMDAILSLCDGVMVARGDLGVELPAEDVPILQKRLIAAANRLGIPVITATQMLDSMVKSPRPTRAEISDVANAILDGTDAVMLSNETAMGEYPVEAVKMMATIAARIDNQPQLRQPPGAESTAVRSIPSAISQAVGQVAAQLHAKAIITQTKTGATARNVSKFRPQIPILAATPHIEVARRLQLVWGVEPLLTLDHPSMRESFQAAINAAQERGFLEEGDLVVMTAGTLQGVSGSTDMIKVELVTSVMGRGCGIGHGSVSGPARVVRQGMPVRTFNRGEILVAERTSAELVEVIRKAAGIITEEDSLTSHAAVLGLRLGIPVIVGVKNATRLIREGTILTMDVERGVVYSGARNGGERSPE

SEQ ID NO: 7568 - DNA, 1503 bp, Streptococcus mutans
  CDS (1)..(1503)
atgaataaacgcgtaaaaattgttgcaactttaggtccagcggtagaaatccgtggtggtaaaaaatttggtgaagatggctattggggtgaaaagcttgatgttgaagcttcagcagcaaaaattgctgaattgattacagaaggagccaatgtttttcgttttaacttttcacatggtgaccatgctgagcaaggtgaacgtatggcgactgtacgtcgcgcggaagaattggcacgtcaaaaggttggattccttcttgatactaaaggacctgaaatgcgtacagaattgtttgcagatggtgtcaaagaatatgaatataagactggtgataaacttcgtatagcaactaaacaaggcattgaatcaactaaggatgtcattgctttaaatgttgcaggcggtcttgatatttatgatgatgttgctgtcggtcagactattcttattgatgatgggaaacttggccttacagtaaccgctaaagatattacaactcgcgagtttgaagtaaccgttgaaaatgatggcattattgctaaacaaaaaggtgtcaatattcctaatactaaaattcctttcccagcacttgctgagcgtgataatgcagatattcgctttggtttggaacaaggtcttaactttattgctatttcttttgttcgtactgctaaggatgttaatgaagttcgtcaaatttgtaaagaaacaggtaacgagcacgtaaaactttttgctaaaattgaaaatcaacaaggtattgataacattgatgaaatcattgatgcagctgacggtatcatgattgctcgcggtgacatgggtattgaagtgccgtttgaaatggttccagtttatcaaaaaatgattatcacgaaagttaatgcagcagggaagtcagctatcacagcaacaaatatgcttgaaacaatgactgacaaaccacgtgcaacacgttccgaagtctctgatgtctttaatgctgtcattgatggtactgatgcaacaatgctttctggtgaatcagctaatggtaagtatccagttgaagctgttcgtaccatggcaacaattgataagaatgctcaaacacttcttaatgaatatggccgtttgaattcagataatttgccacgtaccaacaagactgaggttgtcgcttcagctgttaaagatgcgactaaatcaatggatattaaattggttgttacaattacagaatctggtaacacagctcgtttaatttcaaaataccgtccggatgcagatatcttagctttaacatttgatgaaaaagtccaaaaatcattgatgattaactggggagttattccaatcttaacagaaaaacctgcatctactgatgatatgtttgaaattgcagaaaaagcagctcttaaatcaggtttggtagagtctggtgacaacatcgttattgttgctggtgtaccggttggatctggtggtaccaatactatgcgtgttcgtaccgttcaataa

SEQ ID NO: 7569 - protein, 500 aa, Streptococcus mutans
MNKRVKIVATLGPAVEIRGGKKFGEDGYWGEKLDVEASAAKIAELITEGANVFRFNFSHGDHAEQGERMATVRRAEELARQKVGFLLDTKGPEMRTELFADGVKEYEYKTGDKLRIATKQGIESTKDVIALNVAGGLDIYDDVAVGQTILIDDGKLGLTVTAKDITTREFEVTVENDGIIAKQKGVNIPNTKIPFPALAERDNADIRFGLEQGLNFIAISFVRTAKDVNEVRQICKETGNEHVKLFAKIENQQGIDNIDEIIDAADGIMIARGDMGIEVPFEMVPVYQKMIITKVNAAGKSAITATNMLETMTDKPRATRSEVSDVFNAVIDGTDATMLSGESANGKYPVEAVRTMATIDKNAQTLLNEYGRLNSDNLPRTNKTEVVASAVKDATKSMDIKLVVTITESGNTARLISKYRPDADILALTFDEKVQKSLMINWGVIPILTEKPASTDDMFEIAEKAALKSGLVESGDNIVIVAGVPVGSGGTNTMRVRTVQ

SEQ ID NO: 7570 - DNA, 1503 bp, Streptococcus agalactiae
  CDS (1)..(1503)
atgaataaacgcgtaaaaatcgttgcaacacttggtcctgcggtagaattccgtggtggtaagaagtttggtgagtctggatactggggtgaaagccttgacgtagaagcttcagcagaaaaaattgctcaattgattaaagaaggtgctaacgttttccgtttcaacttctcacatggagatcatgctgagcaaggagctcgtatggctactgttcgtaaagcagaagagattgcaggacaaaaagttggcttcctccttgatactaaaggacctgaaattcgtacagaactttttgaagatggttcagatttccattcatatacaacaggtacaaaattacgtgttgctactaagcaaggtatcaaatcaactccagaagtgattgcattgaatgttgctggtggacttgacatctttgatgacgttgaagttggtaagcaaatccttgttgatgatggtaaactaggtcttactgtgtttgcaaaagataaagacactcgtgaatttgaagtagttgttgagaatgatggccttattggtaaacaaaaaggtgtaaacatcccttatactaaaattcctttcccagcacttgcagaacgcgataatgctgatatccgttttggacttgagcaaggacttaactttattgctatctcatttgtacgtactgctaaagatgttaatgaagttcgtgctatttgtgaagaaactggcaatggacatgttaagttgtttgctaaaattgaaaatcaacaaggtatcgataatattgatgagattatcgaagcagcagatggtattatgattgctcgtggtgatatgggtatcgaagttccatttgaaatggttccagtttaccaaaaaatgatcattactaaagttaatgcagctggtaaagcagttattacagcaacaaatatgcttgaaacaatgactgataaaccacgtgcgactcgttcagaagtatctgatgtcttcaatgctgttattgatggtactgatgctacaatgctttcaggtgagtcagctaatggtaaatacccagttgagtcagttcgtacaatggctactattgataaaaatgctcaaacattactcaatgagtatggtcgcttagactcatctgcattcccacgtaataacaaaactgatgttattgcatctgcggttaaagatgcaacacactcaatggatatcaaacttgttgtgacaattactgaaacaggtaatacagctcgtgccatttctaaattccgtccagatgcagacattttggctgttacatttgatgaaaaagtacaacgttcattgatgattaactggggtgttatccctgtccttgcagacaaaccagcatctacagatgatatgtttgaggttgcagaacgtgtagcacttgaagcaggacttgttgaatcaggcgataatatcgttatcgttgcaggtgttcctgtaggtacaggtggaactaacacaatgcgtgttcgtactgttaaataa

SEQ ID NO: 7571 - protein, 500 aa, Streptococcus agalactiae
MNKRVKIVATLGPAVEFRGGKKFGESGYWGESLDVEASAEKIAQLIKEGANVFRFNFSHGDHAEQGARMATVRKAEEIAGQKVGFLLDTKGPEIRTELFEDGSDFHSYTTGTKLRVATKQGIKSTPEVIALNVAGGLDIFDDVEVGKQILVDDGKLGLTVFAKDKDTREFEVVVENDGLIGKQKGVNIPYTKIPFPALAERDNADIRFGLEQGLNFIAISFVRTAKDVNEVRAICEETGNGHVKLFAKIENQQGIDNIDEIIEAADGIMIARGDMGIEVPFEMVPVYQKMIITKVNAAGKAVITATNMLETMTDKPRATRSEVSDVFNAVIDGTDATMLSGESANGKYPVESVRTMATIDKNAQTLLNEYGRLDSSAFPRNNKTDVIASAVKDATHSMDIKLVVTITETGNTARAISKFRPDADILAVTFDEKVQRSLMINWGVIPVLADKPASTDDMFEVAERVALEAGLVESGDNIVIVAGVPVGTGGTNTMRVRTVK

SEQ ID NO: 7572 - DNA, 1440 bp, Shewanella oneidensis
  CDS (1)..(1440)
atgttccgcagaaccaaaatcgtcaccacactgggtcccgccactgaccgtgacgataacttacgccgtattattgcggcaggtgcaaacgttgttcgtcttaacttctcccacggctcccccgaagatcatctcaaacgcgctactcaagctcgcgaaatcgcaaaagaattaggtgtacatgttgctattttaggtgacctacaaggccctaaaatccgtgtgtctacctttaaagacaacaagaaaattcaactgaaattaggccaaacctatattcttgacgccgaacttgctaaaggtgaaggcgatgagaatcaagtcggtatcgactataagcaattgcctgatgatgtgaatgttggcgacatcctgatgctcgatgacggccgagtacaactgcgtgttgagcgcgttgaaggtcgtaaagtccatactactgtgacggttgcaggtcctttatcgaacaataaagggatcaacaagcaaggtggtggtttgtcggctgcggcactaactgaaaaagacaaggcagacattctcaccgcagctatgatccaagtggattacttagccgtgtcattcccacgtagcggtgcagatctcgaatatgcacgctctttagcgcagcaggctggcagtaacgcactgatcgtcgcgaaggttgaacgtgcagaagcggttgccagtgatgaagcaatggatgatgtgattttagcctctgatgttgtgatggttgcccgcggtgatttaggggttgagattggtgatgctgcactggtagcagtacaaaagaaactcatcgcccgttcacgtcagctcaataaaatcgtcatcaccgcgacccaaatgatggaatcgatgatctcgagcccaatgccaacccgtgcagaagtgatggacgtggcaaacgccgtgcttgatggtaccgacgctgtgatgttatcagccgaaaccgcagcgggtgacttcccagaagaaactgttaaagcaatggcgaatgtgtgtgtcggtgcagaatctcacccaagtgtgaaagtttctaagcacagattagatgcacgtttcacgtcggttgaagaaaccatcgccctatcgactatgtatgcggcaaaccacctagaaggtgttaaagcgattatcgctttaacagagtcaggtgcgacacctaaactgatgtcgcgtatcagttcatctttaccaatccttggcctatctcgccatgacacaacactggcgaagatggctctgtaccgtggtgtactaccgatttacttcgactcaacgatctatccagccgatgagcttgcacaaaaagcattggaatcattaaccaaagcgggttacttgcacagcggtgacttagtgttaatgaccaaaggtgatgcgatggaaaccatcggtggcacgaacacttgtaaagtgctgattgtcgcttaa

SEQ ID NO: 7573 - protein, 479 aa, Shewanella oneidensis
MFRRTKIVTTLGPATDRDDNLRRIIAAGANVVRLNFSHGSPEDHLKRATQAREIAKELGVHVAILGDLQGPKIRVSTFKDNKKIQLKLGQTYILDAELAKGEGDENQVGIDYKQLPDDVNVGDILMLDDGRVQLRVERVEGRKVHTTVTVAGPLSNNKGINKQGGGLSAAALTEKDKADILTAAMIQVDYLAVSFPRSGADLEYARSLAQQAGSNALIVAKVERAEAVASDEAMDDVILASDVVMVARGDLGVEIGDAALVAVQKKLIARSRQLNKIVITATQMMESMISSPMPTRAEVMDVANAVLDGTDAVMLSAETAAGDFPEETVKAMANVCVGAESHPSVKVSKHRLDARFTSVEETIALSTMYAANHLEGVKAIIALTESGATPKLMSRISSSLPILGLSRHDTTLAKMALYRGVLPIYFDSTIYPADELAQKALESLTKAGYLHSGDLVLMTKGDAMETIGGTNTCKVLIVA

SEQ ID NO: 7574 - DNA, 1761 bp, Oceanobacillus iheyensis
  CDS (1)..(1761)
atgagaaacacaaaaatcgtatgtacaattggtcctgcatcagaatcaattgaaaagttagagcaacttattgaagcaggaatgaacgtagctcgtctcaacttttctcatggagattatgcagagcatggcgcacggattgaaaatatccgaaaagcagctaaaaataaaaataaaacagtagcaattcttttagatactaaaggaccagagattcgtactggtagctttaaagaaggtagagcagatcttatgcagggcaaccctgtaacaatcgctatggatgaagtagaggggactgctgagaaattctctgttacataccaagggctaatcaatgatgtacatgaaggttcaaagattcttttggatgatggacttattgaattagaagtaaaatctattgataaaagtaaaggtgaaattgaaactattgcacttaactctggggaaataaagaataaaaaaggtgttaacgttcctaatgtttctgtaaatctacccggtataacagaaaaagacaccaatgatattatctttggaattgaacagggtgttgattttattgctgcatcttttgtgcgtcgagcttcggatattttagaaattaaagaagtgctagatcagcatcaggcacagtatataaaaatcatccctaaaattgagaaccaagaaggtgtcgataatatcgatagtattcttgaggtaagtgatggattaatggtagctcgtggtgatttaggagtggagatcccagctgaagatgtaccattggtacagaaaaaattaattaagcaatgtaataatgctggaaagccagtaattactgctacacaaatgttagattcgatgcagcgtaatccacgacctacacgtgcagaagcatcagacgttgctaatgcgatttttgatggcacagatgcaattatgctttctggagaaactgctgcgggaacctacccagtagaatctgtacaaacaatgagtaatattgcactaaaagctgaatctgcattagatcataaacaaatgttagaagaacgttcacaatatgtcgatatgactataacagaagcaattagtcaatccgttacgcacacagcatccaatttaaatgttgatacaattatcacaccgacagaaagcggacatacagctagaatgatttctaaataccgtccgaaagcttccattctagcagttacttttaacgaagtagtaaatcgtcaactatccttagtttggggagtgcatgctgttctgggtaaaccagcgacgtctactgacgaaatgctagaaattgcagttgataaaggattaaatacaggaatctgcagtagaggaagccgtgtcattattacggctggtgtacctgttggagagagtggaacaactaacctgttaaaagttcatgtgattggtgatgtgattgctaaaggacaaggaattggaagaagaagtgcatatggacatgccgtatttgctaaaacgaataaagaagctttagaaaaagtacaagacggtgatattttagtaacctatgcaacagaaaaagaaatgatgcctgcaattgaaaaagcatcagctattattacagaagaaggtggattaacttctcatgcagctgttgtcggattaagtcttggaattccagtaattgttggggttgacaatgtatttgaaattcttcaagatggacaagatattactgtagatggtaaccgtggagatatctacgctggccatgcaggtgtattgtaa

SEQ ID NO: 7575 - protein, 586 aa, Oceanobacillus iheyensis
MRNTKIVCTIGPASESIEKLEQLIEAGMNVARLNFSHGDYAEHGARIENIRKAAKNKNKTVAILLDTKGPEIRTGSFKEGRADLMQGNPVTIAMDEVEGTAEKFSVTYQGLINDVHEGSKILLDDGLIELEVKSIDKSKGEIETIALNSGEIKNKKGVNVPNVSVNLPGITEKDTNDIIFGIEQGVDFIAASFVRRASDILEIKEVLDQHQAQYIKIIPKIENQEGVDNIDSILEVSDGLMVARGDLGVEIPAEDVPLVQKKLIKQCNNAGKPVITATQMLDSMQRNPRPTRAEASDVANAIFDGTDAIMLSGETAAGTYPVESVQTMSNIALKAESALDHKQMLEERSQYVDMTITEAISQSVTHTASNLNVDTIITPTESGHTARMISKYRPKASILAVTFNEVVNRQLSLVWGVHAVLGKPATSTDEMLEIAVDKGLNTGICSRGSRVIITAGVPVGESGTTNLLKVHVIGDVIAKGQGIGRRSAYGHAVFAKTNKEALEKVQDGDILVTYATEKEMMPAIEKASAIITEEGGLTSHAAVVGLSLGIPVIVGVDNVFEILQDGQDITVDGNRGDIYAGHAGVL

SEQ ID NO: 7576 - DNA, 1497 bp, Mycoplasma penetrans
  CDS (1)..(1497): transl_table=4
atgaaaatgattaaaaaaactaaaattactgcaactttaggaccatcaattactggaaaaattttcacattagcagattttaacaaacctgaaaacaagggagttattgaaactgctaagaaaaatttagcagctttatttgatgcaggtgtgaatgtagtaagatttaacttttctcatggtgattatgaagaacaaacaattagattaaacctagttagagaagttgctaaagaaaaaggtgttaacatttctacaatgttagacacaaaaggaccagaaatccgtgtttacaaaacaagtgaaaaagaagttgaaattaaatcagatagtaaagtaagaatttatacaactaaaaaagaaattggtacaagtgaaaaattctctgttttagattctactggtacatacaacatggcaaaagatgttcaaccaggaaatacaatttttgtagatgatggaaaattgaaattagaagtaatttcatcaaatgttgaagaaggaattattgaaacaattgcacgtaacacttgaattcttagagaaaacaaaagaattaatttaccagactctaattattcaattccttttatgtctgataaagatagaaatgatattatttttgcaattaaaaataaatttgattacattgcagcatcatttgtaaatacaggtgataatgtaagagaaattaaaaaaatcttaaaagaacatggtggagaacacatccaaatcatttctaaaattgaaactatgactggaattaaatcattagatgacattatcgatgaatcagattcaataatggttgctagaggtgatctaggattagaagtaccttactatgatgtaccaacatatgaaaaatacattattaaagattgtagacataaaggtaaaactgtaattgttgcaactcaaatgttagattcattagaaactaaaatccaaccaacaagagcagaagttactgacgtgttttttgcagttgaaagaggaacagactgtactatgctttctggagaaactgcaaatgggatgtatccaattaatgcagtagaagtaatggctaaaattgatgtttcatctgaaaatttctttgactatggaagagcaattgatgtttatttcaaagaaactccatttatgaaagaaaaagttggaactttagctactactatagcaactcttgttgctccaaaaagagtaattgataaccatggttttgactactcttcaattgtggtatttggaaatgatacaagattaatccaagcattatctaatataagatgtgcagctccaattttctttgttactgataaaaaagaatatgctacaagatttgggcttaactatggggtatttgtaaaagttgttgataatgttgaacatgcaattgcaaataaaactgaaattatagatgcaattaatagccaacttcctgaagttaaaaaaacagttgttgttataaatgattcaatttataaacattaa

SEQ ID NO: 7577 - protein, 498 aa, Mycoplasma penetrans
MKMIKKTKITATLGPSITGKIFTLADFNKPENKGVIETAKKNLAALFDAGVNVVRFNFSHGDYEEQTIRLNLVREVAKEKGVNISTMLDTKGPEIRVYKTSEKEVEIKSDSKVRIYTTKKEIGTSEKFSVLDSTGTYNMAKDVQPGNTIFVDDGKLKLEVISSNVEEGIIETIARNTWILRENKRINLPDSNYSIPFMSDKDRNDIIFAIKNKFDYIAASFVNTGDNVREIKKILKEHGGEHIQIISKIETMTGIKSLDDIIDESDSIMVARGDLGLEVPYYDVPTYEKYIIKDCRHKGKTVIVATQMLDSLETKIQPTRAEVTDVFFAVERGTDCTMLSGETANGMYPINAVEVMAKIDVSSENFFDYGRAIDVYFKETPFMKEKVGTLATTIATLVAPKRVIDNHGFDYSSIVVFGNDTRLIQALSNIRCAAPIFFVTDKKEYATRFGLNYGVFVKVVDNVEHAIANKTEIIDAINSQLPEVKKTVVVINDSIYKH

SEQ ID NO: 7578 - DNA, 1584 bp, Escherichia coli O6
  CDS (1)..(1584)
atgacgatcgctaaaaacgactgtcactgtcctaatcttatacgacatccgaatgagattaatttatcgccatcgcggcgttatttcattcggatttcatgttcaagcaacacctggttgtttcagtcaacggagtattacatgtccagaaggcttcgcagaactaaaatcgttaccacgttaggcccggcaacagatcgcgataataaccttgaaaaagttatcgcggcgggtgccaacgttgtacgtatgaatttttctcacggctcgcctgaagatcacaaaatgcgcgcggataaagttcgtgagattgccgcaaaactggggcgtcatgtggctattctgggtgacctccaggggcccaaaatccgtgtatccacctttaaagaaggcaaagttttcctcaatattggggataaattcctgctcgacgccaacctgggtaaaggtgaaggcgacaaagaaaaagtcggtatcgactacaaaggcctgcctgctgacgttgtgcctggtgacatcctgctgctggacgatggtcgcgtccagttaaaagtactggaagtccagggcatgaaagtgttcaccgaagtgaccgtcggtggtcccctctccaacaataaaggtatcaacaaacttggcggcggtttgtcagctgaagcgctgaccgaaaaagacaaagcagacattaagactgcggcgttgattggcgtagattacctggctgtctccttcccacgctgcggcgaagatctgaactatgcccgtcgtctggcacgcgatgcaggatgtgatgcgaaaattgttgccaaggttgaacgtgcggaagccgtttgcagccaggaggcaatggatgacatcatcctcgcctctgacgtggtaatggttgctcgcggcgacctcggtgtggaaattggcgatccggaactggtcggcattcagaaagcgttgatccgtcgtgcgcgtcagcttaaccgcgcggtaatcacggcgacccagatgatggagtcaatgattactaacccgatgccgacgcgtgcagaagtcatggacgtagcaaacgccgttctggatggtactgacgctgtgatgctgtcggcagaaactgctgctggtcaatacccgtcagaaactgttgcagccatggcgcgcgtttgcctgggggcggaaaaaatcccgagcatcaacgtttctaaacaccgtctggacgttcagttcgacaatgtggaagaagctattgccatgtcagcaatgtacgcggctaaccacctgaaaggcgttacggcgatcatcaccatgaccgaatcgggtcgtaccgcgctgatgacctcccgtatcagctctggtctgccaattttcgccatgtcacgccatgaacgtacgctgaacctgactgctctctatcgcggcgttacgccggtgcactttgatagcgctaatgacggtgtagcagctgccagcgaagcggttaatctgctgcgtgataaaggttacttgatgtctggtgacctggtgattgtcacccagggcgacgtgatgagtaccgtgggttctactaataccacgcgtattttaacggtagagtaa

SEQ ID NO: 7579 - protein, 527 aa, Escherichia coli O6
MTIAKNDCHCPNLIRHPNEINLSPSRRYFIRISCSSNTWLFQSTEYYMSRRLRRTKIVTTLGPATDRDNNLEKVIAAGANVVRMNFSHGSPEDHKMRADKVREIAAKLGRHVAILGDLQGPKIRVSTFKEGKVFLNIGDKFLLDANLGKGEGDKEKVGIDYKGLPADVVPGDILLLDDGRVQLKVLEVQGMKVFTEVTVGGPLSNNKGINKLGGGLSAEALTEKDKADIKTAALIGVDYLAVSFPRCGEDLNYARRLARDAGCDAKIVAKVERAEAVCSQEAMDDIILASDVVMVARGDLGVEIGDPELVGIQKALIRRARQLNRAVITATQMMESMITNPMPTRAEVMDVANAVLDGTDAVMLSAETAAGQYPSETVAAMARVCLGAEKIPSINVSKHRLDVQFDNVEEAIAMSAMYAANHLKGVTAIITMTESGRTALMTSRISSGLPIFAMSRHERTLNLTALYRGVTPVHFDSANDGVAAASEAVNLLRDKGYLMSGDLVIVTQGDVMSTVGSTNTTRILTVE

SEQ ID NO: 7580 - DNA, 1437 bp, Brucella suis
  CDS (1)..(1437)
atgaagcgcaaccgcaaggtcaagattctcgccacgctaggtccagcctctggcgaggaagccgtcatccgcaagctctttgaagcaggagcggatgtcttccgcatcaatatgagtcacgccgaccatgacctgatgcgaaccttggtcaagcgcattcgcaatgtagaaaaggaactgggacgccccatcggcattctggccgatcttcaggggccgaagctgcgcgttggcaagttcaaggatggcaaggtcgatctcgttcccggccagaccttcaccctcgacaataacgaggcgctgggcgatgaaacccgcgttttcctgccgcatcctgaaattctggaagctgtcgagccgggccatcgcctgttgatcgatgacggaaaactgcatctggtggctgaagcctgcgacggcaagtcgatccgctgcaaggttgtttccggcacccgcatttccgaccgcaagggggtcagccttcccgacacgacgctcggcgttggcgcgctgacggagaaagaccgctgcgatcttgatgccgtgctgaaggaagagatcgattgggtggcgctttcctttatccagcgcccggaagatctggccgaagtgcgcaaggtttcgcgcggcaaggtcggcctcatgtccaagatcgaaaagccgcaggctgttacccgtcttgatgaaattatcgagctttccgacgccttgatggttgcccgcggcgatctcggtgttgaagtgccgcttgaaaacgttcccggcattcaaaagcagattacccgcaaggcgcgtcgcgccggcaagccggtcgttgtcgcaacccagatgctggaatcgatgattaccgcgccggtgcccacccgcgctgaagtgtccgacgtggcgactgcggtgtttgaaggtgcggatgcaatcatgctttcggcggaatctgcttccggccaatatccggtcgaagctgttgcaaccatgaaccgcatcgccgagcaggtggagcgcgagccgacctattcgaccatcattgacgcacagcgcgccatgccggagccgactggcgccgacgctatctcgctcgccgcgcgtcagattgctgaaacgttgaaactctcggccatcgtgacctatacggcttccggcacgaccggcctgcgcgctgcccgcgagcgtccgcgcacacccattatcgcgctgtcgcccgttgttgataccgcccgtaaactgtccctcgtatggggcctgcattgcgtcgtcacagatgatgcccatgatcttgaagacatggtcaatcatgcctgcgaaatcgtgttccatgaggaattcggcaaagctggcgatcgcgtcatcatcacggcaggcgttcccttcggaacgccgggtgcaaccaatatgctgcgtatcgcctatataggcgctgacggaaaatccggcatttag

SEQ ID NO: 7581 - protein, 478 aa, Brucella suis
MKRNRKVKILATLGPASGEEAVIRKLFEAGADVFRINMSHADHDLMRTLVKRIRNVEKELGRPIGILADLQGPKLRVGKFKDGKVDLVPGQTFTLDNNEALGDETRVFLPHPEILEAVEPGHRLLIDDGKLHLVAEACDGKSIRCKVVSGTRISDRKGVSLPDTTLGVGALTEKDRCDLDAVLKEEIDWVALSFIQRPEDLAEVRKVSRGKVGLMSKIEKPQAVTRLDEIIELSDALMVARGDLGVEVPLENVPGIQKQITRKARRAGKPVVVATQMLESMITAPVPTRAEVSDVATAVFEGADAIMLSAESASGQYPVEAVATMNRIAEQVEREPTYSTIIDAQRAMPEPTGADAISLAARQIAETLKLSAIVTYTASGTTGLRAARERPRTPIIALSPVVDTARKLSLVWGLHCVVTDDAHDLEDMVNHACEIVFHEEFGKAGDRVIITAGVPFGTPGATNMLRIAYIGADGKSGI

SEQ ID NO: 7582 - DNA, 1530 bp, Bifidobacterium longum
  CDS (1)..(1530)
atgagtcggctcgcgctagtagactgggtttcggcaaatggggcaatcgcgcctcgaaccaaattgaacaagaataggcaggcattcatgcgtaaagccaagatcgtagacaccatcggtccttccaccgaggattacgacaacctcctgaagctcgttgaagctggtatggacgttgctcgtctgaaccgctcccacggcacccccgaggatcacctcaaggtctacaacaacgtgcgcaaggccagcgaagccactggtcgcaacgttgccgcgctcgttgatttgcagggcccgaagattcgctgcggttggttcaagaagaacgccgatggcgaagacaaggttcagctgcagctcggccaggaattcgtcatcaccactgatgacgtcgagggcgacgagcacatcacctccaccaccttcaagggcctgccgggcgattgccacccgggcgacccgatcctgatcgatgacggcaaggtccgtcttgaggtcaccaaggtcgagggcaacaacgtgtacaccaaggtcgtcgtggccggtcctgtgtcctcccacaagggcatcaacctgccgggcgtcgccgtctccctgccggctctgaccgagaaggatgaggccgacctgcgttgggccatccgcaccggtgccgacatcatcgccatgtccttcgtgcgtttcgccaccgacatcgaccgcgcccacgagatcatggacgaggaaggccgtcgcatcccgatcatcgccaagatcgagaagccgcaggctctggagaacctcgaagagatcgtcaagaccttcgacggcgtcatggccgcccgtggcgacatggccgttgagtgcccgctggaagaggtcccgctggccactaagcgcatcatcgagctggctcgccagtacgccaagccggtcatcgtggctaccgaagtcctcggctccatggtgaactccccggttccgactcgtgcagaggcttccgactgcgccaacgccatcctcgacggctccgacgccaccatgacctccaacgagaccgccgttggtaagtacccggatgtgaccgtggccaccatggcccgtatctccggctacgccaccgaccacggcttcgaccgtatcccggagctcaagaaccttgacatgtcctccaccggcgctgtctcctccgccgctgtggacctggccgacaagctcaacgccaaggccatcgttgcttacacccagaccggtgccaccgtgcaccgcgtctcccgtgagcgtccggccgccccgatctacggcctgaccagcaacgagcacacctaccactggctggctctgtcctggggcaccgaagccttcctgctcaaggaggactaccacgacaagtcccgcaaggatctcatggtctacacggacaaggtcctcaaggatgctggcaaggttgctgacggcgacaagatcgtcatcctgagctctgctcagggcgatcaccagccgggccgcactgactccatctacgtgcacaccgttggcgcttgcgactga

SEQ ID NO: 7583 - protein, 509 aa, Bifidobacterium longum
MSRLALVDWVSANGAIAPRTKLNKNRQAFMRKAKIVDTIGPSTEDYDNLLKLVEAGMDVARLNRSHGTPEDHLKVYNNVRKASEATGRNVAALVDLQGPKIRCGWFKKNADGEDKVQLQLGQEFVITTDDVEGDEHITSTTFKGLPGDCHPGDPILIDDGKVRLEVTKVEGNNVYTKVVVAGPVSSHKGINLPGVAVSLPALTEKDEADLRWAIRTGADIIAMSFVRFATDIDRAHEIMDEEGRRIPIIAKIEKPQALENLEEIVKTFDGVMAARGDMAVECPLEEVPLATKRIIELARQYAKPVIVATEVLGSMVNSPVPTRAEASDCANAILDGSDATMTSNETAVGKYPDVTVATMARISGYATDHGFDRIPELKNLDMSSTGAVSSAAVDLADKLNAKAIVAYTQTGATVHRVSRERPAAPIYGLTSNEHTYHWLALSWGTEAFLLKEDYHDKSRKDLMVYTDKVLKDAGKVADGDKIVILSSAQGDHQPGRTDSIYVHTVGACD

SEQ ID NO: 7584 - DNA, 1890 bp, Lactobacillus delbrueckii
  CDS (1)..(1770)
atgaaaaaaacaaagattgttagtactttaggaccagcttcaaacgatattgaaactattaccaagttagccgaagcaggcgcaaacgtattccgtttcaacttctcacacggcgaccacgaagaacacttggcaagaatgaacatggttcgtgaagttgaaaagaagactggcaagcttttgggcatcgctttggacaccaagggtgctgaaatcagaaccactgaccaagaaggcggcaagttcactatcaacactggtgacgaaatccgcgtgtcaatggacgcaactaaggccggcaacaaggacatgatccacgttacctacccaggtctgttcgacgacactcacgtaggcggcactgtattgatcgacgacggtgctgttggtttgactatcaaggccaaggacgaagaaaagcgcgaattgatttgtgaagctcaaaacactggtgtcatcggctcaaagaagggtgttaacgctccaggtgttgaaatccgcctcccagggattactgaaaaggacactgacgacatccgctttggtttgaagcacggtattaacttcatctttgcttcttttgtacgtaaggctcaagacgttcttgacattcgcgcactttgcgaagaagctaacgcaccatacgttaagatcttcccaaagattgaatcacaagaaggtattgacaacatcgacgaaatcttgcaagtttcagatggtttgatggttgcccgtggtgacatgggtgttgaaatcccattcatcaacgtgccatttgttcaaaagactttgatcaagaagtgcaacgctttgggcaagccagttatcactgctactcaaatgctggactcaatgcaagaaaacccacgtccaacccgtgccgaagtaactgacgttgctaacgccgttcttgacggtactgacgcaactatgctgtcaggcgaatcagcaaacggtttgtacccagtagaatcagttcaagctatgcacgacatcaatgttcggactgaaaaggaaatggacacccggaacactctggctctgcaacgctttgaagaatacaagggctcaaacgttactgaagctatcggcgaatcagttgtccgcactgctcaagaactgggcgttaagactatcatcactgctactagctccggctacacagctcgtatgatctccaagtaccgtccagacgcaaccatcgttgccttgactttcgacgaaaagatccaacactcattgggtatcgtttggggcgttgaaccagttttggcaaagcaaccttcaaacactgacgaaatgttcgaagaagctgcccgcgtagctaaggaacacggtttcgttaaggatggcgacctggtaatcatcgttgccggcgtaccattcggccaatcaggtactactaacttgatgaagctgcaaatcatcggcaaccaacttgctcaaggtttgggcgtaggcactggctcagttatcggcaaggctgttgttgcgaacagcgctgaagaagccaacaataaggttcacgaaggcgacatcctggtagctaagactactgacaaggactacatgccagctatcaagaaggccagcggtatgatcgttgaagcttccggcttgaccagccacgcagctgttgtcggcgtatcactcggcattccagttgttgtcggtgctgctgacgcaacttcaaagatcgctgacggctcaactttgactgttgacgcacgtcgcggcgcaatttaccaaggtgaagtttcaaacctgtaatctaggattgcaagtctgacaaccacagaagaaagagttcaatcaatcgattgagctctttttctttgccaattttttctctgctttctttaatgattgccttgaatatagctaaggcaa

SEQ ID NO: 7585 - protein, 589 aa, Lactobacillus delbrueckii
MKKTKIVSTLGPASNDIETITKLAEAGANVFRFNFSHGDHEEHLARMNMVREVEKKTGKLLGIALDTKGAEIRTTDQEGGKFTINTGDEIRVSMDATKAGNKDMIHVTYPGLFDDTHVGGTVLIDDGAVGLTIKAKDEEKRELICEAQNTGVIGSKKGVNAPGVEIRLPGITEKDTDDIRFGLKHGINFIFASFVRKAQDVLDIRALCEEANAPYVKIFPKIESQEGIDNIDEILQVSDGLMVARGDMGVEIPFINVPFVQKTLIKKCNALGKPVITATQMLDSMQENPRPTRAEVTDVANAVLDGTDATMLSGESANGLYPVESVQAMHDINVRTEKEMDTRNTLALQRFEEYKGSNVTEAIGESVVRTAQELGVKTIITATSSGYTARMISKYRPDATIVALTFDEKIQHSLGIVWGVEPVLAKQPSNTDEMFEEAARVAKEHGFVKDGDLVIIVAGVPFGQSGTTNLMKLQIIGNQLAQGLGVGTGSVIGKAVVANSAEEANNKVHEGDILVAKTTDKDYMPAIKKASGMIVEASGLTSHAAVVGVSLGIPVVVGAADATSKIADGSTLTVDARRGAIYQGEVSNL

SEQ ID NO: 7586 - DNA, 2043 bp, Stigmatella aurantiaca
  CDS (463)..(1896)
ctgcagcgcctcttcgacacggtgaaccggctgtacttccaggatggcatccaggcccggatcggctggggccgcatgccgccccggcgccgccggaagtccattcgtttgggtgtctatgatcatcagacgcgggagatccgcatccacccggcgctggaccggccggaggtgcccgcgttctttgtggagttcatcgtcttccacgaaatgctccaccagttgtttcccagcacgggccggggcgggcgccgggtgcaccacccgcgcgcgttccgggagcgggagaaggccttcccccactacggcctggcgctgcggtgggagcgggagaatctgggcgtgctgctccggggctgaagccctgggccgcctggaggcccttttaccgttttaccgggcggtggacgtgcgcagcatgcttgaccgagcgcggtgcgcgcccccatcctccgtgcccttatgcgacgagcaaagattgtctgcacccttggtcccgccagccagagccaggacatgttagaggccctcatcgaggccggcatggacgtggcccggttgaacttctcccacggcagtcacgagcagcacgcggagaacatcgccaaactccgcgcggcttcgctgaagcttcgcaaggcggtgggcatcctcggagacctgcaaggaccgaagatccgcacgggccgcttcatcaccggcagcacggtgctgaaggaaggcgccatcttttccatcaccaccgacgagagcgtgaagggcaacgacgacatcgtgtccaccacgtacgcgcacctggcggcggacgtgaatcccggggaccgcatcctcttggatgacggcctgctggagctcaaggtcctcgagacggacaagaagcagctcctgcgcacgcaggtcgtcatcggcggcacgctgaagaacaacaagggcatcaacctgccgggcgtggcggtgcgcgccgacgcgctgacgccgaaggaccgcgaggacctcgtcttcggcatcaaggaaggcgtggacttcctggcgctgtccttcgttcgccagccggcggacatcgagctggcgcgccaggccatggcggaggcgggccggcaggtgcccatcgtcgccaagctggagaagccggaggccatcgcgcggctggacgccatcctggacaagacggacggggtgatggtggcgcgcggcgacctgggcgtggagattccccccgaggaggtgccggccgtccagaaggacatcatccggcgctccaaccagcgcggcctgccggtcatcgtggccacgcagatgctcaactcgatgatcgagaacccccgccccacgcgcgcggaggccagcgacgtggccaacgccgtgttcgacggggcggacgcggtcatgctctcgggcgagacggccagcggccgctaccccatcgagtcggtgcagatgatggaccgcatcgtcctggcggccgagtcggcgggtcgggcgcagtcgtcgctgggccggatcccggatgggcccatcggcgtgccctcgcacttcccggacgtgattgcccgggtggcgtgccaggcggcgcaggcgagcggcgcttcgctcatcgcggcgttcacgctgtcgggcgtgacggcgcggctgctggcgcactaccggccggcggtccccatcgtggcgttcagcccgaaccaggaagtgcgccgccgcctggcgctgctctggggcgtggtgccgcgggtgctggagcccatccaggagaccgaggcgatggtgaagcgcgtggaggaggaactgctggcgcgcggactggcgcgcaagggcgagcgcatcgtcatcgtctttggcgcgcccgtgggacagccagggaagatcaacagcctgcgcctgcacaccatccagggctgaggcgagggggcccgagggccccgggccgcgcgagggaggctacttcgcgcggttcatcaccttgcggacgatctccgcctcgttgaacaccgtgaggaggtcccggtcgagctggccggaggaggcctcccgggagaggatgtcgac

SEQ ID NO: 7587 - protein, 477 aa, Stigmatella aurantiaca
MRRAKIVCTLGPASQSQDMLEALIEAGMDVARLNFSHGSHEQHAENIAKLRAASLKLRKAVGILGDLQGPKIRTGRFITGSTVLKEGAIFSITTDESVKGNDDIVSTTYAHLAADVNPGDRILLDDGLLELKVLETDKKQLLRTQVVIGGTLKNNKGINLPGVAVRADALTPKDREDLVFGIKEGVDFLALSFVRQPADIELARQAMAEAGRQVPIVAKLEKPEAIARLDAILDKTDGVMVARGDLGVEIPPEEVPAVQKDIIRRSNQRGLPVIVATQMLNSMIENPRPTRAEASDVANAVFDGADAVMLSGETASGRYPIESVQMMDRIVLAAESAGRAQSSLGRIPDGPIGVPSHFPDVIARVACQAAQASGASLIAAFTLSGVTARLLAHYRPAVPIVAFSPNQEVRRRLALLWGVVPRVLEPIQETEAMVKRVEEELLARGLARKGERIVIVFGAPVGQPGKINSLRLHTIQG

SEQ ID NO: 7588 - DNA, 1584 bp, Arabidopsis thaliana
  CDS (1)..(1584)
atgcattcaagtcatctccttctcgaggaaccgatcaggatgacttcaatcctcgaaccttctaaatcaagtttcttcccggctttgactaagattgttgggactctaggtccgaaatctcgatccgtcgaggtgattgctggttgtctcaaagctggaatgtccgtggctcgattcgatttctcttggtgcgatgctgattatcaccaggagacgctggagaatctgaagatagctgtgaagagcactaagaagctttgtgctgttatgctagacactgtaggacctgagttgcaagttattaacaagactgagaaagctatttctcttaaagctgatggccttgtaactttgactccgagtcaagatcaagaagcctcctctgaagtccttcccattaattttgatgggttagcgaaggcggttaagaaaggagacactatctttgttggacaatacctcttcactggtagtgaaacaacttcagtttggcttgaggttgaagaagttaaaggagatgatgtcatttgtatttcaaggaatgctgctactctgggtggtccgttattcacattgcacgtctctcaagttcacattgatatgccaaccctaactgagaaggataaggaggttataagtacatggggagttcagaataagatcgactttctctcattatcttattgtcgacatgcagaagatgttcgccaggcccgtgagttgcttaacagttgtggtgacctctctcaaacacaaatatttgcgaagattgagaatgaagagggactaacccactttgacgaaattctacaagaagcagatggcattattctttctcgtgggaatttgggtatcgatctacctccggaaaaggtgtttttgttccaaaaggctgctctttacaagtgtaacatggctggaaagcctgccgttcttactcgtgttgtagacagtatgacagacaatctgcggccaactcgtgcaggggcaactgatgttgctaatgctgttttagatggaagtgatgcaattcttcttggtgctgagactcttcgtggattgtaccctgttgaaaccatatcaactgttggtagaatctgttgtgaggcagagaaagttttcaaccaagatttgttctttaagaagactgtcaagtatgttggagaaccaatgactcacttggaatctattgcttcttctgctgtacgggcagcaatcaaggttaaggcatccgtaattatatgcttcacctcgtctggcagagcagcaaggttgattgccaaataccgtccaactatgcccgttctctctgttgtcattccccgacttacgacaaatcagctgaagtggagctttagcggagcctttgaggcaaggcagtcacttattgtcagaggtcttttccccatgcttgctgatcctcgtcaccctgcggaatcaacaagtgcaacaaatgagtcggttcttaaagtggctctagaccatgggaagcaagccggagtgatcaagtcacatgacagagttgtggtctgtcagaaagtgggagatgcgtccgtggtcaaaatcatcgagctagaggattag

SEQ ID NO: 7589 - protein, 527 aa, Arabidopsis thaliana
MHSSHLLLEEPIRMTSILEPSKSSFFPALTKIVGTLGPKSRSVEVIAGCLKAGMSVARFDFSWCDADYHQETLENLKIAVKSTKKLCAVMLDTVGPELQVINKTEKAISLKADGLVTLTPSQDQEASSEVLPINFDGLAKAVKKGDTIFVGQYLFTGSETTSVWLEVEEVKGDDVICISRNAATLGGPLFTLHVSQVHIDMPTLTEKDKEVISTWGVQNKIDFLSLSYCRHAEDVRQARELLNSCGDLSQTQIFAKIENEEGLTHFDEILQEADGIILSRGNLGIDLPPEKVFLFQKAALYKCNMAGKPAVLTRVVDSMTDNLRPTRAGATDVANAVLDGSDAILLGAETLRGLYPVETISTVGRICCEAEKVFNQDLFFKKTVKYVGEPMTHLESIASSAVRAAIKVKASVIICFTSSGRAARLIAKYRPTMPVLSVVIPRLTTNQLKWSFSGAFEARQSLIVRGLFPMLADPRHPAESTSATNESVLKVALDHGKQAGVIKSHDRVVVCQKVGDASVVKIIELED

SEQ ID NO: 7590 - DNA, 1437 bp, Bartonella henselae
  CDS (1)..(1437)
atgaagcgtgcacgtaaagtaaaaattatagccactcttggcccttcttcgttttctatttccatgattgagaagctttttatggcgggagcagatgtttttcgtttgaatatgagccatactgaccgtgaaacaatggttgatttggttcagcgcatacggaaggttgaaaaaactgttcgccggccaatcggtattttagtagatctccagggaccaaaattacgcgtcggctgttttgataaagggcaagaagatttgcgtattgggcaaagttttaccttggatgatcgtgatattcttggtgatgcgcagcgtgttttttttccgcacggggaggtgctggcagctattaaacccggtgatcggttgttaattgatgatggaaagttggaactgcttgcacaggtgtgtgatggtcattctgtgcagtgccttgtggttgctgggaaccgtatttctgatcgaaaaggggtaagtcttcccgatacagttttgccttttgggccaatgactctcaaggataaagccgatcttcaggcagttttggagcagcctgttgattgggttgctctgtcttttatccagcgtccggaagatattatagcagtgcgtgcgttgaccaaaagcaaagtgtctttgatggctaagatcgaaaaacctcaagctttggagcatatagaagagattattgatgttgccgatggtattatgattgcacgcggagatctgggggtagaaatgcccttggagagggttcctgccattcagatggaacttataaaagcttgtcgtttagctggaaagcccgtcgtggtggccacgcaaatgctcgagtcaatgattacgtcatctgttcctacaagggcagaagtttctgatgttgcgacagcagtttatacgggaactgacgctgtcatgttgtctgcggaatctgcctctggtcgttatcctgaagaagctgtgctgatgatggatcgaatcgcacaacaaattgaacaagatcagacttatgcggctcaagttggcgcacagcatcctgctccagaatcaacggggaccgatgcgatttctctcgctgcgcgtcagatcgccgaaacactgcaattgacagctatcgttgcttatactgcttcaggcacaacgggtgtgcgcacatcacgggagcgtccaaacaggcccattattgccttatcgcctattgtaaaaacagcaagacgtttggctttggtctggggacttcattgtgtggtcactgaagacgcgcgggatttggaggatatggttgatcgtgcggctgcgattgcttttcaagaaggcttttgccaagggggagatcgcttccttgtgacagctggtgttcctcttggtacacctggtgctaccaatctcttgcgtatcgcttctgtttctcaagatggaacaaagggtgtttaa

SEQ ID NO: 7591 - protein, 478 aa, Bartonella henselae
MKRARKVKIIATLGPSSFSISMIEKLFMAGADVFRLNMSHTDRETMVDLVQRIRKVEKTVRRPIGILVDLQGPKLRVGCFDKGQEDLRIGQSFTLDDRDILGDAQRVFFPHGEVLAAIKPGDRLLIDDGKLELLAQVCDGHSVQCLVVAGNRISDRKGVSLPDTVLPFGPMTLKDKADLQAVLEQPVDWVALSFIQRPEDIIAVRALTKSKVSLMAKIEKPQALEHIEEIIDVADGIMIARGDLGVEMPLERVPAIQMELIKACRLAGKPVVVATQMLESMITSSVPTRAEVSDVATAVYTGTDAVMLSAESASGRYPEEAVLMMDRIAQQIEQDQTYAAQVGAQHPAPESTGTDAISLAARQIAETLQLTAIVAYTASGTTGVRTSRERPNRPIIALSPIVKTARRLALVWGLHCVVTEDARDLEDMVDRAAAIAFQEGFCQGGDRFLVTAGVPLGTPGATNLLRIASVSQDGTKGV

SEQ ID NO: 7592 - DNA, 1533 bp, Glycine max
  CDS (1)..(1533)
atggcgaacatagacatcgaagggatcttgaagcagcagcctgatgatgggcgcgttccgaagacgaaaatagtgtgtactttgggccccgcttctcgatccgtggaaatgactgagaagcttcttagggctgggatgaacgttgctcgtttcaatttctctcatggcacccacgactatcatcaggaaaccctcaacaatctcaagactgctatgcacaacactggtatactctgtgccgtcatgcttgacactaagggacctgagattcggactggttttctgaaagatggaaaacctattcaacttaaggaaggacaagaaatcaccataactactgattatgacattaagggggatcaggagatgatatccatgagttacaagaagctgcctgtccacttgaagcctggaaacaccatattgtgctctgatgggacgattactctcactgtcttatcttgtgatcctgatgctggtactgttagatgtcgttgtgaaaacactgctacgttgggtgagagaaaaaatgttaaccttcctggtgttgttgttgatctccccacacttactgagaaggataaggaagatattcttcaatggggtgtacccaacaagattgacatgattgctctttcatttgttcgcaaaggctcagatcttgttaatgtccgcaaggttctcgagccacatgcaaagactattcagttgatgtctaaggttgagaatcaggaaggagtcctgaattttgacgaaatcctgcgcgagactgatgcattcatggtggcacgaggtgatcttggaatggagatcccagttgaaaagatattcctggcgcagaagatgatgatatacaagtgtaatctggttgggaagccagtggtgactgctacccaaatgcttgaatcaatgataaagtctcccaggccaacccgagctgaagcaactgacgtagccaatgcagttcttgatggaacagattgtgtgatgcttagtggtgaaagtgctgctggggcatacccagaacttgctgtgaaaatcatggctcgtatctgcattgaagcagaatcatcccttgactatggtgccatcttcaaagagatgataaggtctacaccattgccaatgagtccattggagagccttgcatcatctgctgtccgcacagcaaacaaggccaaagcaaaactcattgttgtactgacacgtggcgggtctacagctaagttggttgctaagtataggccagcggttccaatattatcggtggtggttccagtgttgagcacagactcatttgattggacatgcagtgatgagacgccagcaaggcacagcttgatatataggggcttgattccaatattgggggagggatccgccaaggctactgatgcagaatctacagaggtcattctcgaagctgctcttaagtccgcaacacaaaggggcctttgtaagcctggtgatgcagttgttgccctgcatcgtattggcactgcctctgtcataaagatctgcatagtcaaataa

SEQ ID NO: 7593 - protein, 510 aa, Glycine max
MANIDIEGILKQQPDDGRVPKTKIVCTLGPASRSVEMTEKLLRAGMNVARFNFSHGTHDYHQETLNNLKTAMHNTGILCAVMLDTKGPEIRTGFLKDGKPIQLKEGQEITITTDYDIKGDQEMISMSYKKLPVHLKPGNTILCSDGTITLTVLSCDPDAGTVRCRCENTATLGERKNVNLPGVVVDLPTLTEKDKEDILQWGVPNKIDMIALSFVRKGSDLVNVRKVLEPHAKTIQLMSKVENQEGVLNFDEILRETDAFMVARGDLGMEIPVEKIFLAQKMMIYKCNLVGKPVVTATQMLESMIKSPRPTRAEATDVANAVLDGTDCVMLSGESAAGAYPELAVKIMARICIEAESSLDYGAIFKEMIRSTPLPMSPLESLASSAVRTANKAKAKLIVVLTRGGSTAKLVAKYRPAVPILSVVVPVLSTDSFDWTCSDETPARHSLIYRGLIPILGEGSAKATDAESTEVILEAALKSATQRGLCKPGDAVVALHRIGTASVIKICIVK

SEQ ID NO: 7594 - DNA, 1536 bp, Glycine max
  CDS (1)..(1536)
atggcgaacatagacatcgaagggatcttgaagcagcagcagccttatgatgggcgcgttccgaagacgaagatagtgtgtactttgggccctgcttctcgatccgtagaaatgaccgagaagcttctgagggcagggatgaacgttgctcgtttcaatttctctcatggcacccacgactatcaccaggaaaccctcaacaatctcaagactgccatgcacaacactggcatactctgtgccgtcatgcttgacactaagggacctgagattcggactggttttctgaaagatggaaaacctattcaacttaaagaaggccaagaagtcaccataactactgattatgacattaagggggatccggagatgatatccatgagttacaagaagctgcctgtccacttgaagcctggaaataccatactgtgctctgacgggacgattactctcactgtcttgtcttgtgaccctgatgctggtactgttagatgtcgttgtgaaaacactgcaacgttgggtgagagaaaaaatgttaaccttcctggtgttgtggtggatctacccacacttactgagaaggataaggaagacattcttggatggggtgtacccaacaagattgacatgattgctctttcatttgttcgtaaaggctcggatcttgttaatgtccgcaaggttctggggccacatgcaaagaatattcagttgatgtcaaaggttgagaatcaggagggagtcctgaattttgacgaaatcctgcgggagactgatgcattcatggtggcacgtggtgatcttggaatggagatcccagtagaaaagattttcctggcacagaagatgatgatatacaagtgtaatcttgttgggaagccagtggtgactgctacccaaatgcttgaatcaatgataaagtctcccaggccaacccgagctgaagcaactgatgtagctaatgcagttcttgatggaacagattgtgtgatgcttagtggtgaaagtgctgctggggcatacccagaacttgctgtgaaaatcatggctcgcatttgcattgaagcagaatcatcccttgactatggtgccatcttcaaagagatgataaggtctaccccattgcctatgagtccattggagagccttgcatcatctgctgtccgcacagcaaacaaggccaaagcaaaactcattgttgtactgacacgtggcgggtctacagctaagttggttgctaagtataggccagcggttccaatattatcggtggtggttccagtgttgagcacagactcatttgattggacatgcagtgatgagacgccagcaaggcacagcttgatatataggggcttgattccaatattgggggagggatccgccaaggctactgatgcagaatctacagaggtcattctcgaagctgctcttaagtccgcaacacaaaggggcctttgtaagcctggtgatgcagttgttgccctgcatcgtattggcactgcctctgtcataaagatctgcatagtcaaataa

SEQ ID NO: 7595 - protein, 511 aa, Glycine max
MANIDIEGILKQQQPYDGRVPKTKIVCTLGPASRSVEMTEKLLRAGMNVARFNFSHGTHDYHQETLNNLKTAMHNTGILCAVMLDTKGPEIRTGFLKDGKPIQLKEGQEVTITTDYDIKGDPEMISMSYKKLPVHLKPGNTILCSDGTITLTVLSCDPDAGTVRCRCENTATLGERKNVNLPGVVVDLPTLTEKDKEDILGWGVPNKIDMIALSFVRKGSDLVNVRKVLGPHAKNIQLMSKVENQEGVLNFDEILRETDAFMVARGDLGMEIPVEKIFLAQKMMIYKCNLVGKPVVTATQMLESMIKSPRPTRAEATDVANAVLDGTDCVMLSGESAAGAYPELAVKIMARICIEAESSLDYGAIFKEMIRSTPLPMSPLESLASSAVRTANKAKAKLIVVLTRGGSTAKLVAKYRPAVPILSVVVPVLSTDSFDWTCSDETPARHSLIYRGLIPILGEGSAKATDAESTEVILEAALKSATQRGLCKPGDAVVALHRIGTASVIKICIVK

SEQ ID NO: 7596 - DNA, 1527 bp, Xanthomonas campestris
  CDS (1)..(1527)
atgccatcctcggtacgtgacgcgtgtgttaagtttcgcggcttttacagggaggccatcatgaaagaacgtcaacgccgcaccaagatcctcgccacgctgggaccggccacggatccgcctggtgtgctggacgccttgttcaaggcgggcgtcaacgtggtgcgcctcaacttcagccacggcgacccgtccggccaggccaagcgcgctgccgaagtgcgtgccgccgccgtccgcgtcggcgccgaagtgggcatcctggccgacctgccgggcccgaagatccgcatcgagcgctttgccggaggcaagatcaagctgaccatgggcgatcgtttcgacctggtggccgatatcaatgcgccggccggcgatcagcatcaggtgggcgtgagctacctgggcctgccgcaggatgtcaccgccggtgacgtgctgctgctcgacgatggcctggtgcagctgcaggtcaccgacgtgcagggcgcgcgcatcgtcaccaccgtgctcaacgatggtgtgttgtccgaccgcaagggcctcaacaagcagggcggcggtctgtcgctgggcgcgttgaccgagcgcgacaaggagctgatcggcatcgtggccaagatcggcgtggacttcatcgcggtgtcgttctgccgtaacgcgcaggacatgcacgacgcccgccagatcgcccagcagcacggctgcgatgcgcagttggtgtccaagatcgagcgcaccgaagcgatcgagaacctggtcgaaatcgtcgaagcctccgacgtggtgatggtggcgcgtggcgatctgggcgtggaaatcggcgatgccgaattgccgggcctgcagaagaagatcattcgcgagtcgctggcgcagaacaaggtggtgatcacggccacccagatgctgcagtcgatggtggaaagcccgatcccgacccgcgccgaagtactcgacgtggccaacgcggtcatcgacggcaccgatgcggtgatgctctcggccgaaaccgctgccggtgcgtatccggtgcgtgcagtggaagcgatggcgcgcatctgcctgggcgccgagcaccagttcgagttcgataccgacttcgaagcggcgcaacgcaacctgcagcgcgccgaccaggcgatcgcaatggcgaccatgttcctgtccgagcacatcggtctgggcggcgtggtggcgttgaccgaatccggcggcacgccgcgttacctgtcgcgcttccgttccaatatgccgatctatgcattcacccgtcatgacggcgcgcgtcgccagatggcgatgatgcgtggcgtgttcccgatcggtttcgacagccgtggcctgaccccacgcgaagccgcgcgcgcagcgatccgcctgctggtggagaacgagcgcatggggcctggcgaccgcgtggtgttcaccagcggcgagcacatggaaacccatggcgccaccaacacgctgcgtctgctggaagtgggcgaagacggccgcgccagcggtctgggcgagctgtag

SEQ ID NO: 7597 - protein, 508 aa, Xanthomonas campestris
MPSSVRDACVKFRGFYREAIMKERQRRTKILATLGPATDPPGVLDALFKAGVNVVRLNFSHGDPSGQAKRAAEVRAAAVRVGAEVGILADLPGPKIRIERFAGGKIKLTMGDRFDLVADINAPAGDQHQVGVSYLGLPQDVTAGDVLLLDDGLVQLQVTDVQGARIVTTVLNDGVLSDRKGLNKQGGGLSLGALTERDKELIGIVAKIGVDFIAVSFCRNAQDMHDARQIAQQHGCDAQLVSKIERTEAIENLVEIVEASDVVMVARGDLGVEIGDAELPGLQKKIIRESLAQNKVVITATQMLQSMVESPIPTRAEVLDVANAVIDGTDAVMLSAETAAGAYPVRAVEAMARICLGAEHQFEFDTDFEAAQRNLQRADQAIAMATMFLSEHIGLGGVVALTESGGTPRYLSRFRSNMPIYAFTRHDGARRQMAMMRGVFPIGFDSRGLTPREAARAAIRLLVENERMGPGDRVVFTSGEHMETHGATNTLRLLEVGEDGRASGLGEL

SEQ ID NO: 7598 - DNA, 1506 bp, Xanthomonas axonopodis
  CDS (1)..(1506)
atgtgtgttaagtttcgcggcttttacagggaggccatcatgaaagaacgtcaacgccgcaccaagatcctcgccaccctcggaccggcaacggatgcgcccggtgtgctggatacgctgttcaaggcgggcgtcaacgtggtgcgcctcaacttcagccatggcgacccctccggccaggccaagcgtgccgccgaagtgcgtgccgctgcggcccgcgtcggtgccgaagtcggcatcctggccgacttgccgggcccgaagatccgtatcgaacgttttgccgaaggcaagatcaagctgaccatgggcgatcgcttcgacctggtggccgatgccaacgcgccggctggcgaccagacacaggttggcgtcagctatctgggtctgccgcaggacgtgaccgccggcgacgtcctgctgctcgacgatggcctgatgcagttgcaggtcaccgatgtgcagggcgcgcgcatcgtcaccaaggtgttgaacgatggcgtgctgtccgaccgcaagggcctcaacaagcagggcggtggtctgtcgctgggcgcgttgaccgaacgcgacaaggaactgatcggcatcgttgccaagatcggcgtggacttcatcgcggtgtcgttctgtcgtaacgcgcaggacatgcacgacgcacgtcagatcgcccagcagcatggctgcgatgcgcaactggtgtccaagatcgagcgcaccgaggcgatcgaaaacctggtcgagatcgtcgaagcctccgatgtggtgatggtggcgcgtggcgacctgggcgttgaaatcggcgacgccgaattgccgggcctgcagaagaagatcattcgcgaatcgctggcgcagaacaaggtggtgatcaccgccacgcagatgctgcagtcgatggtcgaaagcccgatccccacccgcgccgaagtgctggacgtggccaacgcggtcatcgacggcaccgacgcggtgatgctctcggccgagaccgccgccggcgcctacccggtgcgtgcggtggaagcgatggcgcgcatctgtctgggggccgaacaccagttcgagttcgataccgacttcgaagcggcgcaacgcaatctgcagcgcgccgaccaggcgattgcgatggcgaccatgttcctgtccgagcacatcggcctgggcggcgtggtggcgttgaccgaatccggcggcacgccgcgcttcctgtcgcgcttccgctccaatatgccgatctacgccttcacccgtcacgatggcgcacgccgccagatggcgatgatgcgtggcgtgttcccgatcagcttcgacagccgcggcctgaccccgcgcgaggccgcacgtgcggcgatccgcctgctggtggagaacgagcgcatggggcctggcgaccgcgtggtctttaccagtggcgagcacatggaaacccacggcgccaccaacacgctgcgcctgctggaagtgggcgaagacggccgcgccaccggtctgggcgagctgtaa

SEQ ID NO: 7599 - protein, 501 aa, Xanthomonas axonopodis
MCVKFRGFYREAIMKERQRRTKILATLGPATDAPGVLDTLFKAGVNVVRLNFSHGDPSGQAKRAAEVRAAAARVGAEVGILADLPGPKIRIERFAEGKIKLTMGDRFDLVADANAPAGDQTQVGVSYLGLPQDVTAGDVLLLDDGLMQLQVTDVQGARIVTKVLNDGVLSDRKGLNKQGGGLSLGALTERDKELIGIVAKIGVDFIAVSFCRNAQDMHDARQIAQQHGCDAQLVSKIERTEAIENLVEIVEASDVVMVARGDLGVEIGDAELPGLQKKIIRESLAQNKVVITATQMLQSMVESPIPTRAEVLDVANAVIDGTDAVMLSAETAAGAYPVRAVEAMARICLGAEHQFEFDTDFEAAQRNLQRADQAIAMATMFLSEHIGLGGVVALTESGGTPRFLSRFRSNMPIYAFTRHDGARRQMAMMRGVFPISFDSRGLTPREAARAAIRLLVENERMGPGDRVVFTSGEHMETHGATNTLRLLEVGEDGRATGLGEL

SEQ ID NO: 7600 - DNA, 1434 bp, Methanosarcina mazei
  CDS (1)..(1434)
atggaaatcccggatcataaaacaaagatcgtctgtacaataggacctgcctcttcttctgaagagatgataaggaagcttatgcttgcgggcatgaacgtggcaaggataaatttttctcacggagactttgagagccactcaagggttgtccgaattatccgtaaggttgcagatgaacttggcaggacaattgcaatccttgcagacctgcctggcccgaaaatacgcataggcaaactcgaaaaagagcctgttatgctccataaagggaacccgataacccttacaattgacgacactccgggaaacgaagagagaatccctgtcagttacaaacagcttccggaaagcgtaacccctgggagccttatctacctcagtgacgggttcatacagctcctctgcaaggaggttacaggaaaagacgttctctgtgaagtccttatcggaggagagctttattcgcacaaagggctgaaccttccaggggcaaagatctttcttgacgctgtgactgaaaaagatttcaggatcctggaatttgcccttgaagaggacattgacactttcagcatctcttttgtagaaaatgcagaagatatccgaaaagtaagaaattttgccgcttccagaggaaagcaggtaaatatagtatcaaaaatagaacgcaggcaggctgtagaaaatataggagaaatccttgacgagaccgatgcccttatggttgcaaggggagacctgggagttgaaattcctatccaggaagtcccttcggtccagaaagaacttatccagagggcaaagctccttggggttcctgtgattactgcaacccatatgctggcttccatgacagataatataagacccacgcgtgccgaagccacggatgttgcaaacgctatccttgacggcacggatgctgttatgctctcggaagaaacagcagtcggaaactaccccgtggaagctgtcgagatgatggcaaagattgcaaagaccactgaaaactggcgctcccggactaaatgggggcttgacacaatgatcaaatccataactgccagggagatgtcagtggatgaggtaatcaccttacaggtttatgaagccctgcagaaactgcctgttgcagccgtacttaccccgacaaggagcggagcgactccccgcaggatttcgcgctttaatcctgacccctggattctggctttcagccgcgttcctaagacctgcaggttcctttccctgtcttacggggtttatcctgttgccgtaaacgaatctattgaaagctgggaaaaagagacaacggaaagaacaaaagaattgggatttgcgaaaagtaaagatctcgtgatttttacccagggccctgcttccggaaaacccggaggtacgaatatgctcaagatcctgacccttgactga

SEQ ID NO: 7601 - protein, 477 aa, Methanosarcina mazei
MEIPDHKTKIVCTIGPASSSEEMIRKLMLAGMNVARINFSHGDFESHSRVVRIIRKVADELGRTIAILADLPGPKIRIGKLEKEPVMLHKGNPITLTIDDTPGNEERIPVSYKQLPESVTPGSLIYLSDGFIQLLCKEVTGKDVLCEVLIGGELYSHKGLNLPGAKIFLDAVTEKDFRILEFALEEDIDTFSISFVENAEDIRKVRNFAASRGKQVNIVSKIERRQAVENIGEILDETDALMVARGDLGVEIPIQEVPSVQKELIQRAKLLGVPVITATHMLASMTDNIRPTRAEATDVANAILDGTDAVMLSEETAVGNYPVEAVEMMAKIAKTTENWRSRTKWGLDTMIKSITAREMSVDEVITLQVYEALQKLPVAAVLTPTRSGATPRRISRFNPDPWILAFSRVPKTCRFLSLSYGVYPVAVNESIESWEKETTERTKELGFAKSKDLVIFTQGPASGKPGGTNMLKILTLD

SEQ ID NO: 7602 - DNA, 1752 bp, Thermoanaerobacter tengcongensis
  CDS (1)..(1752)
atgaggagaacaaaaatagtctgtacaattggacctgctagtgaggactacaatatactgagaaagttaatagaaaaaggaatgaatgtagcaaggcttaatttttcccatggagattttgaagagcacggagcgaggattgacaacataaaaaagataagggaagaattaggtcttcctgtagctattttgctggacacaaaaggacccgagattagaacgggaaagtttaaaaacggcggagtagagttaaaggaaggccagacttttacattaactacaagggatgtaataggagatgaaacggtagtcagtgtttcctacaaaggtttgcctcaagatgtttcaagaggtacccaaattttgattgatgacggattgatctcactaagggttgtggatgtcaaaggggaagacataatctgtgtagttgaaaattcgggatttcttggagaccacaaaggagtaaatgttcctggagtgaaattgaatctcccggctttgacacaaaaagacatagaagatatagagtttggcataaagaaaggtattgacatgatagctgcttcttttgtcaggaaagcggcagatgtgcttgctataaggaggcttcttgaggacaataaagcagaccacattcagataattgctaaaatagaaaaccgcgaaggagtagaaaatatagacgaaataataagggtatctgacgggataatggtggccagaggagatttgggcgttgagatacctctggaggaaataccgatagtgcagaagatgataataaagaagtgcaatgaagctggaaagccagttattactgcaacccaaatgctggattccatgatgagaaatccgcgtcctactcgtgctgaagttacggatgttgctaatgctattttggatggaacggatgccataatgctgtcaggtgagacggcccagggcaaatatcctgtcgaagcttttgagacaatggccaggattgcggaaaagacagaggtttacgtccagtacagagatatagtaggtgtaggtacagagagaaatgtttccattactaatgcgataagccatgctacctgcacgactgcgagagatataggcgcttcagctatcataacctgtacaaaatcaggttatacggctaggatggtttcaaggtataggccttcctctcctatcatagctactactcctagcgagcaggtggcaagaaagctttccatcgtgtggggagtatatcctttagtgacaaaagaagtgtcaaccacagacgaaatgatagatgttgcaatagaaagtgcgttaaaagctgggcttataaggaatggagatattgtggtgatttctgcgggaatacctgttgccatgactggcaccacaaacatgctcaaagttcacatagttggagatgtgattttaagaggtattggtataggttcaaaatctactactggcactgtgtgcataattcatgacattggcaaggacagagacaagtttagagaaggagatataattgttacaaccaagacagagagagattttatgcctcttattgaaaaagcttctgccataataacagaagaaggcgggctcacctcccacgctgctattgttgggcttaacttggggatccctgtgattgtagggtgtgaaggagctacttcaaaacttcaggatgggatgacagtcactgttgacaccacgagaggactggtgtataaaggaattgtaaacataaaatga

SEQ ID NO: 7603 - protein, 583 aa, Thermoanaerobacter tengcongensis
MRRTKIVCTIGPASEDYNILRKLIEKGMNVARLNFSHGDFEEHGARIDNIKKIREELGLPVAILLDTKGPEIRTGKFKNGGVELKEGQTFTLTTRDVIGDETVVSVSYKGLPQDVSRGTQILIDDGLISLRVVDVKGEDIICVVENSGFLGDHKGVNVPGVKLNLPALTQKDIEDIEFGIKKGIDMIAASFVRKAADVLAIRRLLEDNKADHIQIIAKIENREGVENIDEIIRVSDGIMVARGDLGVEIPLEEIPIVQKMIIKKCNEAGKPVITATQMLDSMMRNPRPTRAEVTDVANAILDGTDAIMLSGETAQGKYPVEAFETMARIAEKTEVYVQYRDIVGVGTERNVSITNAISHATCTTARDIGASAIITCTKSGYTARMVSRYRPSSPIIATTPSEQVARKLSIVWGVYPLVTKEVSTTDEMIDVAIESALKAGLIRNGDIVVISAGIPVAMTGTTNMLKVHIVGDVILRGIGIGSKSTTGTVCIIHDIGKDRDKFREGDIIVTTKTERDFMPLIEKASAIITEEGGLTSHAAIVGLNLGIPVIVGCEGATSKLQDGMTVTVDTTRGLVYKGIVNIK

SEQ ID NO: 7604 - DNA, 1428 bp, Fusobacterium nucleatum
  CDS (1)..(1428)
atgaggagtttgaaaaaaacaaaaatagtttgtactattggtcctgtgactgaatcagtagaaactttaaaagaattactaaataggggaatgaatgtaatgagattgaatttctctcatggtgattatgaagaacatggaatgagaatgaagaattttagacaagcaatgtctgaaactggaattagaggaggaatacttcttgatactaagggtccagaaataagaacaatgactttaaaagatggaaaagatgtaagtattaaggctggacaaaaatttactttcacaacagatcaatcggttgttggagataatgaaagagtagcagtaacttatgaaaattttgcaaaagatttaaaagttggaaatatggttcttgttgatgatggattattagaactagatgttgtggaaataaaaggaaatgaagttatatgtatagccagaaataatggagatctaggacaaaagaaaggaataaatttacctaatgtttctgttaatttaccagcattatctgagaaagatatagaagatctaaaatttggttgtcaaaataatgttgattttgtggcagcatcatttataagaaaagctgatgatgtaagacaagtaagaaaagttcttagagaaaatgatggagaaagaatacaaataatttctaagatagaaagccaggaagggcttgataattttgatgaaattttagcagaatctgatggtataatggtagcaagaggagacttaggtgtagaaatccctgttgaagaagttccttgtgcgcaaaaaatgatgataagaaaatgtaatagagtaggaaaaactgttattacagcaactcaaatgctagattcaatgattaaaaatccaagacctacaagagcagaagcaaatgatgttgccaatgctatattagatggtacagatgcagtaatgctttcaggtgaaactgcaaagggaaaatatccattagcagctgttgaagttatgaataaaatagctaaaaaagttgatgctacaataccaccattttacatagaaggtgttataaataaaaatgatataacttctgctgttgcagaaggaagtgctgacataagcgaaaggttaaatgcaaaacttatagttgttggtacagaatctggaagagctgcaagagacatgagaagatatttccctagagcacatattttagcaataactaataatgaaaaaactgcaaatcaattagttttatcaagagggataatttcatatgtagatgcttcaccaaaaactttagaagaattctttgttgtagcagaatctgttgcaaaaaaattaaatttagttaaaaataatgatataattatagcaacttgtggagaaagtgtatttatacaaggaacaactaactcaataaaagtaatacaagtaaaagcatag

SEQ ID NO: 7605 - protein, 475 aa, Fusobacterium nucleatum
MRSLKKTKIVCTIGPVTESVETLKELLNRGMNVMRLNFSHGDYEEHGMRMKNFRQAMSETGIRGGILLDTKGPEIRTMTLKDGKDVSIKAGQKFTFTTDQSVVGDNERVAVTYENFAKDLKVGNMVLVDDGLLELDVVEIKGNEVICIARNNGDLGQKKGINLPNVSVNLPALSEKDIEDLKFGCQNNVDFVAASFIRKADDVRQVRKVLRENDGERIQIISKIESQEGLDNFDEILAESDGIMVARGDLGVEIPVEEVPCAQKMMIRKCNRVGKTVITATQMLDSMIKNPRPTRAEANDVANAILDGTDAVMLSGETAKGKYPLAAVEVMNKIAKKVDATIPPFYIEGVINKNDITSAVAEGSADISERLNAKLIVVGTESGRAARDMRRYFPRAHILAITNNEKTANQLVLSRGIISYVDASPKTLEEFFVVAESVAKKLNLVKNNDIIIATCGESVFIQGTTNSIKVIQVKA

SEQ ID NO: 7606 - DNA, 1713 bp, Oryza sativa
  CDS (1)..(1713)
atggcggcggcggcggctgagatcgtggggtccgcggcggcgcgcatggcggcgccggcagtgaggccggctccgcccgcggcggcggcggcggcggcgcccccgcagccgaggagggccgtggcggcgcgctccctcaggacctccacctccgacagggtggcggcggatctcgcgctcgggagcaacggctccctctccgctcagaacattgctgagaataccgctgacgctacttcgcaagtggtctctgcgaattcccgtaggaagacaaagattgtttgcaccataggcccctcaaccaacacacgcgagatgatatggaaacttgctgagactggaatgaacgtcgcacgcatgaatatgtcccatggtgaccaccagtcgcaccagaaggtgattgatttggtgaaggagtacaatgcgaagaatactgatggcaatgtcattgctattatgctggataccaagggtccagaagtgagaagtggggatgttccagaaccaatcatgctcgaggaaggtcaagagttcaattttactattaaaagaggggtgagcaccaaagacaccgtcagtgtgaattacgatgacttcataaacgatgttgaagttggggacatactgttggtggatggaggaatgatgtcactcgctgtcaagtctaaaacagctgatacggttaagtgtgaagtagttgatggtggggaactgaaatcaaggcgccacctaaatgtccgtggaaagagtgcgactttgccatctattacagagaaagattgggaggacataaagtttggtgttgaaaatggtgttgatttctatgccgtttcctttgtgaaggatgcaaaagttattcatgaactgaaggactaccttaaaagtgctaatgcagatatacatgtcattccaaagattgaaagtgcagattcaataccaaacctccagtccattattgctgcttcagatggggcgatggtggcaagaggggatcttggtgctgaacttccaattgaggaagttcctttgctgcaggaggagattgtcagaacatgccgaagcatgcagaaaccagttattgttgccacgaatatgttagagagcatgatagaccatcccactccaacaagagcagaagtttctgatatagcaattgcagttcgtgaaggttctgatgccatcatgctgtctggtgaaactgcccatggaaagttcccactgaaggcagtcaaggtgatgcacacagtggcacagagaacagaatccagcctgtataacccaactacatctcctagtcttgttgcacatcctcaggctctgctcaacgaggaattttcgcaaagccaactaagcaaaatgtttggatctcatgctacaatgatggcgaacaccctttgcaccccaattattgtgtttacacgaaccggctccatggcagtccttctcagccactaccggccctcgtctacaatttttgcatttacaaatgaggaacgagtgaagcaacgtctggcactctaccagggtgtggttcccatttacatgaagttttctgatgatgcagaggaaactttctctagagcaattagtagcttgctgaacgcccaattcgtgaaagaaggggactacgtgacccttgttcagagtggagtgaagtcgatctggagagaggagtctactcaccacattcaagtgaggaaagtccagggctaa

SEQ ID NO: 7607 - protein, 570 aa, Oryza sativa
MAAAAAEIVGSAAARMAAPAVRPAPPAAAAAAAPPQPRRAVAARSLRTSTSDRVAADLALGSNGSLSAQNIAENTADATSQVVSANSRRKTKIVCTIGPSTNTREMIWKLAETGMNVARMNMSHGDHQSHQKVIDLVKEYNAKNTDGNVIAIMLDTKGPEVRSGDVPEPIMLEEGQEFNFTIKRGVSTKDTVSVNYDDFINDVEVGDILLVDGGMMSLAVKSKTADTVKCEVVDGGELKSRRHLNVRGKSATLPSITEKDWEDIKFGVENGVDFYAVSFVKDAKVIHELKDYLKSANADIHVIPKIESADSIPNLQSIIAASDGAMVARGDLGAELPIEEVPLLQEEIVRTCRSMQKPVIVATNMLESMIDHPTPTRAEVSDIAIAVREGSDAIMLSGETAHGKFPLKAVKVMHTVAQRTESSLYNPTTSPSLVAHPQALLNEEFSQSQLSKMFGSHATMMANTLCTPIIVFTRTGSMAVLLSHYRPSSTIFAFTNEERVKQRLALYQGVVPIYMKFSDDAEETFSRAISSLLNAQFVKEGDYVTLVQSGVKSIWREESTHHIQVRKVQG

SEQ ID NO: 7608 - DNA, 1872 bp, Oryza sativa
  CDS (1)..(1872)
atggcgcaggtggtggctgcggcagggacggcggcggcggtggcggcggtggggaggccgctgggtggcggcggatctggggccgacgcgctccgcccggcggcgaggctgtcgttcgcgccgcgctggtgcggtgggagcgcgggggcagcaagggcgcgccgcgagtccgccgtcacgtccgtgattagccgcgccccgcgtctcgacgccgaggtgctgccggtgtcggccgacgacgacgcggacgaagaagaaaacttccagcatctcaaggccattcagcaacttgcaacatcagccaatggtgtgtggtctaaaccaaatgtgagacgcaagacaaagatcgtgtgcaccattggtccttcaactaacacaaaggagatgatatggaaacttgctgaggctggcatgaatgtggctcggcttaatatgtcacatggagaccatgcatcacaccagaaagttattgacttagtaaaggaatataatgctcaaacaaaggataacgtgattgctattatgcttgacacgaagggaccagaagttaggagtggagatttgcctcaaccaataatgttggaaactggccaggagttcactttcacaattaagagaggagttgggactgagacatgtgttagcgttaactatgatgactttgttaatgatgtagaagtgggtgacatgctcctcgtagatggtggaatgatgtcgttgttggtcaagtccaaaactgaagattcggtaaaatgtgaagttattgatggaggtgaactgaaatccaggcgtcacctgaatgttcgtggaaagagcgcaaccttgccatcaataactgacaaggattgggatgatattaagtttggtgtggagaatcaagttgactactatgccgtttcttttgtcaaagatgctcaagttgtgcatgaattgaaggattatctcagaagctccaatgccgatatacatgtaattgtaaagattgaaagtgcagattccattccaaacctacactcaatcatcacagcatcggatggggctatggttgccagaggtgacttgggagctgaactccctattgaggaggtaccgctgctgcaggaagaaattattagaatgtgcaggagcatgggaaaagctgttattgttgccactaatatgctagaaagtatgattgttcatccaactccaacccgagcagaagtttcagacattgctatagctgttcgagaaggttctgatggcattatgctttctggggaaactgcacacggaaagtttcctttgaaagctgttaaggtcatgcatactgttgccctgagaactgaagccactatgtctggtggggaaacaccggctaaccttggtcaggtgttcaagaatcacatgagtgaaatgtttgcataccattcaacaatgatgtccaacactcttggaacatcaattgtggttttcaccaggacaggatttatggctatcctacttagtcattaccgcccttctggcaccatttttgcctttacggaccaggagagagttagacaacgattggctttgtaccaaggtgtatgtccagtccagatggaattttctgatgatgctgagaagacatttggtgacgctttgtcatacttgctgaaacatggtatggtgaaggaaggcgaggaggttgcacttgttcaaagtggcaggcaacctatctggcggtcgcagtccacccataatattcagcaaaaccttaggcctgatgataataccacgctggcattactggcatcatttaactgtgagcttagtgagttgtgtgcaagacatgagagagccattgttgtgattctatattcgttgctaaatatgttaccttgcatgtaa

SEQ ID NO: 7609 - protein, 623 aa, Oryza sativa
MAQVVAAAGTAAAVAAVGRPLGGGGSGADALRPAARLSFAPRWCGGSAGAARARRESAVTSVISRAPRLDAEVLPVSADDDADEEENFQHLKAIQQLATSANGVWSKPNVRRKTKIVCTIGPSTNTKEMIWKLAEAGMNVARLNMSHGDHASHQKVIDLVKEYNAQTKDNVIAIMLDTKGPEVRSGDLPQPIMLETGQEFTFTIKRGVGTETCVSVNYDDFVNDVEVGDMLLVDGGMMSLLVKSKTEDSVKCEVIDGGELKSRRHLNVRGKSATLPSITDKDWDDIKFGVENQVDYYAVSFVKDAQVVHELKDYLRSSNADIHVIVKIESADSIPNLHSIITASDGAMVARGDLGAELPIEEVPLLQEEIIRMCRSMGKAVIVATNMLESMIVHPTPTRAEVSDIAIAVREGSDGIMLSGETAHGKFPLKAVKVMHTVALRTEATMSGGETPANLGQVFKNHMSEMFAYHSTMMSNTLGTSIVVFTRTGFMAILLSHYRPSGTIFAFTDQERVRQRLALYQGVCPVQMEFSDDAEKTFGDALSYLLKHGMVKEGEEVALVQSGRQPIWRSQSTHNIQQNLRPDDNTTLALLASFNCELSELCARHERAIVVILYSLLNMLPCM

SEQ ID NO: 7610 - DNA, 1560 bp, Encephalitozoon cuniculi
  CDS (1)..(1560)
atgtggctcgttgaagagaaatatcttgttcctttctatgaatatcattacgacatgctttgccgaccctatcaatgcacctgttgccagatccttggtggatgggattttgtcatccagagacctcatcacaacggctatagtcttcatgcggcccgtggctgcatgctggattatatctactcctttgggcaggattacgtctcctatctgcagagcacctatcattggtctcaaaagcttgataaatttggaaagtgtttggcgcaagcaatgagaatggtgctgacaaagatagtctgcacgattggacccagaacatcttctagggagaagatcaaggagctgatagatgctgggatgtcgattgcaagactgaacttcagccatggatcaagggaagcacatctggaagtgattaggaacatcagagactccagaagtggtgcagggaggcatgtttcaatagcactggacacaagggggcctgaggtgaggcttaggacaccggagatgaaggatatcaaggtggagggtggagaagttctccggttctcccttctttcttctgaaaaggacatctggatacccggtgttgaccttaagtctctgggtgtagacaacagggtgtttattgacgacggggcaatcgaactgagggtagtcaatgtggaagaagatggatttgaatgcgaggtgctgaacagtggcatgatcaagagcaataagtccatgaacttccctggcacggacattggagatagggctctgggggatgaggacaagaatgatatcgcctttgggttggagaatgggatagatatggtttttgcatcttttgtgagctgccgggcggatgtcgaggagataagaaggcttgtcggaagcaaggtcccggttgtatccaagatagagtcgtgtctagggatgaggaatctgaaggaaatagccctatgctctgacggggtgatgatagcaaggggagatcttggagttgagattgggctggaaaacatgttcagtgcccagaagagaatactttacgaagtgaagagggaggggaggcctgtgatctgtgcaacacaaatgatggagagcatgactttgaagaatgcgccgaaccggtcagaaatttctgatgttggaaatgcagttcttgatggatgcgactgtgtgatgttgagtgcagagtcggctgttgggatgttccctgtcgagactgttaaattcatgaggagcatctgtgctgatgcagagagatatgacatggagagcaggaagggggcaggggcttgcggggtgtcttcctatgtggatggagttgtgatatgctctggtacggagtcacagatagagaagatctacctgagcaagcctgaaactcccattattgtgatttccgagtccctgtggattctcaggaggttcagcatctatcgaggaatcattcctgtgtatggtaaggggtctgaggacgcggaagctactctgcgaaggctaggactgaggggaagattcctagctgtcggcagagaagatgtgaggatggtgagtgtttga

SEQ ID NO: 7611 - protein, 519 aa, Encephalitozoon cuniculi
MWLVEEKYLVPFYEYHYDMLCRPYQCTCCQILGGWDFVIQRPHHNGYSLHAARGCMLDYIYSFGQDYVSYLQSTYHWSQKLDKFGKCLAQAMRMVLTKIVCTIGPRTSSREKIKELIDAGMSIARLNFSHGSREAHLEVIRNIRDSRSGAGRHVSIALDTRGPEVRLRTPEMKDIKVEGGEVLRFSLLSSEKDIWIPGVDLKSLGVDNRVFIDDGAIELRVVNVEEDGFECEVLNSGMIKSNKSMNFPGTDIGDRALGDEDKNDIAFGLENGIDMVFASFVSCRADVEEIRRLVGSKVPVVSKIESCLGMRNLKEIALCSDGVMIARGDLGVEIGLENMFSAQKRILYEVKREGRPVICATQMMESMTLKNAPNRSEISDVGNAVLDGCDCVMLSAESAVGMFPVETVKFMRSICADAERYDMESRKGAGACGVSSYVDGVVICSGTESQIEKIYLSKPETPIIVISESLWILRRFSIYRGIIPVYGKGSEDAEATLRRLGLRGRFLAVGREDVRMVSV

SEQ ID NO: 7612 - DNA, 1470 bp, Methanosarcina acetivorans
  CDS (1)..(1470)
atgaatataaacgtgaatataaacggccgtgaaaatatgcaaatccctgaccataaaacaaagatcgtctgcaccataggccctgcttccttctccgaggaagtcctcaggaaactggtgcttgcgggaatgaacgttgcaaggattaacttttcccacggagacttcgagagccacggaaaagttatccggagggtccgaaaggttgcagaagagcttgacaggacagttgctatccttgccgacctcccaggcccgaaaattcgcgtaggcaagctcaaaaaagagccgcttatgctccataaagggaaccgaataacccttaccactgacgagacttctggaagcgaggaccgcatcccggtcaactacaaacagctccctgagagcgtctccccgggaagccttatctacctgagtgacggatttatccagctcctctgcctggaaatctcgggaaaagatgtagtctgcgaagttatggtcggaggacaactctactcccataaagggctgaacctgccaggggcaaaaatttacctggactctgtgacggaacatgacttcaaaatccttgagtttgccctgaacgaagaagttgacgcagtcagcatctcttttgtggaaaaagccgaagatatccgaaaagtccggaattttgcttcaaccatgggaaaacctgtatacgttgtctcaaaaatcgaacggagccaggcggtccagaatatagaagagatccttgaggaaaccgatgccctgatggttgccagaggagacctgggagttgagattcctatccaagaagtaccttcggtccagaaagaactcatccggagtgcaaagctcctgagcatccccgtaattactgcaacccacatgctggcctccatgaccgacaacatcaggcctacaagggcggaggctacagacgttgccaacgccatccttgacgggacggacgcggtcatgctctcggaagaaaccgcagttgggaactatcccgtggaaactgtggagatgatggcaaaaattgcaaaaacaacagaaaactggcgctcccgaacgaagtggggacttgacacaatgctcaagggaattacggcacagaaaatgtcagtggacgaggtaatcgctctccaggtacacgaagccctgcaaaagcttcctgtagccgttgtactcaccccaacccgaagcggagcaaccccgcgcaggctttcccgcttcaagcctgaaccctggatcctggctttcacccgcttcccgaaaacctgtagctcccttgccttgtcctatggggtttatccgataatagtaaaagaagtctctgaaaactgggaaacggagaccacggaaaaggcaaaggaactgggatttgcaaaaagcggagagctcgtagttttcacccagggacctgcttccggaaaaccaggaggcacaaacatgctcaagatcctgactctggactga

SEQ ID NO: 7613 - protein, 489 aa, Methanosarcina acetivorans
MNINVNINGRENMQIPDHKTKIVCTIGPASFSEEVLRKLVLAGMNVARINFSHGDFESHGKVIRRVRKVAEELDRTVAILADLPGPKIRVGKLKKEPLMLHKGNRITLTTDETSGSEDRIPVNYKQLPESVSPGSLIYLSDGFIQLLCLEISGKDVVCEVMVGGQLYSHKGLNLPGAKIYLDSVTEHDFKILEFALNEEVDAVSISFVEKAEDIRKVRNFASTMGKPVYVVSKIERSQAVQNIEEILEETDALMVARGDLGVEIPIQEVPSVQKELIRSAKLLSIPVITATHMLASMTDNIRPTRAEATDVANAILDGTDAVMLSEETAVGNYPVETVEMMAKIAKTTENWRSRTKWGLDTMLKGITAQKMSVDEVIALQVHEALQKLPVAVVLTPTRSGATPRRLSRFKPEPWILAFTRFPKTCSSLALSYGVYPIIVKEVSENWETETTEKAKELGFAKSGELVVFTQGPASGKPGGTNMLKILTLD

SEQ ID NO: 7614 - DNA, 1434 bp, Pyrococcus furiosus
  CDS (1)..(1434)
atgagaagggtgaagctcccatctcacaagacaaaaattgtagctacaatagggccagcgactaattcgagaaaaatgataaaacaactcattaaggcggggatgaatgttgcaagaataaacttctcccatggaagttttgaagagcatgcaagagtcatagaaataataagagaggaggcacaaaaattagacaggagagttgcaatacttgcagatctacctggattgaaaataagagtcggtgagataaaagggggttacgtagagctaaagagaggagaaaaggtaatattaacaacaaaggatgttgagggtgatgaaactacgataccagtggattataaaggctttccaaatttggtatcgaagggagacatcatataccttaatgacggatacatagtcttaaaggtggagaacgttagggagaacgaagttgaagcagttgttctttcaggaggaaagctcttctcgagaaagggcgtcaatatacccaaggcctacctcccagtcgaagccataactccaaaagactttgaaattatgaaatttgcaattgagcatggggtggatgcaataggattgagcttcgttgggagcgtttatgatgttctaaaggccaagagtttccttgagaaaaataatgccgaggatgtatttgtaattgcaaagatcgaaagacctgacgccgtgaggaattttgacgagattcttaatgccgctgatggaattatgattgctagaggagatttaggggtagagatgccgatagagcagctaccaattcttcagaagaaattgatcaggaaagccaatatggaagggaaaccagtgattacggcaacacaaatgcttgtgtcaatgacaacggaaaaagtgccaacaagggccgaagttacggacgttgcaaacgcaattcttgatggaacggatgcagttatgctatcagaagaaacggccataggaaaattccccattgagaccgtagagatgatgggaaagatagctaaggtcactgaagaatatagggaaagttttgggttaagcagaataagggagtttatggagatcaaaaagggaacaataaaagaggctatcactagaagtataattgacgcaatatgcacaatagacattaagtttatactaacacccaccagaacgggaagaactgctaggctaatctcaagatttaagcccaagcagtggattttagccttctcaacaaatgaaagggtgtgcaacaatctcatgttcagctatggagtttatcccttctgcctagaagagggattcgatgagaacgatatagttaggttgataaaaggactgggccttgtggaaagcgatgatatggttttaatgacggaaggaaagccaattgaaaaaacagttggaactaactcaattaagatattccaaatagcttga

SEQ ID NO: 7615 - protein, 477 aa, Pyrococcus furiosus
MRRVKLPSHKTKIVATIGPATNSRKMIKQLIKAGMNVARINFSHGSFEEHARVIEIIREEAQKLDRRVAILADLPGLKIRVGEIKGGYVELKRGEKVILTTKDVEGDETTIPVDYKGFPNLVSKGDIIYLNDGYIVLKVENVRENEVEAVVLSGGKLFSRKGVNIPKAYLPVEAITPKDFEIMKFAIEHGVDAIGLSFVGSVYDVLKAKSFLEKNNAEDVFVIAKIERPDAVRNFDEILNAADGIMIARGDLGVEMPIEQLPILQKKLIRKANMEGKPVITATQMLVSMTTEKVPTRAEVTDVANAILDGTDAVMLSEETAIGKFPIETVEMMGKIAKVTEEYRESFGLSRIREFMEIKKGTIKEAITRSIIDAICTIDIKFILTPTRTGRTARLISRFKPKQWILAFSTNERVCNNLMFSYGVYPFCLEEGFDENDIVRLIKGLGLVESDDMVLMTEGKPIEKTVGTNSIKIFQIA

SEQ ID NO: 7616 - DNA, 1404 bp, Clostridium perfringens
  CDS (1)..(1404)
atgagaagaacaaaattagtatgcactatcggaccagctagtgaaaacgaagaaatcttaacaaaaataatcgaagcaggtatgaacgcttcaagacacaatttctcacatggtgaccatgaagaacataaaggaagaatggttaaagtaagagaaatatcaaaaaaattaggtaaagaagtagctatattattagatactaaaggacctgaaataagaactggaaaattcgagccaagcaaagttgaattaactgctggaactgaatttactatatatgctggagcagaagacgtaataggagacactactaagtgttcagttacatatgctggattagctaaagacgttaaagctggagatactatcttaatagacgacggtttagttggattagaagttgtatctgtagaaggaaacgctgttaaatgtgtagtaagaaacactggattagttggaactcacaaaggagttaacgttcctggagtatcaataaaattaccagctatgactgataaagatagagctgacttaatattcggttgtgaaatgggcgttaacatggttgctgcttcattcataagaaaagcagaagacgttaaagctataagagaagtattagttgctaacggtggagctgatatacaaatattctcaaaaatcgaaaaccaagaaggtgttgataacatagatgctatcatcgaagcttcagacggtatcatggtagctagaggagaccttggtgttgaaataccaatggaagacgttccttcagttcaaaaaatgatcatcgaaaaatgtaacaatgctggaaaaccagttataactgctactcaaatgttagactcaatgatgagaaacccaagaccaacaagagctgaggtttcagacgtaactaacgctatcttagatggtactgatgctatcatgttaagtggtgagtcagctaacggaagctggccagtagaagctgttgaaactatggttaaaatagctactaaatcagaagaaatgttaagctacgaattagcttcatcaaaagctaaaaaacatataccagctgtaccaggagttatctcaagagctgcttgtaatgctgcacacgagttaaaatcagctgctatagtttcattaactcaatcaggagctactgctaagagaatatctcaatgcagaccagatgcaccaatcgttactgtaactccaaacgaaagagttgctaagaaagttgctttatgcttcggtgtttacccagttgttgctgaaaatgctacaatggaaaacgctgttgaaatagctaaaaatgctggattcgttaaagctaatgacactgctgtagttgttgcaggtgtaccagctaacgaaggaaacactaacatagtaaaagttgaagttgtaaaataa

SEQ ID NO: 7617 - protein, 467 aa, Clostridium perfringens
MRRTKLVCTIGPASENEEILTKIIEAGMNASRHNFSHGDHEEHKGRMVKVREISKKLGKEVAILLDTKGPEIRTGKFEPSKVELTAGTEFTIYAGAEDVIGDTTKCSVTYAGLAKDVKAGDTILIDDGLVGLEVVSVEGNAVKCVVRNTGLVGTHKGVNVPGVSIKLPAMTDKDRADLIFGCEMGVNMVAASFIRKAEDVKAIREVLVANGGADIQIFSKIENQEGVDNIDAIIEASDGIMVARGDLGVEIPMEDVPSVQKMIIEKCNNAGKPVITATQMLDSMMRNPRPTRAEVSDVTNAILDGTDAIMLSGESANGSWPVEAVETMVKIATKSEEMLSYELASSKAKKHIPAVPGVISRAACNAAHELKSAAIVSLTQSGATAKRISQCRPDAPIVTVTPNERVAKKVALCFGVYPVVAENATMENAVEIAKNAGFVKANDTAVVVAGVPANEGNTNIVKVEVVK

SEQ ID NO: 7618 - DNA, 1419 bp, Ralstonia solanacearum
  CDS (1)..(1419)
atgcaacgttccagccatgccaagatcgtcgccacgctgggtccggccagcgacgaccacgccacgatcgaagcgctcgcgcgtgcgggcgcggatgtcttccgcctgaatttcagccacggcgcgcatgccgatcatcaacggcggctcgaacggatccgcgcggtggaggccgcgctcggccggcccctcggtgtgctgctcgatctgcaaggccccaagctgcgcgtgggcaccttcgccgagggccgggtgcggctggacgatggcgcgccattccggctcgacctggagaccggccgccccggcgacgcgacgcgcgtcgcgctgccgcatccggaaatcttcgcggccatccggcccggcgtggcgctgctgctggacgacggcaagctgcggctcgaagtcgtggcctgcggcccggaccacgccgagacgcgcgtcgtcaacggcggcatgctgtccgaccgcaagggcgtcaacgtgccgggcgtggtgctgcccctgtcggcgctgacggagaaggaccgcgccgacctggccttcggcctggcgctcggtgtcgactggatcgcgctgtcgttcgtgcagcgcgccgccgacatcgccgagatccggcagctcgtgcacggccgcgcgggcattgtcgccaagctggaaaagccggccgccatcgacagcctggatgccatcctggccgagacggacgcggtgatggtcgcgcggggcgacctgggcgtcgagctgccggccgagcaggtgcccgccatccagaagcgcatcgtgcgggcctgccgccggctgggcaagccggtcatcgtggccacgcagatgctggagtcgatgatcggcgcgccggtgcccacccgcgccgaggcctcggacgtggccactgccgtctacgatggcgccgatgcggtcatgctgtccgccgagaccgcttccggccagttcccggtcgaagccgtcgccatgatgcggcggatcatcgcgcagaccgaagccgacccgcactatcgcgccgccatcgacgcctcgcacacgccgcccggcgccaatacgccggatgcgatcggctgcgccgcgcactcggtggccggcctgctggacgtggcggccatggttgcctacacgagctcgggcgcctcggcgctgcgcatggcgcgcgagcggccccgcgccgccatcctgggcatgacgccgcgcccggaaaccgcgcgccggctggcgctggtgtggggcgtccatccggtgatctgcgacggcgtgctcgacgtcgaggcgatgaccgacgtggcgcggcagacggccgtgcagcggcggttcgcgcaagcggggcagaccctcgtcatcgcggcgggcctgccattcggcacgccgggatcgaccaacctgctgcgcatcgcgcaggtggaatga

SEQ ID NO: 7619 - protein, 472 aa, Ralstonia solanacearum
MQRSSHAKIVATLGPASDDHATIEALARAGADVFRLNFSHGAHADHQRRLERIRAVEAALGRPLGVLLDLQGPKLRVGTFAEGRVRLDDGAPFRLDLETGRPGDATRVALPHPEIFAAIRPGVALLLDDGKLRLEVVACGPDHAETRVVNGGMLSDRKGVNVPGVVLPLSALTEKDRADLAFGLALGVDWIALSFVQRAADIAEIRQLVHGRAGIVAKLEKPAAIDSLDAILAETDAVMVARGDLGVELPAEQVPAIQKRIVRACRRLGKPVIVATQMLESMIGAPVPTRAEASDVATAVYDGADAVMLSAETASGQFPVEAVAMMRRIIAQTEADPHYRAAIDASHTPPGANTPDAIGCAAHSVAGLLDVAAMVAYTSSGASALRMARERPRAAILGMTPRPETARRLALVWGVHPVICDGVLDVEAMTDVARQTAVQRRFAQAGQTLVIAAGLPFGTPGSTNLLRIAQVE

SEQ ID NO: 7620 - DNA, 1440 bp, Ralstonia solanacearum
  CDS (1)..(1440)
atgactcgcgccaccaagatcgtcgccacactcggcccttcgtccaatacgctggagatcctgacgcgcatgatcgcggcgggggtggacgtggtgcggctgaacttctcgcacggcaccgcgcaggaccacgtggcgcgcgccgagctggtgcgcgagacggcgcgcgcggtgggccgcgaggtcggcatcatggccgacctgcagggcccgaagatccgcgtcggcaagttcgagagcggcaagatcaccctgagcccgggcgagcgcttcacgctggatgcccgctgcgagctgggcaaccaggagcgcgtcggcctggactacaaggagctgccgcgcgacgtcggccccggtgacctgctgctgctcaacgacggcctgatcgtgctgcaggtcgagcgcgtggtgggcgaggagatcgagaccgtcgtcaaggtcggcggcgatctgtccaacaacaagggcatcaaccgccagggcggcgggctgtcggcgccggcgctgacggccaaggacatggaagacatcaagaccgcgatggcgctgggcgccgactacatcgcggtcagcttccccaagaacgccaccgacatggaaatggcgcgccagctggccgccgtggccggcgcgccgcacagccacaagaccaagatgatcgccaagatcgagcgtgccgaggccatccgcccgggcgtgctggaagagatcctggcggcgtccgacggcatcatggtggcgcgcggcgacctcgcggtggaggtcggcaacgcggccgtgccggcgctgcagaagcgcatgatcaagctcgcgcgcgaggccaacaagctggccatcacggccacgcagatgatggagtcgatgatcgtcaacccggtgccgacgcgcgccgaggtgtcggacgtcgccaacgccgtgctcgacggcaccgatgcggtgatgctgtcggccgagaccgccgccggccgctacccggtcgagaccatcgaggccatggccgccatctgcgtggaggccgagaagtcgcagccggtgcacctcgacacggatttcctcgaccagaccttcagccgcatcgaccagtcgatcgccatgggggcgctgtttacggcctaccatctgcaggtcaaggcgattgccgcgctgaccgactcaggtgccaccgcgctgtggatgagccgccacggcatcaatgtgccgatctatgcgatcacgcccaacgtcgcgtcgcagcgcaagatggccctgtaccgcaacgtgcagccgctgccgctggccatcagcctggaccgcgacgaggcgctgcggcaggccgaggagctgctggtcgcgcgcggcgtggtgcagcgcggcgacttcatcgtcctgaccgtcggcgagccgatggggcaggcgggcgggaccaacacactcaagatcgtgcgcgtcggcatgcactga

SEQ ID NO: 7621 - protein, 479 aa, Ralstonia solanacearum
MTRATKIVATLGPSSNTLEILTRMIAAGVDVVRLNFSHGTAQDHVARAELVRETARAVGREVGIMADLQGPKIRVGKFESGKITLSPGERFTLDARCELGNQERVGLDYKELPRDVGPGDLLLLNDGLIVLQVERVVGEEIETVVKVGGDLSNNKGINRQGGGLSAPALTAKDMEDIKTAMALGADYIAVSFPKNATDMEMARQLAAVAGAPHSHKTKMIAKIERAEAIRPGVLEEILAASDGIMVARGDLAVEVGNAAVPALQKRMIKLAREANKLAITATQMMESMIVNPVPTRAEVSDVANAVLDGTDAVMLSAETAAGRYPVETIEAMAAICVEAEKSQPVHLDTDFLDQTFSRIDQSIAMGALFTAYHLQVKAIAALTDSGATALWMSRHGINVPIYAITPNVASQRKMALYRNVQPLPLAISLDRDEALRQAEELLVARGVVQRGDFIVLTVGEPMGQAGGTNTLKIVRVGMH

SEQ ID NO: 7622 - DNA, 1443 bp, Salmonella typhimurium
  CDS (1)..(1443)
atgtccagaaggcttcgcagaaccaaaatcgttaccacgttaggcccggcaactgaccgcgataacaaccttgagaaggttatcgccgcgggcgcaaacgtagtacgtatgaacttctctcacggctcgccggaagatcataaaatgcgtgctgataaagtccgtgagattgccgccaaactggggcgtcatgtggctattttaggcgacctgcaagggccaaaaattcgcgtttccacttttaaagaaggcaaagtgttcctcaacatcggggacaaatttctgttagacgctaacctgggtaaaggcgaaggcgacaaagaaaaagtcggcattgattacaaagggttgccggcagacgtcgttcctggcgatatcctgctgcttgacgatggtcgagtgcagttgaaagtgcttgaagtccagggcatgaaagtctttaccgaggtcaccgtcggcggcccgctgtctaacaataaaggcattaacaagctcggcggcgggctttctgctgaagcgctgaccgaaaaagacaaagccgatattcaaaccgctgcgctgataggtgttgactatctggccgtctccttcccgcgctgcggcgaagatctgaactatgcacgccgcctggcgcgcgacgccggctgcgacgcgaaaattgtggctaaggtcgaacgcgccgaagcggtatgcgaccaaaacgccatggacgatatcattctggcctctgacgttgtgatggtcgcacgtggcgatctgggcgttgaaatcggcgatccggagctggttggtatccagaaagcgctgattcgccgtgcgcgtcagctaaaccgcgcagtcatcaccgcaacgcaaatgatggagtcgatgatcaccaacccgatgccgacccgtgcggaagtgatggacgtggcgaacgccgtcctggatggcacggatgcggttatgctgtctgccgaaaccgcagccggtcagtatccttctgaaaccgttgccgcaatggcgcgcgtctgcctgggcgcagaaaaaatccccagcatcaatgtgtctaaacaccgtctcgacgtgcagttcgacaacgttgaagaagccattgccatgtctgcgatgtatgcggcaaaccatctgaaaggcgttaccgcgatcatcaccatgacggaatccggtcgtaccgcgctaatgacttcccgtatcagctccggcctgccgattttcgccatgtcgcgccatgaacgcacgctgaacctgaccgcgctctatcgcggagtaacgccggtgcattttgatagcgcggctgatggcgttgtcgcggcacatgaagctgttaatctgctgcgcgataaagggtatctggtttccggcgacctggttatcgtgacccagggcgatgtcatgagcaccgtcggttcaaccaataccacgcgtattttgaccgttgagtaa

SEQ ID NO: 7623 - protein, 480 aa, Salmonella typhimurium
MSRRLRRTKIVTTLGPATDRDNNLEKVIAAGANVVRMNFSHGSPEDHKMRADKVREIAAKLGRHVAILGDLQGPKIRVSTFKEGKVFLNIGDKFLLDANLGKGEGDKEKVGIDYKGLPADVVPGDILLLDDGRVQLKVLEVQGMKVFTEVTVGGPLSNNKGINKLGGGLSAEALTEKDKADIQTAALIGVDYLAVSFPRCGEDLNYARRLARDAGCDAKIVAKVERAEAVCDQNAMDDIILASDVVMVARGDLGVEIGDPELVGIQKALIRRARQLNRAVITATQMMESMITNPMPTRAEVMDVANAVLDGTDAVMLSAETAAGQYPSETVAAMARVCLGAEKIPSINVSKHRLDVQFDNVEEAIAMSAMYAANHLKGVTAIITMTESGRTALMTSRISSGLPIFAMSRHERTLNLTALYRGVTPVHFDSAADGVVAAHEAVNLLRDKGYLVSGDLVIVTQGDVMSTVGSTNTTRILTVE

SEQ ID NO: 7624 - DNA, 1386 bp, Pyrobaculum aerophilum
  CDS (1)..(1386)
atgagcgctcccagaggagatcacgccattctgcgcgcgcgtaatctcactaagagagttgcaacgctgggcccgtctacagacgttttacggccagacgagttgattaaatttctggacttagttgacggcgttaggattaacctagcccacgcatctcccaatgaagtcaaattcagaatagaggcagtgcgctcttatgaaaaggcaaagaataggccgctggctgtaattgtggatctcaaggggcccagcatcagagtgggcagtacctcgcctattaacgtgcaagaaggggaagtggtcaagtttaaactgagcgataaatctgacggcacgtatatccccgtgcctaacaaggcctttttcagcgcagtggaacaaaacgatgttattttaatgcttgatggaaggctgaggctaaaggtaacaaataccggctctgattggattgaggctgtggccgaatccagcggagttataactggcggcaaagctattgtcgttgagggcaaggattacgacatatccacgcctgcggaggaagacgtagaggcgttaaaggccatttctcccattagggataatattgactacgtggcgataagtctcgcgaaaagttgtaaagacgtagacagcgtaagatctctactcacggagctcggctttcaaagccaagtggcagtaaaaatagagactaaaggcgctgttaataatttagaagagcttgtccagtgtagcgattacgtagtagtggctagaggcgacttggggctacactacggccttgacgctctgcctatagtacagaggaggatagtgcacacgtcgcttaaatacggcaagccaattgccgtggccactcagcttttagactccatgcagagctctccaattcccacaagagctgagataaacgacgtctttacaactgcgtctatgggagtagacagcttgtggttaactaatgagactgccagcgggaaatatcctctagccgctgttagctggctttcaagaattttaatgaacgtcgaatatcaaataccacaatccccattgttgcaaaattccagagaccgcttcgccaagggactcgtggagctggcgcaggacttaggggctaacattctcgttttcagcatgagcgggacgttggcgagaagaatcgcgaaatttagacctcgaggcgtggtttacgtcgggacgcctaatgttagagtcgcccgctctctgtcaattgtctgggctctagagcctttatatatacccgctgagaattacgaggaggggcttgagaagttaatatcgcttaaaggaactacgccgtttgtggccacgtacggaatcagagggggtgtccactcggtaaaggtgaagctctag

SEQ ID NO: 7625 - protein, 461 aa, Pyrobaculum aerophilum
MSAPRGDHAILRARNLTKRVATLGPSTDVLRPDELIKFLDLVDGVRINLAHASPNEVKFRIEAVRSYEKAKNRPLAVIVDLKGPSIRVGSTSPINVQEGEVVKFKLSDKSDGTYIPVPNKAFFSAVEQNDVILMLDGRLRLKVTNTGSDWIEAVAESSGVITGGKAIVVEGKDYDISTPAEEDVEALKAISPIRDNIDYVAISLAKSCKDVDSVRSLLTELGFQSQVAVKIETKGAVNNLEELVQCSDYVVVARGDLGLHYGLDALPIVQRRIVHTSLKYGKPIAVATQLLDSMQSSPIPTRAEINDVFTTASMGVDSLWLTNETASGKYPLAAVSWLSRILMNVEYQIPQSPLLQNSRDRFAKGLVELAQDLGANILVFSMSGTLARRIAKFRPRGVVYVGTPNVRVARSLSIVWALEPLYIPAENYEEGLEKLISLKGTTPFVATYGIRGGVHSVKVKL

SEQ ID NO: 7626 - DNA, 1440 bp, Rhizobium meliloti
  CDS (1)..(1440)
atgagacggaacaggaaagtcaaaatcctcgcgacgctcgggccggcatcggccgacgagcaaatgattcagaagctgcacgaggcgggggccgatctgttccgtatcaacatgagccatgcaagccatgaggtcatgcgcacgctgatcgagcggatccgtgtggtcgaggcgcgctgcggccgtccgatcggcatcctcgccgatctgcaggggccgaagctgcgcgtcggaaagttcgccgaaggcaaggtcgagctcaagatcggccagacattcacgctcgacaaccgcgacgtgcccggcgacagccgccgcgtctatcttccgcatccggagatcctcgaagcggtgaagcccggccatcgcctgctcatcgacgatggcaagctgcatctgcgcgccgaaaagaccgatggcaagagcatcgtcaccacggtcgtttccggcacgcggatttcggatcgcaagggcgtcagcctgcccgataccctgcttggcgtcggcgcgctgacggacaaggaccgcgtcgacctcgacgccgtgctggcgacaggagaggtcgattgggtggcgctttccttcatccagcgccctgaggaccttgccgaggttcgcaagatcgcccgcggccgcgttggactgatgtcgaagatcgagaagccgcaggcgatcgagcggatagacgagatcatcgagctttcggatgcgctgatggtggcacgcggcgacctgggcgtcgaaatgccgctcgaatccgtaccgggacttcagaagcaactgacgcgtgcctgccggcgagccggcaagccggtcgtcgtcgccacgcagatgctcgaatcgatgatctcctcgcctgtgccgacgcgcgcagaagtgtcggacgtggctaccgccgtgttcgagggtgccgatgcggtgatgctttcggccgaatccgcctccggcgagtaccccgtcgaggcggtttctaccatggcgtcgatcgccagcaacgtcgagcgcgatccgcattatccggggatcatctacgctcagcgcacgccgccggaggcaacgggcgcggacgccatttcgcttgccgctcaccagatcgccgagacgctcaagcttgccgcaatcgtgacctacacctcctctggcaccaccggcctgcgcgcggcgcgcgagcgcccccaggtgcctgtcatcgcgctttcgccgatcgtccagacggcccgtcgcctttccgtggtctgggggctgcactgtgtcgtcacagaggacgcgaccgacctcgacgatatggtcaaccgcgcctgtcgaatcgtctcgacggaaggcttcggcaagccgggagaccgcatcatcgttaccgccggcgtgccgctcggtacccccggcgccaccaacatgctgcgcatcgcctatatcggctcggacggccaatcgggcatctga

SEQ ID NO: 7627 - protein, 479 aa, Rhizobium meliloti
MRRNRKVKILATLGPASADEQMIQKLHEAGADLFRINMSHASHEVMRTLIERIRVVEARCGRPIGILADLQGPKLRVGKFAEGKVELKIGQTFTLDNRDVPGDSRRVYLPHPEILEAVKPGHRLLIDDGKLHLRAEKTDGKSIVTTVVSGTRISDRKGVSLPDTLLGVGALTDKDRVDLDAVLATGEVDWVALSFIQRPEDLAEVRKIARGRVGLMSKIEKPQAIERIDEIIELSDALMVARGDLGVEMPLESVPGLQKQLTRACRRAGKPVVVATQMLESMISSPVPTRAEVSDVATAVFEGADAVMLSAESASGEYPVEAVSTMASIASNVERDPHYPGIIYAQRTPPEATGADAISLAAHQIAETLKLAAIVTYTSSGTTGLRAARERPQVPVIALSPIVQTARRLSVVWGLHCVVTEDATDLDDMVNRACRIVSTEGFGKPGDRIIVTAGVPLGTPGATNMLRIAYIGSDGQSGI

SEQ ID NO: 7628 - DNA, 1745 bp, Mastigamoeba balamuthi
  CDS (36)..(1541)
gaaacgcacgaggcacctcctcctccgcagcaaacatggcccagaagaccgtccgccccgccaagctcaccaagatcgttgcgaccgtcagcgatctgcgctgccaggttgagaccctgcgccagctgtggatgaccggcgtcgatgtgatccgcctgaacacggcgcaccagaccgaggccgacaccctcctcgtcgtcgagaacgcccgcgccgtcggccggacgatccccctgatgctcgacaccaagggccccgaggtgcgcactgcgctcctgacggccgagaaggtcatcgacgtcaagaccggcgacaaggtcttcgtctgccccagcgaggccatcctcaacgagtacaaggccaagggccagaacgccttcacgaccaactacgcgcgtttcaccgacgaggtcggcatgaacaaccgcgtcctgatcgacgacggcctgctgggcatgcacgtcgttgccaaggacgaggccaggcgcgtcctggagctcgtcgtcgagaacgacggtgtcatcaagggccgcaagtcggtcaacacccccgacgtcaagctccagctcgagtcggtcaccgagcgcgacaagaccttcctcaggttcgccgccaagcacgacctcgagttcgtcgcccactcgttcgtccgctgccgcaaggacatcgaggacgtccgcgccatcctcagcgagaacggctcgcacgcccagatcatcgccaagatcgagaaccgtgagggcatcgacaacatcgacgagatcctcgacgttgccgacggcatcatggttgcccgtggcgacctcggcatcgaggttcccttcgaggaggtccccatgatgcagaagatgctcatccgcaagtgcaacgagcgcgccaagcccgtcatcactgccacccagatgctccacacgatgatggagaaccctcgcccgacccgcgccgaggtctcggacatcgccaacgccatcctcgacggcactgacgcgattatgctgtcgggcgagaccgcctcgggcaagtacccgttcgagtctgtcgagaccatggtcaagatcgccatgcgcatcgagagcgagcgcgccaagaacaaggagctgtggactcgcacgctctgcaagagcatcaacaccccccgcgcggtgctctgctcggcggccatgtcggccatccagacgctgcccgtcaaggcgctcgtctgcgacaccctcaccggccgctcggcccgcatcatcgcgacgtacaaggcgcccgtccccgtgtacgcgcagtgccacgactcgcgcatcagccgcatgctggcgctgtcgtacggtgtctactcgcgctacgtgcccctccccaactcgaccgacgcgctcatcgtcgagtcgctgacggcgctctcggagcccgccactgtcggcaaggacgacctgatcgtcttcgtcgcgggcacccccggcaaccagaagggctcgaacatcatcgagatcaacactgtcgacctgatcctccagggccacagcgcgcactgcgtcaaggctgaggagcgcatctagagcggcttcctctccctctttactagctactgcccccgcatgaaccacctccctaatgcatccccttaaccctccttcgtctgtcgcacacgggacgcacgaagggtcgtttcattaatcggctgcaacaacggaaacttctgagttcgcgttcataagacaaacaaaccttctgccttgttctccaaaaaaaaaaaaaaaaaa

SEQ ID NO: 7629 - protein, 501 aa, Mastigamoeba balamuthi
MAQKTVRPAKLTKIVATVSDLRCQVETLRQLWMTGVDVIRLNTAHQTEADTLLVVENARAVGRTIPLMLDTKGPEVRTALLTAEKVIDVKTGDKVFVCPSEAILNEYKAKGQNAFTTNYARFTDEVGMNNRVLIDDGLLGMHVVAKDEARRVLELVVENDGVIKGRKSVNTPDVKLQLESVTERDKTFLRFAAKHDLEFVAHSFVRCRKDIEDVRAILSENGSHAQIIAKIENREGIDNIDEILDVADGIMVARGDLGIEVPFEEVPMMQKMLIRKCNERAKPVITATQMLHTMMENPRPTRAEVSDIANAILDGTDAIMLSGETASGKYPFESVETMVKIAMRIESERAKNKELWTRTLCKSINTPRAVLCSAAMSAIQTLPVKALVCDTLTGRSARIIATYKAPVPVYAQCHDSRISRMLALSYGVYSRYVPLPNSTDALIVESLTALSEPATVGKDDLIVFVAGTPGNQKGSNIIEINTVDLILQGHSAHCVKAEERI

SEQ ID NO: 7630 - DNA, 2207 bp, Toxoplasma gondii
  CDS (225)..(1820)
ggcacgagcccgtgtgctacccttttttccgtttctcgcctgtgtgcggaatctggtgcttttacccgtaacgaacactttcgaatgcgagcgtctgtcgtcactgaggtttgttcacctgtccgtgtcggttcgtgtgtgtgacgctttctgcgttttttctgttcctgccacaactgtttgcttgggctttttgactttttacctgctctcctcttatcacaatggcatctaaacaaccgcagacactgagcgccggcgccgtcgagagcggccgcgttgcccgcctcgtgtccgccagttctgtgatgactcagcagctgggaaaaagcacgaacatccgcatgtcccagattctggagccgcgctccgaagaagactggactgcccaccgcactcgcattgtctgcaccatgggccccgcatgctggaacgtagacaccctcgtcaaaatgatcgacgctggcatgaacgtctgccgcttgaacttctcgcacggcgaccacgaaacacacgcacgcactgtccagaacatccaggaagccatgaagcaaagacctgaagcgcgcttggcgattctcctggacaccaagggacccgaaatccgcactggattcttgaaggaccacaagcccatcactctgcagcaaggcgccactctgaagatcgtgacggactacaacttgattggcgacgagacaacgattgcatgctcctacggtgccctccctcaatcggtgaagcccggcaacaccattctcattgccgacggttccctctccgtcaaggtcgttgaagttgggagcgattacgttattacccaggctcagaacaccgctaccatcggcgaacgcaagaacatgaacctacccaacgtcaaagtccagctgcccgtcattggcgagaaggacaagcacgacatcctgaactttggcattcccatgggatgcaactttattgctgcttccttcgtccaaagcgcggatgatgtccggtacattcgcggtctgcttggcccccgtggccgccacatccgcattattccgaagatcgagaatgtcgagggtctcgtcaacttcgacgaaattctcgcggaagccgacggtatcatgatcgcgcgtggtgacttgggaatggaaatcccccccgaaaaggttttcctggctcagaagatgatgattgctaagtgcaacgtcgtgggcaagcccgttattacagcgacccagatgctggagagtatgatcaagaacccgcgcccgacacgtgcggaggccgccgatgtggcgaacgcggtgttggacggcacagattgcgtgatgctttctggagagactgctaacggagaattcccggttatcaccgttgagacaatggcccgcatctgctacgaggcggaaacctgcgtggactaccctgcgctgtaccgtgccatgtgcctggcagttcccccacccatttcgactcaggaagctgttgcgagagcagctgtcgagacggccgagtgcgtcaacgcagcgatcatcctggctttgaccgagaccggtcagactgcgcgtctgatcgccaagtaccgcccgatgcagccgattctggccctgagtgcttcagaaagcaccatcaagcacctgcaggtgatccgcggtgtgacgacgatgcaggttccctcgttccagggaaccgaccacgtgatcagaaacgcgattgtcgtggccaaggagagagaactcgttactgagggcgagagcatcgtcgctgtgcacggcatgaaagaggaagtcgctggctccagcaaccttctcaaggttcttactgtggagtaaactgcagaacagagcaggtgcgaaggaatagacgcaggagcaagaaggagagagcttctatgtagacgatgtcggaatcgagtttttggcagttggttacggtttttttttatgtccctccaaccagaatcgagtagcaccttccacagtggacgcatgtggtaattttccacggagggcagtggcgtgcgacgaaaaggttgccgcctgcgaccgtgcctgatttttttttgcgttggtgaaactttctgcattttgcctttttctgttccccacaagattcgactcgcaagtgaccagcgtttttaccgtagttcgttgctgcgaccttgacgtgaactgaaagaggatagcgtaaacctctgcctcctcgaaaaaaaaaaaaaa

SEQ ID NO: 7631 - protein, 531 aa, Toxoplasma gondii
MASKQPQTLSAGAVESGRVARLVSASSVMTQQLGKSTNIRMSQILEPRSEEDWTAHRTRIVCTMGPACWNVDTLVKMIDAGMNVCRLNFSHGDHETHARTVQNIQEAMKQRPEARLAILLDTKGPEIRTGFLKDHKPITLQQGATLKIVTDYNLIGDETTIACSYGALPQSVKPGNTILIADGSLSVKVVEVGSDYVITQAQNTATIGERKNMNLPNVKVQLPVIGEKDKHDILNFGIPMGCNFIAASFVQSADDVRYIRGLLGPRGRHIRIIPKIENVEGLVNFDEILAEADGIMIARGDLGMEIPPEKVFLAQKMMIAKCNVVGKPVITATQMLESMIKNPRPTRAEAADVANAVLDGTDCVMLSGETANGEFPVITVETMARICYEAETCVDYPALYRAMCLAVPPPISTQEAVARAAVETAECVNAAIILALTETGQTARLIAKYRPMQPILALSASESTIKHLQVIRGVTTMQVPSFQGTDHVIRNAIVVAKERELVTEGESIVAVHGMKEEVAGSSNLLKVLTVE

SEQ ID NO: 7632 - DNA, 1317 bp, Sulfolobus tokodaii
  CDS (1)..(1317)
atgtttagaaagaccaaaattatcgcgactttgggacctagtagtgaaaatcacattgatgaattagtaaagtatgtagacgtaataaggttaaatttcgcgcatggagataaagaacagcatgaaaagtactttaatctagtaaaaaatagagttcctattctagtagatttgccagggccaaagcttaggatcggtgatttagggaaaaatatgatattacttaaacctggagataccatagaatttggaactcaaatccccgtagatgatattttattctttaaacttatcagaaaaggttcagaggtactaatatctgatggaagaattagagtaaaaataatagaggctggaaacaattacgctaagggattagtagaagaaggaggtattttaacatccagaaagggtataaacatcccagattccgaaataccagtaggattgactgatagggatttagagttattaaaatatgctttagaaatgggagcaacatttattggactctcatttgtaacttcaccagaggagattagaaaagctaaagaaattgttaaagaccaagcctggataatagctaaaatagagaaaaaatctgcgttaaagaagttgaaagagataataagggaagccgatggtgtaatggttgctagaggcgatttgggagtagaagtaggtttagctaatttaccacaaactcagagaagaattgttagactgactagattatatggtaagcccgtaattttggccacacaagtgcttgagtcaatggttacttctccaattccaactagagctgaagtgattgatgttgcaaattcaataattcaaggtgttgatgcgataatgcttagtgatgaaactgccatgggccaatatcctatagatgctgtaaggactttgcatgagctaatattaagtgttgagagatcttttaaacccagacctccaccaccactaaaaaatatagatgatgcaatagcatattcagctgtatctgcttcaaatctggcttcttcatctggtatagtagtttatactaggactggtgcttcagcactaaggatatctaggttaagaccagtagttccaataatagtattaactcaaaatcaaagggtctacgagagactaaaactttgttatggaatctactcttttatttcagaagaattaaatagtctagataatattgttgaaaagagcaaaaacatagctagacaagtaggtttaaagaacactataataataattgctggtggaatagaagaagggtcaactagatttttaaaagttgaggagatctaa

SEQ ID NO: 7633 - protein, 438 aa, Sulfolobus tokodaii
MFRKTKIIATLGPSSENHIDELVKYVDVIRLNFAHGDKEQHEKYFNLVKNRVPILVDLPGPKLRIGDLGKNMILLKPGDTIEFGTQIPVDDILFFKLIRKGSEVLISDGRIRVKIIEAGNNYAKGLVEEGGILTSRKGINIPDSEIPVGLTDRDLELLKYALEMGATFIGLSFVTSPEEIRKAKEIVKDQAWIIAKIEKKSALKKLKEIIREADGVMVARGDLGVEVGLANLPQTQRRIVRLTRLYGKPVILATQVLESMVTSPIPTRAEVIDVANSIIQGVDAIMLSDETAMGQYPIDAVRTLHELILSVERSFKPRPPPPLKNIDDAIAYSAVSASNLASSSGIVVYTRTGASALRISRLRPVVPIIVLTQNQRVYERLKLCYGIYSFISEELNSLDNIVEKSKNIARQVGLKNTIIIIAGGIEEGSTRFLKVEEI

SEQ ID NO: 7634 - DNA, 1626 bp, Thermoplasma volcanium
  CDS (1)..(1626)
atgaagaccaagatcgtagcaacggtaggacctgcaagtgaagatccgtcgatacttaagcaaatggtaaaaaatggattatccttaatcagaatcaactccgcacacgctgaaatttcctatgtagcaaaaatagtaaaagagatgcgcgatataaatccagatgtaggtgtaatggtcgatctcaagggcccagagcttaggactggaacctttcctggcggttcactgcgcatatctaaaggaaataaatacaccataggaaaagaaatcacgctgaataatgaaaaagccattggaaatattcagactggcgacaaagtcctgatgagcgatggtgaggtggaatttaccgttgatagcacttcgcctatagtgctaatagcagaaaatgatggtgttctacgagacaggagcagagtgaatgtccctgggagatacgttgaaattgggtccataaccgaaagagataagagtttcgtaattgagggtataaaacaaggcgtagacttctttgccttatctttcgtacaaaatgctgaaaatgtgaacagccttagggatttcataatagagaatggcggtaaccagtacataatagcgaaaattgagacaaagagcggccttgataacattgagagcatagttcaggcatcagacggaataatggtagcgagaggcgatctcggagtcgaactccccctgaaagaagttgttatggcgcagaagaagataataaagatctctcatgaggatggggatttcacaatagtcgctacacaggtactggagtctatggttaacaatgcatttccaacaagggcggagatatcagatataaccaatgctataatagacaatgccgatgccctcatgctgtctgaagagagtgcgataggcaaatacccagcacttgctgtacagacactgcgtgacgtatccgattatgtggaaaatctcgttgattttcaatcgtcttacacctttaaaggcaacaaaatagcttattcagtcgcgaaggcagcaaaagtgctttccgatgatataaacagcaatggaattgttgcactgacacacaccggatcgactgtaaaaatgatctcttcgcttaggccaaaggcgctggtctatgctgggactgttgatgactcgctgtctaggaagcttaatatttacttcggagttgttcctctgcatctaaaaagagattcagaatctctcagttttgccgatctgacagaatacatcttaaaatctgcatttttcaagagtggggataagatcgtagtaacaagcggcgatccgtattttacctttggcggcacgaatgacgtccgtgttatggctataggtgaattcctgggccgtggatatcctcaaggcaaagatgccttcggaacagcaacatacgggaaaaatggaaatattctaatttcaaatagcaaggatgtacctgacgggaacttcgacgcgtatatatttacggctgatgtaaagccatcagaagttaaaaagatcaacggtaaaactgcggtttttaaaacgaggcttgcaaggaccatcaacgaaggtgagaggatctatatagatggaaatacaggtataatattaaaatatgaaaaataa

SEQ ID NO: 7635 - protein, 541 aa, Thermoplasma volcanium
MKTKIVATVGPASEDPSILKQMVKNGLSLIRINSAHAEISYVAKIVKEMRDINPDVGVMVDLKGPELRTGTFPGGSLRISKGNKYTIGKEITLNNEKAIGNIQTGDKVLMSDGEVEFTVDSTSPIVLIAENDGVLRDRSRVNVPGRYVEIGSITERDKSFVIEGIKQGVDFFALSFVQNAENVNSLRDFIIENGGNQYIIAKIETKSGLDNIESIVQASDGIMVARGDLGVELPLKEVVMAQKKIIKISHEDGDFTIVATQVLESMVNNAFPTRAEISDITNAIIDNADALMLSEESAIGKYPALAVQTLRDVSDYVENLVDFQSSYTFKGNKIAYSVAKAAKVLSDDINSNGIVALTHTGSTVKMISSLRPKALVYAGTVDDSLSRKLNIYFGVVPLHLKRDSESLSFADLTEYILKSAFFKSGDKIVVTSGDPYFTFGGTNDVRVMAIGEFLGRGYPQGKDAFGTATYGKNGNILISNSKDVPDGNFDAYIFTADVKPSEVKKINGKTAVFKTRLARTINEGERIYIDGNTGIILKYEK

SEQ ID NO: 7636 - DNA, 1437 bp, Rhizobium loti
  CDS (1)..(1437)
atgagacgcagccgcaaggtcaagatcctagccacaatcggtccggcctcctcctccgaggagatgctgcagaagctgttcgaagcgggcgccgatgtgttccgcatcaacatgagccataccgaccacgaactgatgcgcacgctggtcgggcgcatccgcgccgtcgaggaaaaggtcggccggccgatcggcatcctcgccgacctgcaaggccccaagctgcgcgtcggcaagttcgccaatggcaaggaggtgctgacgccaggccagaccttcacgctcgacgacaatcccgagcccggcacgtcgagcagggtctatctgccgcatccggaaatcctgagttcggtcgagcccggtcaccgtcttttgatcgacgacggcaagctcgagctgaaggcggtgaagagcgatggcaagtcgatcgtctgcacggtcgtcgccggcaccacgatttccgacaagaagggcgtcagcctgcccgataccgacctgccggtcggcgctctgaccgaaaaggaccgcaaggatctcgacgcggtgctcgccacgggcgtcgactggatcgcgctgtccttcgtgcagcgccccgaggatctggccgaggcgcgcaagatcgcgcggggccgggcgctgatcatggccaagatcgaaaagccgcaggccgtcgcccgcttggccgagatcatcgaactgtccgacgcgctgatggtcgcccgtggcgatctcggcgtcgaaatgccgctggaagccgttcccggcatccagaagcagatcacgcgcgccgcgcgccgcgccggcaagccggtggtggtcgccacgcaaatgctggaatcgatgatcaccgccccggtgccgacccgcgccgaagtctccgacgtctcgatcgccgtcttcgagggcgccgacgccatcatgctgtcggcggaatcggcggcgggtgcctatcccgtcgaagccgtggcgatgatggaccgcatcgccaccaaggtcgaaaccgatccgacctatgccggcatcatcaacgcccagcgctccgagccggaagcgaccggagccgacgcgatctcgctggctgcccgcgaaatcgccgagactctgaaactgtcggcgatcatcacctacacggcgtccggcaccaccgggctgcgcgccgcgcgcgaacggccacaggtgccgatcatcgctctgtcgccgatcctcaacaccgcacggcggctgtcgcttctgtggggcacgcactgtgtcgtttcgcccgatgccaccgatctcgacgacatggtcaaccgcgcctgccgcattgcgctggaagaagagttcggcaagccgggcgaccgcgtcatcatcacggccggtgtgccgctgaggacgcccggctcgaccaacatgctgcgcattgcctatgtcgggtcggaaaagcagggcagccggtaa

SEQ ID NO: 7637 - protein, 478 aa, Rhizobium loti
MRRSRKVKILATIGPASSSEEMLQKLFEAGADVFRINMSHTDHELMRTLVGRIRAVEEKVGRPIGILADLQGPKLRVGKFANGKEVLTPGQTFTLDDNPEPGTSSRVYLPHPEILSSVEPGHRLLIDDGKLELKAVKSDGKSIVCTVVAGTTISDKKGVSLPDTDLPVGALTEKDRKDLDAVLATGVDWIALSFVQRPEDLAEARKIARGRALIMAKIEKPQAVARLAEIIELSDALMVARGDLGVEMPLEAVPGIQKQITRAARRAGKPVVVATQMLESMITAPVPTRAEVSDVSIAVFEGADAIMLSAESAAGAYPVEAVAMMDRIATKVETDPTYAGIINAQRSEPEATGADAISLAAREIAETLKLSAIITYTASGTTGLRAARERPQVPIIALSPILNTARRLSLLWGTHCVVSPDATDLDDMVNRACRIALEEEFGKPGDRVIITAGVPLRTPGSTNMLRIAYVGSEKQGSR

SEQ ID NO: 7638 - DNA, 1440 bp, Pasteurella multocida
  CDS (1)..(1440)
atgtctagaagactaagaagaacgaagattgtatgtacaatgggaccgtcaacagagcgtgggaataatcttgaaaaaattatcatggctggcgcgaatgttgttcgtatgaacttttctcatggcacaccagaagatcatatcggtcgcgcggagaaagtacgtgaagtggcaaaaaaacttggaaaaaccgttgctattttaggtgatttacaaggccctaaaatccgtgtctcaactttcaaagatggtaaaattttcttaaatattggtgataaatttgtgcttgatgccgatttaccaaaaggtgaaggtacgcaagaaggtgttggtttagactacaaaacattaccacaagacgttgtgccaggcgatattttattgttagatgatggtcgtgttcaattaaaagtcttatctacagaaggtaataaagtttttactgaagtcactgttggtggtccattatcgaacaataaaggtattaacaagttaggcggaggtttatctgctgatgcattaactgaaaaagataaaaatgatattttattggcagcaaaaatcggtgtagattatttagcggtttctttccctcgttcaagtgcagatttaaactatgcgcgtgagttagctgaagctgcaggcttaaaagcaaaaatcgtggcaaaagtagaacgtgcagaaactgttgcaaccactgaagcaatggatgatattattttagcatcagatgtcatcatggtagcacgtggtgacttaggggttgaaattggtgaccctgaattagtgggtgtacagaaaaaattaatccgtcgcgcacgccaattaaaccgtgttgttattacagcaacacaaatgatggaatctatgattagcaatccaatgccgactcgtgcggaagtgatggacgtagcgaatgccgtattagatggtacagacgccgtgatgctttctgcagaaacagcggcagggcaatatccagcagaaacagtggctaccatggcaaaagtgtgtttaggtgctgaaaaaatgccaagcatcaatgtttctcgtcaccgtatggatatcacttttgattctatcgaagaatccgttgcaatgtctgcaatgtatgctgcaaaccacatgaaaggtgttgctgcaattattgcaatgacacatactggacgtaccgcgttattaatgtcacgtattagttctggtttaccgatttttgccttatctcgtaaccaagatgcattaaatctttgtgcattataccgtggtgttacacctgttcattttgatgaagtcagccgtaattcaaaaggtgcagctgcagcgattcgtttgttaaaagagaaaggtttcttagtatcgggtgatttagttcttttaactcaaggtgatgaattgttagcaagtggtacaaatacttgccgtacactagttgtagaataa

SEQ ID NO: 7639 - protein, 479 aa, Pasteurella multocida
MSRRLRRTKIVCTMGPSTERGNNLEKIIMAGANVVRMNFSHGTPEDHIGRAEKVREVAKKLGKTVAILGDLQGPKIRVSTFKDGKIFLNIGDKFVLDADLPKGEGTQEGVGLDYKTLPQDVVPGDILLLDDGRVQLKVLSTEGNKVFTEVTVGGPLSNNKGINKLGGGLSADALTEKDKNDILLAAKIGVDYLAVSFPRSSADLNYARELAEAAGLKAKIVAKVERAETVATTEAMDDIILASDVIMVARGDLGVEIGDPELVGVQKKLIRRARQLNRVVITATQMMESMISNPMPTRAEVMDVANAVLDGTDAVMLSAETAAGQYPAETVATMAKVCLGAEKMPSINVSRHRMDITFDSIEESVAMSAMYAANHMKGVAAIIAMTHTGRTALLMSRISSGLPIFALSRNQDALNLCALYRGVTPVHFDEVSRNSKGAAAAIRLLKEKGFLVSGDLVLLTQGDELLASGTNTCRTLVVE

SEQ ID NO: 7640 - DNA, 1880 bp, Arabidopsis thaliana
  CDS (126)..(1658)
ctgttcgtcgatataaaactttcttcgttaccattttgagtctccggcggctttcacactccagaaaaaaaacacagaagctacgtttttcaggactttgattaggtttttggagatttacaaaaatgtcgaacatagacatagaaggaatattgaaggagctacctaatgatgggaggactcctaagactaagatcgtttgtacattaggtcctgcgtctaggtctgtgacaatgattgagaagcttcttaaagcaggcatgaatgtagctcgattcaatttctctcacggaagccatgagtaccatcaggagactcttgacaatctccgcaccgctatgcagaataccggcattctcgctgctgttatgcttgatacaaaggggcctgagattcgtaccggtttcttgaaagatgggaaccctatacaactaaaggaaggccaagagatcacaattaccactgattatgacatcaagggcgatgagaaaacgatttccatgagctacaaaaagctcccagtggatgtgaagcccggaaataccatactatgtgcagatggaagcataagtcttgctgtcgtgtcatgtgatccaaacgctgggactgttatatgtcgatgtgaaaatacagccatgctaggtgaaagaaaaaatgtgaatctcccaggtgttgttgttgatctccccacattgactgacaaggatgtagaagatattcttaaatggggtgttccaaacaacatcgatatgattgctctttcatttgttcgcaaaggttcagatcttgttaatgtccggaaagtccttggatcacattccaagagtataatgttgatgtcgaaggttgagaaccaagaaggagtcctgaatttcgatgagattttgcgtgaaactgatgcattcatggttgctcgtggtgatcttgggatggagattccgatagagaagatcttcttggctcagaagatgatgatctacaagtgtaaccttgcaggtaaaccggtggtcacagccactcaaatgctcgagtcgatgatcaaatcaccacggccaacacgagcagaagccacagatgtagcaaacgcagttctcgatggcactgactgtgtgatgcttagcggagaaagtgctgcaggagcttaccctgaaatagcagtgaaaacaatggctaaaatctgcatcgaggcggaatcatcgcttgactacaacacaatcttcaaggagatgattagagcaactccacttccaatgagcactcttgagagtcttgcatcatcagctgtacgaacggcaaacaaagccaaagccaaactcatcatcgtgttgaccagaggaggtacaacagctaaactggtggccaagtatagaccggctgttccaattctatcggtggttgttccggtcttcaccagcgatacgtttaactggagttgcagcgatgagtcaccggcgaggcatagtttgatatatagaggtctgataccggttttgggtgaaggatctgcaaaagcaactgatagtgaatccacagaggagattattgaatctgctttgaagtcagcgacagagaaaggactgtgtaaccatggtgatgctgtggtggctctgcaccgtattggagctgcttcggttatcaagatctgtgtggtgaagtgatttttctactaaatatcttgaattttattcttggttaatgtttcttgatgaaataatccaataaagaaccagggaataggttcctgaaagtgttttgtgtggggcatttcttctctttcttttgctgttttagcttataagattatgaatgcactaatgactcttgctcatattattatagtttaattagccaataataacaatttttaaggctcgttttct

SEQ ID NO: 7641 - protein, 510 aa, Arabidopsis thaliana
MSNIDIEGILKELPNDGRTPKTKIVCTLGPASRSVTMIEKLLKAGMNVARFNFSHGSHEYHQETLDNLRTAMQNTGILAAVMLDTKGPEIRTGFLKDGNPIQLKEGQEITITTDYDIKGDEKTISMSYKKLPVDVKPGNTILCADGSISLAVVSCDPNAGTVICRCENTAMLGERKNVNLPGVVVDLPTLTDKDVEDILKWGVPNNIDMIALSFVRKGSDLVNVRKVLGSHSKSIMLMSKVENQEGVLNFDEILRETDAFMVARGDLGMEIPIEKIFLAQKMMIYKCNLAGKPVVTATQMLESMIKSPRPTRAEATDVANAVLDGTDCVMLSGESAAGAYPEIAVKTMAKICIEAESSLDYNTIFKEMIRATPLPMSTLESLASSAVRTANKAKAKLIIVLTRGGTTAKLVAKYRPAVPILSVVVPVFTSDTFNWSCSDESPARHSLIYRGLIPVLGEGSAKATDSESTEEIIESALKSATEKGLCNHGDAVVALHRIGAASVIKICVVK

SEQ ID NO: 7642 - DNA, 1517 bp, Arabidopsis thaliana
  CDS (1)..(1497)
atggcgatgatagagcaaaggccgaagacgaagatcgtttgtactctaggtccagcttccagatctgttccgatggtcgagaagcttcttagggctggtatgaacgttgctcgtttcaatttctctcatggatctcatgaataccatcaagagactctcgataatcttcatcaagctatgcttaacactgggattctctgtgccgtcatgctcgacaccaagggtccagaaatccgaaccgggttcttgaaagatgggaaaccaatccagctgaaacaaggacaagagatcactatttcgactgactatgacttgaagggtgacgagaacacgatttgcatgagctacaaaaagttggctgttgatgtgaacccaggaatggtcattctttgtgctgatggtacaatctccttactggttctctcttgtgacaaagagaacggtacagtccgttgccggtgtgagaactctgcgatgctcggtgagagaaagaacgttaatctcccaggtgttgttgtggatctcccaactctaactgagaaagacaaagaagacatcatgcaatggggagtcccgaatcaaatcgacatgattgctctgtcttttgtcaggaaaggttcagacttggttcaagtccggaaacttctaggaaagcacgccaaaaacattcttctcatgtctaaggtcgagaaccaagaaggtgtggcaaattttgatgacattttggtcaattcagacgctttcatgattgctagaggagatctgggcatggaaatcccgattgagaagatcttcttagctcagaaggtgatgatctacaaatgcaacatccagggaaaacctgtggtcacagcaactcagatgctcgagtccatgatcaaatctcctagacccacaagagccgaagctacggatgtagcaaacgcagtccttgatggtacagactgtgtcatgctcagtggtgaaactgcagctggagcataccctgaactagccgtccgtacaatggctaagatctgcgtggaagccgagagcacccttgactacggtgatgtcttcaagaggatcatgctgtactctccagttccaatgagtccactcgagtcacttgcatcttcagctgtcagaactgctaactcagctagagccactctcatcatggtcctaaccagaggaggaagcacagcaagacttgtggctaagtacagaccaggaatgcctattctatccgtcgttgttcctgagatcaaaaccgacttctttgactggtcttgcagcgatgaatcccccgcgagacacagccttatcttccgtggtctgatcccagtgctctacgctggatccgcaagagcctcacacgatgaatcaacagaagaagctatcgagtttgctactcagtacgggaaagagaaagagctatgcaagactggagattccgttgttgctctactccgagtcggtaatgcttccgtgatcaagatcttgaccgtcaagtgatgattccactcaaaaattca

SEQ ID NO: 7643 - protein, 498 aa, Arabidopsis thaliana
MAMIEQRPKTKIVCTLGPASRSVPMVEKLLRAGMNVARFNFSHGSHEYHQETLDNLHQAMLNTGILCAVMLDTKGPEIRTGFLKDGKPIQLKQGQEITISTDYDLKGDENTICMSYKKLAVDVNPGMVILCADGTISLLVLSCDKENGTVRCRCENSAMLGERKNVNLPGVVVDLPTLTEKDKEDIMQWGVPNQIDMIALSFVRKGSDLVQVRKLLGKHAKNILLMSKVENQEGVANFDDILVNSDAFMIARGDLGMEIPIEKIFLAQKVMIYKCNIQGKPVVTATQMLESMIKSPRPTRAEATDVANAVLDGTDCVMLSGETAAGAYPELAVRTMAKICVEAESTLDYGDVFKRIMLYSPVPMSPLESLASSAVRTANSARATLIMVLTRGGSTARLVAKYRPGMPILSVVVPEIKTDFFDWSCSDESPARHSLIFRGLIPVLYAGSARASHDESTEEAIEFATQYGKEKELCKTGDSVVALLRVGNASVIKILTVK

SEQ ID NO: 7644 - DNA, 1564 bp, Arabidopsis thaliana
  CDS (1)..(1533)
atgtcgaacatagacatagaagggatcttgaaggagctacctaatgatgggaggatcccaaagacgaagatagtttgcacattaggaccagcttctcgcactgtttccatgatcgaaaagcttttgaaagccggtatgaatgtggctcgcttcaacttctcacatggaagccatgaataccatcaagagacactcgacaacctccgctctgctatgcataataccggcattctcgctgctgtcatgcttgatactaaggggcctgagattcgtactggtttcttgaaagatgggaaccctatacaactgaaggaaggtcaagagattactataaccactgattatgacattcaaggagacgaatcaacgatatccatgagctataaaaagctgcctttggatgtgaagcccggaaacaccatactctgtgcagatggaagcataagtctagctgtcttgtcatgtgatcctgagtctggaactgttaggtgccggtgtgaaaactcggcgatgcttggtgaaagaaagaatgtgaatcttcctggcgttgttgttgatcttcccactttgacagataaggatattgaagatattctcggttggggtgttccgaacagcattgatatgattgctctttcgtttgtccgtaaaggttcggatcttgttaatgtccgcaaggttcttggatctcatgctaaaagcataatgctcatgtcaaaggttgagaaccaggaaggtgtgattaactttgatgagatcttgcgtgaaacagatgcgttcatggttgcccgtggtgatctcgggatggagattccgatagagaagatcttcttggctcaaaagttgatgatctacaagtgtaaccttgcgggtaaaccggtggtcacagccactcagatgctggagtcaatgatcaaatcacctcggccaacccgagctgaagccacagatgttgcaaatgctgttcttgatggtactgactgtgtgatgcttagcggtgagagtgcagcaggagcttatccggaaatagctgtgaaagtcatggctaagatctgcattgaagccgaatcctcgcttgattacaacacaatctttaaagagatgatccgagcaactccacttccaatgagcccactcgagagtcttgcatcatccgctgtacggactgctaacaaagcgagggcaaaactcatcattgtgttgacacgtggaggttcaactgctaatctcgtggctaaatacagaccggctgttccgattctgtcagtggttgtcccggttatgaccactgattcctttgactggtcttgtagtgacgagtcacctgcaaggcatagtctgatatacagaggtctaatccctatgttggctgaaggatctgcaaaggcaacagatagtgaagccaccgaagttatcattgaagctgctctgaagtcggctactcagagaggactgtgcaaccgtggtgatgcaatcgtggcgctgcaccgtattggagctgcctcagttattaagatctgtgtggttaagtgagattacagacttctttcaatacctcaaatct

SEQ ID NO: 7645 - protein, 510 aa, Arabidopsis thaliana
MSNIDIEGILKELPNDGRIPKTKIVCTLGPASRTVSMIEKLLKAGMNVARFNFSHGSHEYHQETLDNLRSAMHNTGILAAVMLDTKGPEIRTGFLKDGNPIQLKEGQEITITTDYDIQGDESTISMSYKKLPLDVKPGNTILCADGSISLAVLSCDPESGTVRCRCENSAMLGERKNVNLPGVVVDLPTLTDKDIEDILGWGVPNSIDMIALSFVRKGSDLVNVRKVLGSHAKSIMLMSKVENQEGVINFDEILRETDAFMVARGDLGMEIPIEKIFLAQKLMIYKCNLAGKPVVTATQMLESMIKSPRPTRAEATDVANAVLDGTDCVMLSGESAAGAYPEIAVKVMAKICIEAESSLDYNTIFKEMIRATPLPMSPLESLASSAVRTANKARAKLIIVLTRGGSTANLVAKYRPAVPILSVVVPVMTTDSFDWSCSDESPARHSLIYRGLIPMLAEGSAKATDSEATEVIIEAALKSATQRGLCNRGDAIVALHRIGAASVIKICVVK

SEQ ID NO: 7646 - DNA, 1581 bp, Aspergillus oryzae
  CDS (1)..(1581)
atggccgccagcagttctctcgaccatttgagcaaccgtatgaagctggagtggcactccaagctgaacacggagatggtgcccgcgaagaacttccgccgcacctccatcattggcaccattggccctaagaccaactcggtggagaagatcaacgctctccgcagatccggtctcaatgttgttcgtatgaacttctcccacggttcgtatgagtaccaccagtccgttatcgacaacgcccgtgaggccgccagagtccagaccggacgtcccctcgccattgctcttgataccaaaggacctgaaatccgtactggaaacactaccgatgataaggatatccccatcaaggagggtcacgagctcaacatcaccactgatgagaagtacgctaatgctagcgacgaccagaacatgtacctggactataagaacattaccaatgtgatcgctcccggaaagctcatctatgtcgacgatggtatcctctccttccaggttctggaggtcgttgacgacaagaccctgcgcgtcaagtgtcttaacaatggcaacatctcctctcgcaagggtgttaacctgcccggcaccgatgttgaccttcccgccctttccgagaaggatatcagtgatctcaagttcggtgtcaagaacggcgtcgacatgatctttgcctcgttcattcgtcggggaagtgacatccgccacattcgtgacgtgttgggtgaagagggtaaggagattcagatcatcgccaagattgagaaccagcagggtgtcaacaacttcgacgagattctcgaggagactgacggtgttatggtcgcccgtggtgatcttggtatcgaaatccccgcccccaaggtcttcatcgctcagaagatgatgatcgccaagtgcaacatcaagggcaagcctgtcatctgtgccactcaaatgctcgagtccatgacatacaaccctcgccccactcgtgccgaggtgtccgatgtcgctaacgctgttcttgacggagccgactgtgtcatgctttctggtgagaccgctaagggctcatacccttgtgaggctgttaagatgatgagcgagacctgtttgctcgccgaggttgccattccccacttcaatgtctttgacgagttgcgcaacctcgctccccgccccactgatactgtggaatccatcgccatggctgccgttagcgccagtcttgagcttaacgccggtgccattgttgtcttgaccaccagtggtaacactgctcgccttctttccaagtaccgccctgtgtgccccatcctgatggtcacccgtaaccctagagcttcgaggtattctcacctctaccgtggtgtctggcccttcctcttccccgagaacaagcccgacttcaacgtcaagatctggcaggaggacgttgaccgccgtctcaagtgggctatctcccacggtatcaagctcggtatcatcaacaagggagacaacattgtctgtgtccagggttggcgcggaggccagggccacaccaacaccgtccgtgtggtcccagctgaggagaaccttggtctgattgagtaa

SEQ ID NO: 7647 - protein, 526 aa, Aspergillus oryzae
MAASSSLDHLSNRMKLEWHSKLNTEMVPAKNFRRTSIIGTIGPKTNSVEKINALRRSGLNVVRMNFSHGSYEYHQSVIDNAREAARVQTGRPLAIALDTKGPEIRTGNTTDDKDIPIKEGHELNITTDEKYANASDDQNMYLDYKNITNVIAPGKLIYVDDGILSFQVLEVVDDKTLRVKCLNNGNISSRKGVNLPGTDVDLPALSEKDISDLKFGVKNGVDMIFASFIRRGSDIRHIRDVLGEEGKEIQIIAKIENQQGVNNFDEILEETDGVMVARGDLGIEIPAPKVFIAQKMMIAKCNIKGKPVICATQMLESMTYNPRPTRAEVSDVANAVLDGADCVMLSGETAKGSYPCEAVKMMSETCLLAEVAIPHFNVFDELRNLAPRPTDTVESIAMAAVSASLELNAGAIVVLTTSGNTARLLSKYRPVCPILMVTRNPRASRYSHLYRGVWPFLFPENKPDFNVKIWQEDVDRRLKWAISHGIKLGIINKGDNIVCVQGWRGGQGHTNTVRVVPAEENLGLIE

SEQ ID NO: 7648 - DNA, 1431 bp, Streptomyces coelicolor
  CDS (1)..(1431)
atgcgccgttcgaaaatcgtctgtactctcggccccgcggtcgactcccacgagcagctcgtcacgctgatcgaagccggcatgaacgtggcccgcttcaacttcagccatggcacccacgccgagcaccagggtcgttacgaccgggtccgggccgccgccaaggagaccggccgggccatcggcgtcctcgccgacctccagggcccgaagatccgcctggagaccttcgcggagggccccgtcgagctggtgcgcggtgacgagttcaccatcaccgccgaggacgtcccgggcgacaggacgatctgcggcacgacctacaagggcctgcccggtgacgtcaccaagggcgaccaggtgctcatcaacgacggcaacgtcgagctgaaggtcaccgaggtcgagggcccccgggtgaagacgatcgtcatcgagggcggcgtcatctccgaccacaagggcatcaacctgccgggcgcggcggtcaacgtccccgcgctgagcgagaaggacgtcgaggacctccggttcgcgctgcgcatgggctgcgacctggtcgccctctccttcgtccgggacgccaaggacgtcgccgacgtgcaccgcgtcatggacgaggagggccgccgggtcccggtgatcgccaaggtcgagaagccccaggcggtcgacaacatggaggacgtcgtgatggcgttcgacggcgtgatggtcgcccgtggcgacctggccgtcgagtacccgctcgagaaggtccccatggtgcagaagcgcctgatcgagctgtgccggcgcaacgccaagccggtgatcgtggcgacccagatgatggagtcgatgatcacgaactcccggccgacccgcgccgaggcctccgacgtggccaacgcgatcctggacggcgccgacgcggtcatgctgtccgccgagtcgagcgtgggcgcctacccgatcgagaccgtcaagacgatgtcgaagatcgtcaccgccgccgagcaggagctgctctccaagggcctccagccgctggtgccgggcaagaagccgcgcacgcagggcggttcggtggcccgtgcggccgccgagatcgccgacttcctgggcggcaagggcctggtcgccttcacccagtccggcgacaccgcccgccggctctcccgctatcgcgcggcccagccgatcctcgccttcaccaccgacgagtccacccgcaaccagctggcgctcagctggggagtggagccgcacgtggtgccgttcgtgaacaccacggacgagatggtggacctggtggaccaggagacggcccgcctcggccggttcagcgacggcgacaccgtcgtgatcaccgccggttcgccccccggcgtgtccggcaccaccaacatggtgcgggtcctccacctgggcgagacacggcgcggctga

SEQ ID NO: 7649 - protein, 476 aa, Streptomyces coelicolor
MRRSKIVCTLGPAVDSHEQLVTLIEAGMNVARFNFSHGTHAEHQGRYDRVRAAAKETGRAIGVLADLQGPKIRLETFAEGPVELVRGDEFTITAEDVPGDRTICGTTYKGLPGDVTKGDQVLINDGNVELKVTEVEGPRVKTIVIEGGVISDHKGINLPGAAVNVPALSEKDVEDLRFALRMGCDLVALSFVRDAKDVADVHRVMDEEGRRVPVIAKVEKPQAVDNMEDVVMAFDGVMVARGDLAVEYPLEKVPMVQKRLIELCRRNAKPVIVATQMMESMITNSRPTRAEASDVANAILDGADAVMLSAESSVGAYPIETVKTMSKIVTAAEQELLSKGLQPLVPGKKPRTQGGSVARAAAEIADFLGGKGLVAFTQSGDTARRLSRYRAAQPILAFTTDESTRNQLALSWGVEPHVVPFVNTTDEMVDLVDQETARLGRFSDGDTVVITAGSPPGVSGTTNMVRVLHLGETRRG

SEQ ID NO: 7650 - DNA, 1503 bp, Streptococcus thermophilus
  CDS (1)..(1503)
atgaataaacgcgtaaaaatagttgctacacttggtcctgcggttgaaatccgtggtggcaagaaatttggtgaagatggttactggagtgaaaaacttgaccctgatgcatctgctaaaaacattgctcaattgatcgaggaaggtgctaacgttttccgtttcaacttctcacatggtaaccacgctgagcaaggtgaacgtatggatgtcgtacgtatggctgaatctattgctggtcaaaaagtaggtttccttcttgacactaagggacctgaaatccgtactgaattgtttgaaggtgatgctaaagagtatgcatacaaaactggtgaacaaatccgtattgctactaaacaaggtctcaaatcaactcgcgacgttattgctttgaacgttgctggtgcacttgacattttcgacgatgtagaagttggtaaacaagttcttgtggatgatggtaaacttggtcttcgtgttgtagacaaggatgctgaaaaacgtgaattcatcgttgaagttgaaaatgatggtattattgctaaacaaaaaggtgtaaacatcccttacactaaaattcctttcccagcacttgctgaacgtgataatgctgatattcgttttggtctcgaacaaggtattaactttatcgcaatctcatttgtacgtactgcgaaagacgtacaagaagtacgtgctatctgtgaagaaactggaaacggccacgttaaattgttggctaaaatcgaaaaccaacaaggtatcgataatatcgatgaaatcattgaagctgctgatggtatcatgatcgctcgtggtgacatgggtatcgaagtaccattcgaaatggttccagtttaccaaaaaatgattatcactaaagtaaatgctgctggtaaaattgttgttacagctacaaacatgcttgaaacaatgacagaaaaaccacgtgcaactcgttctgaagtatctgacgtgtttaacgcagttatcgacggtactgatgcgacaatgctttctggtgagtctgcaaatggtccatatcccgttgaatcagttcgtacaatggccacaattcataaaaacgctcaaactcttcttaaagagtacggtcgtcttaattcatcaacatttgatcgctcaagtaacactgaagtcgttgcatctgcagttaaagatgctactaactcaatgcatatccaacttattgttgcacttactgaatctggtaacacagctagcttgatcgatacataccgtccagaagctgacatctgggcaataacattcgatgaacttactcaaaaatcattgatgcttaactggggtgttattccagttgttactgaaacaccttcatctactgatgatatgtttgaagttgctgagcgtgttgctcttgaatcaggtcttgtagaatcaggtgataacattgttattgttgctggtgttccagttggttctggtaatacaaatactatgcgtatccgcacagttaaataa

SEQ ID NO: 7651 - protein, 500 aa, Streptococcus thermophilus
MNKRVKIVATLGPAVEIRGGKKFGEDGYWSEKLDPDASAKNIAQLIEEGANVFRFNFSHGNHAEQGERMDVVRMAESIAGQKVGFLLDTKGPEIRTELFEGDAKEYAYKTGEQIRIATKQGLKSTRDVIALNVAGALDIFDDVEVGKQVLVDDGKLGLRVVDKDAEKREFIVEVENDGIIAKQKGVNIPYTKIPFPALAERDNADIRFGLEQGINFIAISFVRTAKDVQEVRAICEETGNGHVKLLAKIENQQGIDNIDEIIEAADGIMIARGDMGIEVPFEMVPVYQKMIITKVNAAGKIVVTATNMLETMTEKPRATRSEVSDVFNAVIDGTDATMLSGESANGPYPVESVRTMATIHKNAQTLLKEYGRLNSSTFDRSSNTEVVASAVKDATNSMHIQLIVALTESGNTASLIDTYRPEADIWAITFDELTQKSLMLNWGVIPVVTETPSSTDDMFEVAERVALESGLVESGDNIVIVAGVPVGSGNTNTMRIRTVK

SEQ ID NO: 7652 - DNA, 2150 bp, Pseudomonas hydrogenothermophila
  CDS (16)..(1437)
ttacggaaacggaagatgcgccacaccaaaatcgtcgcgacgctaggccccgcttcgagcgatcccgccacgctcgaacggctgctccttgccggcgtcgacgtcgttcgcctcaacttttcgcacggaaccgcggacgagcaccgcgcccgggcgtcgctcgtgcgtgcgctcgcacagcagacccaacgccccgttggcatcctgggcgacctccaaggaccgaaaatccgcatcggccggttcaccaccaacgctgttactctgagcaaagggcaacgctttcggctcgactgcgacctcgccccgggtgacgccacccgggttgggctcgactacccggaactgatcgacgacgtcgaggtcggcgacatcttgctcctcgacgacggcaaaattcgcttgcagatcgtcgaaaagtgcgcagacgcgctcatcacgcaggtgcttgttggcggcaccctctcgaaccacaaagggatcaacaaactgggtggcgggctttcggcgccagcgctcactgcgaaagaccgtgccgtgccgatatcgcgctcgctgccgaaatcggcgtcgattaccgtcgcggtctctttcgtcaagcacgccgaagagatgcacgaagcgcggcacttggcgcgcgctgccgggagccgcgcccgtttgatcgccaaaatcgaacgggtcgaagcgatcgctaacctcgacgcgattctggaggcgagcgacggcgtgatggtcgcgcgtggggatctcgcggtcgaggtgggcgatgctgctgtgccggcgttacaaaagcgcattttgcgccgcgcacgggaaatgaaccgcctgtcgatcaccgccacccaaatgatggaatcgatggtgcatagccccgtcccgacccgggccgaggtctccgacgtcgcgaacgcggtgctcgacggcaccgacgcggtgatgctctcggccgaaaccgcagcgggccagtacccggtcgaggcagtcgaagcgatggcgcgcgtctgcgccgaagccgacgcgtcgaacgacgcccacctcgaccaggagctcctggggcggcgttttcaccgcgtcgacgaagcgatcgcggtctccgccgtctggtcgggctaccacctaggggtgaaagcgatcgtcgcgctcacccaatcgggcgcgaccgcactctggatgagccgcatcgcaagcattctccccatctacgccctcacccccgacccggtgaccttcggccacctcaccctcttccgccaagtcacgccagttcgcttcgacctgaaccccgcgtccgacccggcaatgctcctcacacagatacgcacgctccttgtgtcgaacggctgggctgcaccaggggaaacgatcgcggtcactttcggcgaaccgatgggacaacccggcggcagcaacacgttgaagatcgttaccctctagcctgagggatacggggatggtagcattgggcaagattccaatcgtaccaggaggaggaaaaaccgtgtcagcgcaacaacaaaacccgatcagccgcttccccgtccccgaaaccctcgacgcgctccctgccgatatccgcgaacggatcgaaaaggtcgcggaaaaatcgggcttcatccccaacgtcttcttggcgctggcggcgcgtcccgaagaatttcgcgccttcttcgcctaccacgatgcgctgatggagcgcccctcgaacctcagcaaagcggaaaaagagatgatcgtcgtcgccacctccgcggcgaacgactgcctctattgcgtggtcgcccacggtgcgatcctgcgcgtgcgcagcaaaaatccgcgcctttcggagcagatcgccaccaactaccgtcgtgccgagatcaccccacggcagcgggcgatgctcgactacgcgatgaaagtggcgctcgactccgcgcgcatcaccgaagccgactgggagccgctcatcgcccacgggttcacccaagacgacatttgggaaatcggtgcgattgccgccttttttgcgatgagcaaccgcttggcgaacatgagcgcgatgcggccgaacgacgagttctacagtctggggcggtagcgtaccgtctggggcggtagcgtaccgcttgcttttttgtgccctaggccgcccccaacctttcgca

SEQ ID NO: 7653 - protein, 473 aa, Pseudomonas hydrogenothermophila
MRHTKIVATLGPASSDPATLERLLLAGVDVVRLNFSHGTADEHRARASLVRALAQQTQRPVGILGDLQGPKIRIGRFTTNAVTLSKGQRFRLDCDLAPGDATRVGLDYPELIDDVEVGDILLLDDGKIRLQIVEKCADALITQVLVGGTLSNHKGINKLGGGLSAPALTAKDRAVPISRSLPKSASITVAVSFVKHAEEMHEARHLARAAGSRARLIAKIERVEAIANLDAILEASDGVMVARGDLAVEVGDAAVPALQKRILRRAREMNRLSITATQMMESMVHSPVPTRAEVSDVANAVLDGTDAVMLSAETAAGQYPVEAVEAMARVCAEADASNDAHLDQELLGRRFHRVDEAIAVSAVWSGYHLGVKAIVALTQSGATALWMSRIASILPIYALTPDPVTFGHLTLFRQVTPVRFDLNPASDPAMLLTQIRTLLVSNGWAAPGETIAVTFGEPMGQPGGSNTLKIVTL

SEQ ID NO: 7654 - DNA, 1413 bp, Selenomonas ruminantium
  CDS (1)..(1413)
atgttaaaaaagacgaaaatcgtttgcacgcagggtccgtccacagagaaaccgggcgtaattgatgcactgattgccaatggcatgaactgcgcacgcttcaatttctcccatggtgaccacgaagaacatcttggccgtatcaatatggttcgtgaagctgccaagaaggctggcaaggttatctctttaatcctcgataccaaaggtccggaaatgcgtctgggcgagttcaaagatggcaaagttatgctcgaaaagggcaacaagttcactttgacctatgacgatgaaccgggtgatgaaactcatgtttccgtaaaccacaaaggtctttacacggaagttaagccgggcgacaccctgctcctctccgatggcctcgtagctctcaaagttgatgaaatcaagggcaaggatatcgttacgacgattcagaacagcggtaagatgagcacgcgcaagcgcgtagctgctccgggcgtaccccttggtctgcctcctatctccgaacaggatgctaaggacatcatctttggctgcgaacaggatatggatttcgtagctgcttccttcatccagcgtccggatgatgttatcgccatccgcaagctcatcgaagagcacaatggccacatggaaattctgccgaagatcgaaaacctcgaaggtgttaagaacttcgatgcaatcctggaagtttccgacggcatcatggttgcccgtggtgacctgggcgtagaagttccggcagaagatgtgccccttattcagaaggaaatcatccgcaagtgcaacgctgctggcaagccggttatcgttgctacgcagatgctcgactccatggaacgcaacccgcgtccgacccgtgcagaagtttctgacgttggtaacgccatcctcgatggtacggatgccatcatgctgtccggcgaaacggcttccggtgactatccggtagaagcagttgccacgatgaaccgcattgcacagcgcatggaaagctcccttgaatacaaggaactctatgtagaacgtggtctgcagcacatggaatcccgtacgcgtgctatcgctcatgctacggttcagatggcttatgagctcgatgctccggctattatcacgccgaccgaatccggttacacgacgaaggtcgtttccaagtatcgtccgaaggctgctatcgtagcttacacgccgagcgaaaaagttctgcgtcagctgaacctgcgttggggcgtatatccggtactcggcacccagtggagcgatgtggatgaaatgatcagcaatgcaacggctgctgctgttaaggaagacctcgtacagcgcggcgacctcaccatcatcacctccggtgtgaagatggaatcccgtacgcgtgctatcgctcatgctacggacatctaa

SEQ ID NO: 7655 - protein, 470 aa, Selenomonas ruminantium
MLKKTKIVCTQGPSTEKPGVIDALIANGMNCARFNFSHGDHEEHLGRINMVREAAKKAGKVISLILDTKGPEMRLGEFKDGKVMLEKGNKFTLTYDDEPGDETHVSVNHKGLYTEVKPGDTLLLSDGLVALKVDEIKGKDIVTTIQNSGKMSTRKRVAAPGVPLGLPPISEQDAKDIIFGCEQDMDFVAASFIQRPDDVIAIRKLIEEHNGHMEILPKIENLEGVKNFDAILEVSDGIMVARGDLGVEVPAEDVPLIQKEIIRKCNAAGKPVIVATQMLDSMERNPRPTRAEVSDVGNAILDGTDAIMLSGETASGDYPVEAVATMNRIAQRMESSLEYKELYVERGLQHMESRTRAIAHATVQMAYELDAPAIITPTESGYTTKVVSKYRPKAAIVAYTPSEKVLRQLNLRWGVYPVLGTQWSDVDEMISNATAAAVKEDLVQRGDLTIITSGVKMESRTRAIAHATDI

SEQ ID NO: 7656 - DNA, 1822 bp, Arabidopsis thaliana
  CDS (1)..(1791)
atgtctcagtctattcaattctccactccttcacacactcctcaccttctccatctccctcactcacaattcaaccgtcctctctcctctatctccttccgtcgcttccctctaacaaccatcaaatacacttccatcagagcctcctcgtcatcatctccttcaccggatctcgattcatcgtcctcatcatcatcctcgcaagtacttctctcacctaacggtactggtgctgtgaagtctgatgagagatccgttgtcgctacggcggttacgactgatacgtctgggattgaggttgatactgtgacggaagctgagcttaaggagaatggatttagaagtacgaggaggacgaagctgatctgtacgatcggaccggcgacttgtggatttgagcagcttgaggcgcttgctgtgggaggtatgaatgtggcaaggcttaatatgtgtcacggtacgcgtgattggcaccgcggtgtgattcgtagtgttcggaggcttaatgaggagaaaggctttgcggttgctattatgatggatactgaaggtagtgagattcatatgggagatcttggtggtgaagcttcagctaaagcagaggatggtgaggtttggactttcactgttagagcttttgattcttctcgtcctgaacgtaccattagtgttagctacgatggtttcgctgaagatgtaagagttggggatgaacttttggttgatggtgggatggtgagatttgaagtgattgagaagattggtcctgatgttaagtgtctatgtaccgatcctggattgttgcttcctcgagctaacttgacgttttggagagatggaagtcttgtacgagagcgtaatgccatgcttccaacaatttcttccaaggactggttggatattgattttggaattgctgaaggtgtggatttcattgctgtatcgtttgtcaagtcggctgaagtcattaatcaccttaaaagttatcttgctgctcgttcccgtggaggggaaattggagtgattgcaaagatcgagagtatcgattcactgaccaatttggaagaaattattctagcatcagatggggccatggttgcaagaggagatctgggagctcagatacctcttgagcaagttccagcagctcaacagagaatcgtccaagtatgcagagctcttaacaaacccgtcattgtcgcttcacagctattggagtccatgattgagtacccaactccaaccagagcagaagttgccgacgtgtctgaagcagtaagacaaagatcagatgcattgatgctctctggagaatcagctatgggacaattcccagacaaggcgctcacggttctaaggactgtcagtttaagaatcgagagatggtggagggaagagaaacgccatgagtctgtaccgcttcaagccataggctcttcattttcagacaaaatctcagaagagatctgtaactcagctgctaaaatggctaacaatcttggagtggacgcggttttcgtttacacaacgagcggacacatggcatcactggtctcccgatgtcgcccggactgcccgatctttgctttcacaaccacaacctcagtgagaagacgcttaaacctacaatggggacttatcccattccgtctcagcttctcagacgacatggaaagcaacttgaacaaaacattctcgttactgaaatcaagaggtatgatcaaatctggtgacctcgtgatcgcagtctcggacatgctgcaatcaatccaggtaatgaacgtcccgtaattctctctctttatacaatttcgcaatcccg

SEQ ID NO: 7657 - protein, 596 aa, Arabidopsis thaliana
MSQSIQFSTPSHTPHLLHLPHSQFNRPLSSISFRRFPLTTIKYTSIRASSSSSPSPDLDSSSSSSSSQVLLSPNGTGAVKSDERSVVATAVTTDTSGIEVDTVTEAELKENGFRSTRRTKLICTIGPATCGFEQLEALAVGGMNVARLNMCHGTRDWHRGVIRSVRRLNEEKGFAVAIMMDTEGSEIHMGDLGGEASAKAEDGEVWTFTVRAFDSSRPERTISVSYDGFAEDVRVGDELLVDGGMVRFEVIEKIGPDVKCLCTDPGLLLPRANLTFWRDGSLVRERNAMLPTISSKDWLDIDFGIAEGVDFIAVSFVKSAEVINHLKSYLAARSRGGEIGVIAKIESIDSLTNLEEIILASDGAMVARGDLGAQIPLEQVPAAQQRIVQVCRALNKPVIVASQLLESMIEYPTPTRAEVADVSEAVRQRSDALMLSGESAMGQFPDKALTVLRTVSLRIERWWREEKRHESVPLQAIGSSFSDKISEEICNSAAKMANNLGVDAVFVYTTSGHMASLVSRCRPDCPIFAFTTTTSVRRRLNLQWGLIPFRLSFSDDMESNLNKTFSLLKSRGMIKSGDLVIAVSDMLQSIQVMNVP

SEQ ID NO: 7658 - DNA, 1494 bp, Arabidopsis thaliana
  CDS (1)..(1494)
atggagatgttacttggtggacaagcaaccaatggagctcttcgttcaaagacgaagatagtttgtactcttggaccagcttcaagatcggtggagatgattgagaagcttctcaaggctggtatgaacgtagcccggttcaatttctcccatggttctcactcttaccatcaagaaactctcgataatctcagaaccgccatggacaacactggtatcctctgcgccgtcatgctcgacacaaagagtcctgtgatacgaaccgggtttctcaaagaaggcaaaccgatacagctaaagcaaggtcaagagatcaccatctcaattgattacaagatacaaggagattccaacactatctccatgagctacaagaaacttgcagaggatctcaaacctggtgacgtgatcctttgttcagacggaacaatctctctaaatgtcttgtcctgtgacaagtatctcggtcttgttcgttgccgatgcgagaactctgctcttcttggagaaagaaaaaacgttaatcttcctggaattgtagttgatctcccaacactcactgagaaagataaagaagatattatgcaatggggagttccgaacaaaatcgacattatcgctctctcttttgttcgtaaaggatctgacctaatccaagtaaggaaattacttggagagcactcaaagagcatcatgcttatgtcaaaggtggagaatcaagaaggagtaatgaatttcgataagatcctggagaattctgatgctttcatggtggctagaggagatcttgggatggagataccaatcgaaaagatgtttcttgctcagaaaacaatgatcaacaaggctaatgctcatgggaaaccagtggtcacagccacacagatgcttgaatccatgacagtctctcctcgcccgactagagctgaagctaccgacgtagcaaacgcggttcttgacgggacagattgcgttatgcttagcggagaaactgctgctggagctcaccctgagactgccgtgttaacaatgtcaaggatctgcaaagaagcagaggatttcatagattacgacattctccacaagaaaaccctaggaatggtttcgttaccgttatctccaatcgagagcttagctgcttcagctgtttcgactgcgcggagtgttttcgcgtccgcgatcgttgttctcactagaggcggttacacggcggagcttgtggctaaatacaggccaagcgttccgattctgtcggtgattatgccagagattgctgaatgctcggactcggtagctcatgtggcgagacgtggtttgatttaccgtgggattattccggtggtgggatgttcagctagagattcaacggaggagatgattagattagctataggatttgccaagacgaagggaatttgtaagactggagattccattgtggctttgcacaagattgatggttcatctattgtcaggatagtgagcgtcgagtaa

SEQ ID NO: 7659 - protein, 497 aa, Arabidopsis thaliana
MEMLLGGQATNGALRSKTKIVCTLGPASRSVEMIEKLLKAGMNVARFNFSHGSHSYHQETLDNLRTAMDNTGILCAVMLDTKSPVIRTGFLKEGKPIQLKQGQEITISIDYKIQGDSNTISMSYKKLAEDLKPGDVILCSDGTISLNVLSCDKYLGLVRCRCENSALLGERKNVNLPGIVVDLPTLTEKDKEDIMQWGVPNKIDIIALSFVRKGSDLIQVRKLLGEHSKSIMLMSKVENQEGVMNFDKILENSDAFMVARGDLGMEIPIEKMFLAQKTMINKANAHGKPVVTATQMLESMTVSPRPTRAEATDVANAVLDGTDCVMLSGETAAGAHPETAVLTMSRICKEAEDFIDYDILHKKTLGMVSLPLSPIESLAASAVSTARSVFASAIVVLTRGGYTAELVAKYRPSVPILSVIMPEIAECSDSVAHVARRGLIYRGIIPVVGCSARDSTEEMIRLAIGFAKTKGICKTGDSIVALHKIDGSSIVRIVSVE

SEQ ID NO: 7660 - DNA, 1920 bp, Lilium longiflorum
  CDS (145)..(1677)
cgcggggctggtcaattcttccctcaaacaagtgctcattccaccatcctcctcctcccccactgttttctcactgcgttcccaaaccaacagctccccctctcccccagatctagggttagggtttcagttccccatctcgccatggcgaacatcgacatcgagggcatcctgaaggagctcccggccgacggccgcgtcccgaagacgaaattggtctgcaccctcgggccgtcgtccagatccgtgccgatgctcgagaagctgctgcgcgccggcatgaacacggccagattcaacttctcccacggcacgcacgagtatcaccaggagacgctcgataacctccggatcgcaatgcagaacacgcagattctctgcgccgtcgtgctcgataccaagggtcctgagattcgcactgggtttctgaaggatggaaaggccgtccaaccaaaggagggtcaagaaatcatagtgagcactgattacgatctcaaaggcggcgggaatacaattactatgagttacaagaaacttcctgtggatatgaaacctggaggcacaatcctgtgtgcagatggcagcattagcttaactgtcctatcatgtgacccagatgccggaactgtgagatgccgctgtgagaatactgcacttttaggtgagagaaagaatgtcaatctgccaggtgttgttgtggatctccccacactgacagagaaggacaaggaagacattttggaatggggtgttcccaacaacattgatatgattgctctgtccttcgtgcgcaagggctccgatcttgtcaatgtccgacaggttcttggatctcatgcaaaaaacataaagttgatgtcaaaggttgagaaccaagagggtgtcgtaaacttcgatgaaatcttaaaagagacagatgccttcatggttgcccgtggtgatctgggcatggaaattcccgttgagaagatcttccttgctcagaagctgatgatatacatatgcaaccttgcgggcaagcctgttgtcactgccacccagatgcttgagtctatgataaaatcccctcgcccgacacgtgctgaagccactgatgtcgccaatgccgtcctcgatggcaccgactgcgtcatgcttagtggcgaaagtgcggcgggagcctatctagagatagccgtgaaggtcatggccaagatatgtatcgaggcagagtcatcccttgattatgatgccatcttcaaggagatgataaggtctgcgcctctccccatgagcccactggagagtcttgcgtcctcggctgtccgtactgcgaacaaggccaaggcggctctgattgttgtattgacccgtggtgggactacagccaagctggtagcgaagtaccgcccggcagtgccaatcctgtctgtggtggtgccagtgctgacaagcgattcgttcgactggaatgttagtgacgagtcaccagcaaggcatagcctcatctacagaggcctcatcccgctgctagcggagggttctgcgaaggcgactgatgccgagtcgacagaggtgatcctggaggctgcactcaagtcagcgacggcaaggaggctgtgcaaacctggtgactctattgttgcgctgcatcgcattggtgttgcttctgtcattaaaatttgcatagtgaaatgattaatgaatgagacccggcgactgtctgtcgagttactgctatttttatgaacgaaactcagttgttttgttatgcataaacagttatgacaaactcagtttgtaggtatgcaagttgtatacataaccagttgggtattggagaggggactccatattcttgtaaagcccgctgatgaagatttgtaccgattctggtattaaggttgattaaattctgtggttcttctagccaaaaaaaaa

SEQ ID NO: 7661 - protein, 510 aa, Lilium longiflorum
MANIDIEGILKELPADGRVPKTKLVCTLGPSSRSVPMLEKLLRAGMNTARFNFSHGTHEYHQETLDNLRIAMQNTQILCAVVLDTKGPEIRTGFLKDGKAVQPKEGQEIIVSTDYDLKGGGNTITMSYKKLPVDMKPGGTILCADGSISLTVLSCDPDAGTVRCRCENTALLGERKNVNLPGVVVDLPTLTEKDKEDILEWGVPNNIDMIALSFVRKGSDLVNVRQVLGSHAKNIKLMSKVENQEGVVNFDEILKETDAFMVARGDLGMEIPVEKIFLAQKLMIYICNLAGKPVVTATQMLESMIKSPRPTRAEATDVANAVLDGTDCVMLSGESAAGAYLEIAVKVMAKICIEAESSLDYDAIFKEMIRSAPLPMSPLESLASSAVRTANKAKAALIVVLTRGGTTAKLVAKYRPAVPILSVVVPVLTSDSFDWNVSDESPARHSLIYRGLIPLLAEGSAKATDAESTEVILEAALKSATARRLCKPGDSIVALHRIGVASVIKICIVK

SEQ ID NO: 7662 - DNA, 1413 bp, Vibrio marinus
  CDS (1)..(1413)
atgaaaaagactaaaattgtttgtacaattggtccaaaaactgaatcagtagagaaactaacagagcttgttaatgcaggcatgaacgttatgcgtttaaatttctctcatggtaactttgctgaacattcagtgcgtattcaaaatatccgtcaagtaagtgaaaacctgaataagaaaattgctgttttactggatactaaaggtccagaaatccgtacgattaaactagaaaacggtgacgatgtaatgttgaccgctggtcagtcattcacgtttacaacagacattaacgtggtaggtaataaagactgtgttgctgtaacatatgctggttttgctaaagaccttaatcctggtgcaatcatccttgttgatgatggtttaattgaaatggaagttgttgcaacaactgacactgaagttaaatgtacagtattaaatactggtgcacttggtgaaaataaaggcgttaacttacctaacatcagtgtaggtctacctgcattgtcagaaaaagataaagctgatttagcgtttggttgtgagcaagaagttgattttgttgctgcatcatttattcgtaaggctgatgatgtaagagaaattcgtgaaatcctatttaataatggtggcgaaaacattcagattatctcgaaaattgaaaaccaagaaggtgtagacaatttcgatgaaatcttagctgaatcagacggtatcatggttgctcgtggcgatctcggtgttgagatcccagttgaagaagtgatcatggcacagaagatgatgatcaaaaaatgtaataaagcaggtaaagttgtaattactgcaacacaaatgcttgattcaatgatcagtaacccacgtccaacacgtgcagaagcgggcgatgttgccaatgctgtgcttgacggtaccgacgcggtaatgctttctggtgaaactgcgaaaggtaaatacccagttgaagctgtgtctatcatggcaaacatctgtgaacgtactgataactcaatgtcttcggatttaggtgcgaacattgttgctaaaagcatgcgcattacagaagctgtgtgtaaaggtgcggtagaaacaacagaaaaattgtgtgctccacttattgttgttgcaactcgtggcggtaaatcagcaaaatctgttcgtaaatacttcccgaaagcaaatattcttgctatcacaacaaatgaaaaagcagcgcaacagttatgcctaactaaaggcgtaagcagctgcatcgttgagcagattgatagcactgatgagttctaccgtaaaggtaaagagcttgcattagcaactggtttagctaaagaaggcgatatcgttgttatggtatcaggtgcgttagtaccatcaggtacaacgaatacggcatctgttcaccaactttaa

SEQ ID NO: 7663 - protein, 470 aa, Vibrio marinus
MKKTKIVCTIGPKTESVEKLTELVNAGMNVMRLNFSHGNFAEHSVRIQNIRQVSENLNKKIAVLLDTKGPEIRTIKLENGDDVMLTAGQSFTFTTDINVVGNKDCVAVTYAGFAKDLNPGAIILVDDGLIEMEVVATTDTEVKCTVLNTGALGENKGVNLPNISVGLPALSEKDKADLAFGCEQEVDFVAASFIRKADDVREIREILFNNGGENIQIISKIENQEGVDNFDEILAESDGIMVARGDLGVEIPVEEVIMAQKMMIKKCNKAGKVVITATQMLDSMISNPRPTRAEAGDVANAVLDGTDAVMLSGETAKGKYPVEAVSIMANICERTDNSMSSDLGANIVAKSMRITEAVCKGAVETTEKLCAPLIVVATRGGKSAKSVRKYFPKANILAITTNEKAAQQLCLTKGVSSCIVEQIDSTDEFYRKGKELALATGLAKEGDIVVMVSGALVPSGTTNTASVHQL

SEQ ID NO: 7664 - DNA, 1979 bp, Oryza sativa
  CDS (224)..(1747)
gatccgcatctccccacccattggttccctttccaatttcacctcgcccaaccctatttatttatttatttaacccttcccccatctcgcctccattcttggagaccaagaagaagaaagaggaaaccacacccacctccatctccgcctccgccgccgccgccgccgaccaagtcgagggggagatccagcgagagcgaggaggaggaggaggatggcggtgatggaggagcagcaggagggagccgcgggggtgatgcggcggaggcccaagacgaagatcgtgtgcacgctggggccggcgtcgaggtcggtggagatgatcgggcggctgctccgcgccgggatgtgcgtcgcgcgcttcaacttctcccacggatcccacgagtaccaccaggagacgctcgacaacctccgcgccgccatggagagcaccggcatcctctgcgccgtcatgctcgacaccaaggggccagagatccgaactggatttctgaaagatggaaaacccgtacagttgaagaagggtcaagaaatcacagtttcaactgattatagcataaagggtgatgacaacatgatatcaatgagctacaagaagctagcggtggatctgaagccaggcagtgtaatattatgtgctgatggcaccatcactcttactgtccttcactgtgataaagagcaaggcttggttcgctgccgttgtgagaacactgctatgcttggtgagaggaagaatgttaaccttccaggagttattgttgatctcccgacacttactgagaaggacaaggaggatattcttaaatggggtgtcccaaacaagattgacatgattgctctgtcttttgttcgtaaaggctcagaccttgtagaggtcaggaaggtgcttgggaagcatgcaaagtcaataatgctgatgtcaaaggttgagaatcaagagggagtggctaactttgatgatatcctggcacaatctgatgcttttatggttgcaaggggtgatttgggaatggaaattccgatagagaagatcttttatgcacagaaggtgatgattttcaagtgcaatattcagggcaagccagttgtgactgcaacccagatgttggaatctatgatcaagtctccccgccctactagagcagaagcgactgatgttgccaatgcagttcttgatggcactgactgtgtcatgctcagtggtgagacagctgctggggcttacccggaactggctgtacggaccatggccaagatctgcctgcaagcggagtcatgcgtcgaccatgccgctgttttcaagtccattaccgcatcagctccaattcccatgagcccattggagagccttgcatcatcagctgtgcgtacagcgaactctgccaaggcggcgctcatcttggtcctgactaggggaggaacaactgctaggctggtggccaagtacaggccatccatgccgattctgtccgtcgtggttcctgagctgaaacagaccgactccttcgactggacctgcagcgacgaagctcctgcgcggcacagcctcatcgtcaggggagtgatcccgatgctgagtgcagccactgccaaggccttcgacaacgaagccactgaagaagctctcgggttcgccatcagcaacgccaaggcgatggggctctgcaactccggtgagtccgtcgtcgccctccaccggatcggaactgcatctgtcatcaagctcctgacagcgaactagtggcagacggcagttaatccacaccattttgctcggaggaaaatttttgctgggggattcttacttaccacgcatatctatagcttttgttgccatgatagtggcatttgcattcaggtgcaccttcggtgtttgctgttcatgggttaaccattgaaacagttaaattcgttattgctaccgcagcttatttcgctgcctctgctgctactagtattaaacttgacagccg

SEQ ID NO: 7665 - protein, 507 aa, Oryza sativa
MEEQQEGAAGVMRRRPKTKIVCTLGPASRSVEMIGRLLRAGMCVARFNFSHGSHEYHQETLDNLRAAMESTGILCAVMLDTKGPEIRTGFLKDGKPVQLKKGQEITVSTDYSIKGDDNMISMSYKKLAVDLKPGSVILCADGTITLTVLHCDKEQGLVRCRCENTAMLGERKNVNLPGVIVDLPTLTEKDKEDILKWGVPNKIDMIALSFVRKGSDLVEVRKVLGKHAKSIMLMSKVENQEGVANFDDILAQSDAFMVARGDLGMEIPIEKIFYAQKVMIFKCNIQGKPVVTATQMLESMIKSPRPTRAEATDVANAVLDGTDCVMLSGETAAGAYPELAVRTMAKICLQAESCVDHAAVFKSITASAPIPMSPLESLASSAVRTANSAKAALILVLTRGGTTARLVAKYRPSMPILSVVVPELKQTDSFDWTCSDEAPARHSLIVRGVIPMLSAATAKAFDNEATEEALGFAISNAKAMGLCNSGESVVALHRIGTASVIKLLTAN

SEQ ID NO: 7666 - DNA, 1533 bp, Arabidopsis thaliana
  CDS (1)..(1533)
atggagaagttacttgctggacaaacaaacaatggatccctcaagtcaaagacgaagatcgtctgtactctcggaccggcttcgagatcggttgagatggttgagaagcttctcaaagccggtatgaacgtagcccggttcaacttctcccatggttctcactcataccatcaagaaactcttgacaatctcagaaccgccatggagaacacttgtattccctgtgccgtcatgctcgacaccaagggtcctgagatccgaaccgggtttctcaaagaaggcaaaccggttgagctaattcaaggtcaagagattacaatctcaactgattacaccatggaaggagattcaaacacaatctcaatgagttacaagaaacttgctgaagatctcaagtccggtgacgtgattctctgttccgacggtacaatctctcttaccgtcttgtcttgtgacaagaatctcggtcttgttcgtgcccgttgcgagaactctgcagttcttggagaaagaaagaacgtgaacctccctggaatcgtagttgatcttccaacactcacagagaaggatcaagaggatattctccaatggggagttccgaataagatcgatatcatcgctctttcctttgttcgtaaaggatctgatctggtcgaggtcaggaagttgcttggagagaacgcaaagagtatcatgctcatgtcaaaggtggagaatcaagaaggagtgatgaattttgacaagattctggaatattctgatgcattcatggtggctagaggtgatttaggaatggagattccgattgaaaagatgtttcttgctcagaagatgatgattcagaaggctaatgctcttgggaagccaatcgtcacagccacacagatgcttgagtcaatgaccaaatctcctcgtccaactagagcagaagccaccgatgtagctaacgctgtccttgacggcactgattgcgtcatgctcagtggagaaaccgccgccggagctcaccctgaaaccgccgtgctaacaatgtcaagaatctgtaaggaagcagaggatttcatcgattacgacacaatgcacaagaagattcaagatatcgtttcgttgcctttatctcctattgagagcttggccgcttcagccgtttcgacggcgaggagtctttgtgcggctgcgattgtcgttctaaccaagggaggttacacggtggagcttgtggccaagtacaggcctagtgttccgattctgtccgtaattgtgccggagattactcgtacggatgatttcgagtggtcgtgctctgaatctgcggctcatgtggcaagacgtggtttgatctaccgtggaattgttcctgtgatggcgacgggagcatccgctaggtcttcgaacaaggactcgacggaggagacgattcaattcgccattgaattcgcgaagaagaagggaatatgtaagacaggagactcgattgtggcgttgcacaagatcgatggctcctctgttgtcaagattttgaacgtggagtag

SEQ ID NO: 7667 - protein, 510 aa, Arabidopsis thaliana
MEKLLAGQTNNGSLKSKTKIVCTLGPASRSVEMVEKLLKAGMNVARFNFSHGSHSYHQETLDNLRTAMENTCIPCAVMLDTKGPEIRTGFLKEGKPVELIQGQEITISTDYTMEGDSNTISMSYKKLAEDLKSGDVILCSDGTISLTVLSCDKNLGLVRARCENSAVLGERKNVNLPGIVVDLPTLTEKDQEDILQWGVPNKIDIIALSFVRKGSDLVEVRKLLGENAKSIMLMSKVENQEGVMNFDKILEYSDAFMVARGDLGMEIPIEKMFLAQKMMIQKANALGKPIVTATQMLESMTKSPRPTRAEATDVANAVLDGTDCVMLSGETAAGAHPETAVLTMSRICKEAEDFIDYDTMHKKIQDIVSLPLSPIESLAASAVSTARSLCAAAIVVLTKGGYTVELVAKYRPSVPILSVIVPEITRTDDFEWSCSESAAHVARRGLIYRGIVPVMATGASARSSNKDSTEETIQFAIEFAKKKGICKTGDSIVALHKIDGSSVVKILNVE

SEQ ID NO: 7668 - DNA, 2235 bp, Drosophila melanogaster
  CDS (1)..(2235)
atgcgggtcgtgcgtatgaacttctctcacggctctcacgagtatcactgccagacaatacaggcggctcgtaaggccatcgccatgtacgtggagcaaacgggtctgcccagaacattggcaattgctctggacaccaagggtccagagatccggacgggcaaactggccggtggcaatgatagggctgagatagagctcaagaccggagacaaagtgacattgagcaccaagaaggagatggcagacaagagtaacaaggataatatctatgtggattatcagaggctacctcaactggtcaaaccaggaaatcgggtatttgtagacgacggattgattgcattgatcgtgaaggaatcaaagggagatgaagtgatctgtcaggtggagaacggtggcaagctgggctcccacaagggaatcaatttgccaggagttccggtagatcttcccagcgtaacggagaaggataagcaggatcttaaatttggggccgagcaaaaggtggacatgatcttcgcatcgttcatacgagacgcaaatgctctgaaggaaatccgccaagtacttggaccggctggagcgtgtataaagatcatctctaagattgaaaaccaccaaggtctggtaaacatagacgacattatccgtgaatcagatggcataatggtggcccgaggtgatatgggcattgagatacccacggaggatgttcccctagcccagaaatcgattgtggctaagtgcaacaaggtgggcaagcctgtgatctgtgccacccagatgatggagtcgatgacgaacaagccgcgacccactcgtgccgaagcctcggatgtggccaacgctattttcgatggctgcgatgccgtaatgctgtccggtgaaacggccaagggcaagtatccggtggagtgcgtccagtgcatggccaggatctgtgccaaagtagaagcagttctatggtacgaaagcctgcagaacagccttaaaagggaaatccggaccagtgctgccgaccacatttcggcagttaccacggcgatcgcggaggcggccacggtgggccaagcccgggcaattgtggtggccagtccgtgctccatggtggcccaaatggtcagtcacatgaggccgccatgtccaattgtcatgctcacgggtaacgaatccgaggcggcccagtctctgctctttcgcggcatctacccactcctcgttgaggaaatggttattggcagctttaactttcgacgcatcatgcagtcgggcctgaagctgatgggcaagatggacatcttggagccgggtcagaaaggatcggtggtgctggttaatgccatgtcggcagaaaagatcaccttccggctgttcactatccgtcagcagaccaaggaagaacgcgatcaggatgagcgatgccgaaaattggccctagagcagagctgcaaggagagggctgaaaaggaggaatgcagaaagctccagcaagcggaagaatgtcagaagcaaaaactggccaaaaaatgtaaacagttcgaagagaagcaaaaggtctgccccaaaaagaatgatactccgaagaatgattgtccgaagaaagattgtccgaagaaagaatgtcccaagcaagatgacgaaatctcaaagtgcaggcaaatgcaagaagcggaagctgaagaaaggaagtgcaaagaagagtttgaacagatgtgcaaattagctgaagaaaaaaggaaagaagctgaaaaatgcaggaaagcggacgaagaacgaaggaaagaggaagctgaaaagtgcaggaaattggaagaagataggaaatgcaaattggctgaagagaagaaaaggaatgaagaagaacttaagataatagaagcagaagtggccaaactggaagctgctgagaaggccaagcgtttgaaggaggaagagaaaaagaaggaagaactaatgaagtgcaagcaacgaaatgaagcgaaaaaaaagagggaagaggctgaaaggtgcaagagaaaggaaagagaaagggagctagctgaaatggaaaacaaatggaaacaggttgcggagaaaagaaagagaaagaaggcagcagagatgtgcaggaaaatagaggatgcaaaagaaaaagccgcggcagaatcggctgataagattctgaaagctgtgtgcgaaaaactaaagcaatctctctcggatccggacaaatcaaaaaagggcaagaaataa

SEQ ID NO: 7669 - protein, 744 aa, Drosophila melanogaster
MRVVRMNFSHGSHEYHCQTIQAARKAIAMYVEQTGLPRTLAIALDTKGPEIRTGKLAGGNDRAEIELKTGDKVTLSTKKEMADKSNKDNIYVDYQRLPQLVKPGNRVFVDDGLIALIVKESKGDEVICQVENGGKLGSHKGINLPGVPVDLPSVTEKDKQDLKFGAEQKVDMIFASFIRDANALKEIRQVLGPAGACIKIISKIENHQGLVNIDDIIRESDGIMVARGDMGIEIPTEDVPLAQKSIVAKCNKVGKPVICATQMMESMTNKPRPTRAEASDVANAIFDGCDAVMLSGETAKGKYPVECVQCMARICAKVEAVLWYESLQNSLKREIRTSAADHISAVTTAIAEAATVGQARAIVVASPCSMVAQMVSHMRPPCPIVMLTGNESEAAQSLLFRGIYPLLVEEMVIGSFNFRRIMQSGLKLMGKMDILEPGQKGSVVLVNAMSAEKITFRLFTIRQQTKEERDQDERCRKLALEQSCKERAEKEECRKLQQAEECQKQKLAKKCKQFEEKQKVCPKKNDTPKNDCPKKDCPKKECPKQDDEISKCRQMQEAEAEERKCKEEFEQMCKLAEEKRKEAEKCRKADEERRKEEAEKCRKLEEDRKCKLAEEKKRNEEELKIIEAEVAKLEAAEKAKRLKEEEKKKEELMKCKQRNEAKKKREEAERCKRKERERELAEMENKWKQVAEKRKRKKAAEMCRKIEDAKEKAAAESADKILKAVCEKLKQSLSDPDKSKKGKK

SEQ ID NO: 7670 - DNA, 3033 bp, Drosophila melanogaster
  CDS (1)..(3033)
atgctacctacgggaaacagctttccgaagaataatgggaaaataatgcctctaattatcattaataaatcgagagacaagtcaacaaacccggccgtcgagtcaacaacttggttgcgcttcaaggcagccaaggaaaaacgtttccttttggccaatggattggatgacggccaaacaatgcgtccagtttggacaaacatttgcagcagcaaacccatttcatgcccattcccaacttcccacgttgcacggcagcctcaaaattcagatttttttattaaattttacatatatttggtctgcattactcaaattattttttttttcaaaattcgaaaatacgccggaaatctttgtcagagggcaagcctctgcgttgtgtcaccatgtcccaattttccattgagccttagatttcgctgctatgccgacaaatgcaaaagaaaaatggaacccaagaagtttcggctagaccgtggaccctacctttcccagctggactaccaatctcgtctgcagttccaagcaccagctctgaggttaccccttaccagcattatatgcaccattggaccctcatccagccagcccgaggttcttcttaatctcattcacgctgggatgaaggtggtccgattggacttctccgacggcacccacgattgccattgccaggctatccaggcggctcgtaaagccatcgccatgtatgcggaggaaacgggtcttcccaggagcttggccattgccctggacaccaagggtccggtaatcaatccacagggtgtagctgctgatttaaacgccataaccgaacaagacaaactggatctcaagtttggagcggatcaaaaggttgacatgatcttcgcatcgttcatccgcgatgccaaagctttgaaagaaattcgccaggcactgggtgcctgtccatcaagtgagcacataaagatcatttccaagatcgaaagtcaacaggctctggcgaacatagatgagataatccgcgaatccgatggcataatggtggcccttgggaatatgggcaacgaaatagcactggaggctgtaccgctggcccagaaatcgattgtggccaagtgcaacaaggttggaaagcctgtgatctgtgccaatcaaatgatgaattcgatgataaccaagccacgtcccactcgcgccgaatcctctgatgtggcaaacgcaatcttggatggttgtgatgcccttgtgttgtcagatgaaacggccaagggtaagtacccggtgcaatgtgtgcagtgcatggccagaatatgcgccaaagtcgagtcggttttatggtacgagagcattcagaacaacctcaagagcgaagtccggatcaacgccgccgatcacatctcggcggtaagcacggcaattgcagaagcggcaacggtgagtcaggctcaggcaatagtggtggccagtccgtgctccattgtgtcccagatggtcagtcaaatgaggccgccgtgtcctatcgtgttgctcacaggctgcccacatgaggccgctcaatccttgctttttcgtggcgtttatccactccttgtcaaggaaatggtttatggcagcgtaaactactgtcgcatcatgcaatcgggcttaaagatattggccaagttggacatcctgaaggcaggccaaaggggaactttggtgctggtcaatgccatgtcggcagacaagctcaccttcaggctgttcacttttgcacagccaactgaggcagagcgagaagaagaacgctgccgaaagttggccaggaagcagcgatgcaaggaaatgtctgtaaataaatcctgtccaaatccaaagagcagtaagtctgaaatatctataaagtccgatgaaaaagatggtaccagttcaaagaaagaatttcctaaggacgaagaagtttcgaaatgtttacaactagaaaatgaaattcagcagaaacggggtgaagattctgtaatgaacaaagaaaatgaaaatctctgccacaacgtggcattgaagtgcttacatttgaagaatgaaagacaagctcaatcggaagctatgatgaaacagacggaaaaacttaaaaaagcggaagatcctagaaaaaacaatgggacccttaaggatagttttaaccgtaagaaaaaagacgataaaacctcgaagtccgataaaaaggatggttccagctcaaagaaagatcgtcctaaccacaaggaagtctggaaatgtttacagcggagtcaagatttggtaatggcagaagaaaatgaatatctctgttcaaaaaaatcaaaagaatgtcccaataaggacgacgaggccttgaagtgcttacagctgaaaaaacaaagacaagctcgagcggaagctgagatgaaaaagaaggcagaactaaaaaaaaataatagtttaagccataagaaagaagacgataaagcaccaaactgcaacaaacttaaaaaacaaggcccaaagaagaataagtgcagagtagtcaaaatttcgaggacatccgaaaaggataattatattccgaagaaagaatatcctaggatcttcaatatagaaaaggctcagccaaaaactgtggtcaaacacagtaaagagttggcaaagtcctgcgatattgtactcgaaaactgcaagaccgtaaaacgcaaaaactgcaagactgtaaaattagaaaaatgtaagacagtaaaacttgaaaactgcaaaataacaaaacttaagaagtgcaaaacgatcaagctcgaaaattgtaagcagccgcgaagagttaggcaaagaactaatcttactaaaaaggcatacactttcagtactagagatacgaggaaaaaaataattccaccaaagcgttatcgcgttgtacgcggctctgcaattgttaaacaactaaaggaaaataaagccagcgagagtccaacagctgcgagcagattgtcgagtttcgctgaatgcgatagatttagcgagagagaaaagatacatttacggagagcgaatcgctga

SEQ ID NO: 7671 - protein, 1010 aa, Drosophila melanogaster
MLPTGNSFPKNNGKIMPLIIINKSRDKSTNPAVESTTWLRFKAAKEKRFLLANGLDDGQTMRPVWTNICSSKPISCPFPTSHVARQPQNSDFFIKFYIYLVCITQIIFFFKIRKYAGNLCQRASLCVVSPCPNFPLSLRFRCYADKCKRKMEPKKFRLDRGPYLSQLDYQSRLQFQAPALRLPLTSIICTIGPSSSQPEVLLNLIHAGMKVVRLDFSDGTHDCHCQAIQAARKAIAMYAEETGLPRSLAIALDTKGPVINPQGVAADLNAITEQDKLDLKFGADQKVDMIFASFIRDAKALKEIRQALGACPSSEHIKIISKIESQQALANIDEIIRESDGIMVALGNMGNEIALEAVPLAQKSIVAKCNKVGKPVICANQMMNSMITKPRPTRAESSDVANAILDGCDALVLSDETAKGKYPVQCVQCMARICAKVESVLWYESIQNNLKSEVRINAADHISAVSTAIAEAATVSQAQAIVVASPCSIVSQMVSQMRPPCPIVLLTGCPHEAAQSLLFRGVYPLLVKEMVYGSVNYCRIMQSGLKILAKLDILKAGQRGTLVLVNAMSADKLTFRLFTFAQPTEAEREEERCRKLARKQRCKEMSVNKSCPNPKSSKSEISIKSDEKDGTSSKKEFPKDEEVSKCLQLENEIQQKRGEDSVMNKENENLCHNVALKCLHLKNERQAQSEAMMKQTEKLKKAEDPRKNNGTLKDSFNRKKKDDKTSKSDKKDGSSSKKDRPNHKEVWKCLQRSQDLVMAEENEYLCSKKSKECPNKDDEALKCLQLKKQRQARAEAEMKKKAELKKNNSLSHKKEDDKAPNCNKLKKQGPKKNKCRVVKISRTSEKDNYIPKKEYPRIFNIEKAQPKTVVKHSKELAKSCDIVLENCKTVKRKNCKTVKLEKCKTVKLENCKITKLKKCKTIKLENCKQPRRVRQRTNLTKKAYTFSTRDTRKKIIPPKRYRVVRGSAIVKQLKENKASESPTAASRLSSFAECDRFSEREKIHLRRANR

SEQ ID NO: 7672 - DNA, 1814 bp, Drosophila melanogaster
  CDS (83)..(1747)
ttttttataactgcagagtgattgattttaatggtagttgcccaaaattttaagttattcctcttatccaaaatttacaaccatgtcgttgtccgcgaaatccgtgctaaaggagggctccacacagctgagccacatctgcgagctggatcttgcccagcaggcgtcccaccagcgcctcgtttccctgatcgcaaccatatcggtcagttcccggaacgcggacaccatatacaccatgataatgcgcggagtgaacatattccgtctgaacttctcccacgaatcgcacgagatgcactcgaaaacgatcgagctgatcaacgaggcgctggagaggattcataaggagacgggccaaatccgaacggtcgccattgcggcggacacgcgtggaccccagattcgtactggcctactggatggagatgtgttcctgcgcagcggcgacaatctgcgtctctcgatcaatcgggatctttacgacaagggcaacaaggaggcggtctacgtggactacccgaacatcatcaacctgaccaagaccggcgatcgcctgttcatcgacgacggcaggctgctgctccacatcttggaagtgggagtggatggtctgctgtgcgaggtcatccatggcggccagctgaacaacaactgcaacgtgatcctgccggagatcgagatcgatttgcccgccgtctccgagaaggatatgtttgacatccagttcagcataaaggccaacgtggacttcctcttcgcctccgccgtgcgcagtgccaagaacgtcaaggagctgcgaacggtgctcggcgagaagggcaagcacatcaagatcatcgccaagatggacagcaagatagctctgagcaggttctcggagattctgcgtgcggcggatggattgctgctttcgcgagcggatctgggcacccagatacccattgaaaagctcttcatcacccagaagagcatactgggccaatgcaacaaggtgggcaagccggtcatagtggcctcccacatcctcgagtccatgcgcaccctgccccatcccacacgggccgagtgcttcgatttggccaacgccatcatcgatggagcagactgcatcatgctgtcgtcggaagtggccattgggtcgtttcccaaggagacggtggccacctgcgacacattgtgccgggaggccgagaaggtgctctggtttcgagacctcttctccgacctggtcagcgaggtgcgtggcgagctggacgcggcacactcgctggccattgcagccgtggagacggccaagcgcaccaatgccaccctgatcatcgtgctgaccacctcgggccgctcggccactctggtcagcaagttccgaccccgctgtcccatcatggctatcacgcgctgcgaacggaccgcccgctgggtctatctgcatcgcggagtcctgccgatactgtacaccttggagcccagcacggactacgccaccgatgtggacgctcgggtgcagttcgccatgacctctgccaagaagtggggcatcatcgacgacggcgatcccattgtgatagtgagtgcctggaaggatggcggcgggttcaccaacaatgtccgtgtggtctacgctttcttcgaggcggatcgcgtggactgcctgttccggtcggacaggcggcattctcgaaagaacaccaacctgcagatggcaaatcgggagcctgctgataagaaaagtggtaatgcgtagctgagcccggagaaatggaacttggttgcctcaaatgtaatcatcaaataaattattttggaagatc

SEQ ID NO: 7673 - protein, 554 aa, Drosophila melanogaster
MSLSAKSVLKEGSTQLSHICELDLAQQASHQRLVSLIATISVSSRNADTIYTMIMRGVNIFRLNFSHESHEMHSKTIELINEALERIHKETGQIRTVAIAADTRGPQIRTGLLDGDVFLRSGDNLRLSINRDLYDKGNKEAVYVDYPNIINLTKTGDRLFIDDGRLLLHILEVGVDGLLCEVIHGGQLNNNCNVILPEIEIDLPAVSEKDMFDIQFSIKANVDFLFASAVRSAKNVKELRTVLGEKGKHIKIIAKMDSKIALSRFSEILRAADGLLLSRADLGTQIPIEKLFITQKSILGQCNKVGKPVIVASHILESMRTLPHPTRAECFDLANAIIDGADCIMLSSEVAIGSFPKETVATCDTLCREAEKVLWFRDLFSDLVSEVRGELDAAHSLAIAAVETAKRTNATLIIVLTTSGRSATLVSKFRPRCPIMAITRCERTARWVYLHRGVLPILYTLEPSTDYATDVDARVQFAMTSAKKWGIIDDGDPIVIVSAWKDGGGFTNNVRVVYAFFEADRVDCLFRSDRRHSRKNTNLQMANREPADKKSGNA

SEQ ID NO: 7674 - DNA, 1425 bp, Agrobacterium vitis
  CDS (1)..(1425)
atgttcattcgcagcaaccgccgcgccaagatcgtcgcaacagtcggccctgcctcaagttcaccggcaatactgaggtcgctgttcctggcaggcgtcgatacgttccggctcaatttcagccatggaagccgcgacgaccatgccgccgcctaccgccacatccgcgcgctggaaaaggagctgggaacctcgatcggcatccttcaggacctgcagggcccgaagatccgcatcggcgtgcttcacgaaggccggctgcagctgacgaaggacgcggaaatccgcttcgtgtgcgggaccgaaccagggcgcgggctgatggacattccccttccccatcgcgagatcttcgcggcagtcaagccgggcgacgatctgctgatcgacgatggacgggtgcgagtgcgggcgctgggcgtcagcgacgaattcatcgatgcaaaagtcatcgtcgctggaccgatatccaaccgcaagggtgtcaacctgccgggaaccgtcctcgatatttcccctctcaccccgaaggatcgcaaggatctcgaattcgggctggaactcggcgtcgactggatcgccctatcattcgtgcagactgcccgcgacatgatcgaagcccgatcgctggtcagcgacagggccgggctgatcgccaagatcgaaaaaccctcggcactggacgagatcgacgacatcgtagcgctttccgacgccatcatggtggcgcgcggcgatcttggtgtggaaatcccgcccgaggatgtgccgggccgtcagaaggaactcatccgcgcctgccgtatcgccgccaaaccggtgatcgtcgccacgcagatgctcgactcgatggtgacctcgccgacgccgacgcgcgcagaagcctcggacgtggcgggagcgatctatgacggcgccgacgccgtgatgctctcggcggagtctgcaacgggcgccttcccggtcgaaacggtggagatcatgagccgtatcatcgaaaagaccgaaaaacataaattctaccggccgatcctcgaagcgaccgaaccacagattgcccatacccctccgcacgcagtcgccaccgccgcggcagatgtcgcccttgccctgaaggcccctgttatcgtcgcgtttacggtcagcggcacgaccgcttccagaatcagccgggcacggccaccgctcccgatcctcgccctgacgccatccgaacagaccgcgcgtcagctcggactgatgtggggcgtcgtcagcctgctttcgccgacagtcgacacctatgaacaatccgtcgatcgcgccacccaggccgccgtacaaaccggcctggcggagaaaagcgatcagatcgtcgtggtgacgggatttccctttgcgaccgcgggcagcaccaacaaccttcgcgtcacccaggcgggttga

SEQ ID NO: 7675 - protein, 474 aa, Agrobacterium vitis
MFIRSNRRAKIVATVGPASSSPAILRSLFLAGVDTFRLNFSHGSRDDHAAAYRHIRALEKELGTSIGILQDLQGPKIRIGVLHEGRLQLTKDAEIRFVCGTEPGRGLMDIPLPHREIFAAVKPGDDLLIDDGRVRVRALGVSDEFIDAKVIVAGPISNRKGVNLPGTVLDISPLTPKDRKDLEFGLELGVDWIALSFVQTARDMIEARSLVSDRAGLIAKIEKPSALDEIDDIVALSDAIMVARGDLGVEIPPEDVPGRQKELIRACRIAAKPVIVATQMLDSMVTSPTPTRAEASDVAGAIYDGADAVMLSAESATGAFPVETVEIMSRIIEKTEKHKFYRPILEATEPQIAHTPPHAVATAAADVALALKAPVIVAFTVSGTTASRISRARPPLPILALTPSEQTARQLGLMWGVVSLLSPTVDTYEQSVDRATQAAVQTGLAEKSDQIVVVTGFPFATAGSTNNLRVTQAG

SEQ ID NO: 7676 - DNA, 1449 bp, Agrobacterium vitis
  CDS (1)..(1449)
atgttcatacgcaacaaccggcgatcaaagatcgtcgcgacggtcggaccggcgtcaagttcgcccgacatgcttcgctcactgtttctcgccggtgtcgatacgttccgcctgaatttcagccatggtgcccgggccgatcacgcggaagtctataggaacatccgggctctcgagcaggagcatgatgctgctatcgccgtgctgcaggatcttcagggtccgaagatccggatcggagttctggcacatggcaggctcgatctcgcacgtggatccaccatcggatttatccttggccgtgagggtggtgaaggaatgaacgatattccgctacctcatcgggaaatcttcgaggtggcggtgcccggaatggacctcctgatcgacgacggtagaataaaagtccggatcatggaggtgatggacgggcggcttgtttgcgaggtcctcaatggaggcgccttgtcgaaccgcaagggtgtcaacgtgcccggcgctgtcctggacatttccccgctcacggcgaaagatcgtgaggacctggaattcgggctcgagcttggcgtcgactgggtcgcactttctttcgttcagcgggcacgcgacatgatcgaagcccggtccctcgttggagacagggctggcctcattgccaagatcgagaagccgtctgccctcgatgacatcgaggatattgtcaggctttcggacagcgtcatggttgcgcgaggtgatctcggcgtggagatcccgccggaggacgttccgggcaagcagaaggaaatcatccgtgcatgccggctagcggccaagcccgtgattgtcgccacacagatgctcgactcgatggtgagttcgccaacgccgacgcgcgctgaagcttcggacgttgccggtgccatctatgatggggcagatgccgtcatgctttccgccgagaccgcaacaggcgcctacccggtggaggcggtcgaaattatgaaccggatcatcgagaagacggagaagcacaagcactaccggccgatccttgaggcaacggaacccgatgtcgctcaatcaccgccgcatgcagttgccactgcagcagccaacgttgccgtggctctgggatcgccggttgtggtggcctatacatcgagcggaacaaccgcggccagaatttcgcgtgccagaccggcattgccaattctggctctcactccgtccgaacaagtcgcgcgccggctcaacatgttctggggggttgtcggcgtgcgatcacaagatgtccacacctatgaggcgtcgctgattcatgcgcaacaggcggtgcaggaagcaaagctggcaagtccctccgatcacattgtcatcgtggcgggatttccatttgcgcaacagggcagcaccaacaatctccgcgtcgttcagatcgccgcaaccgacaacctagagattgcgtag

SEQ ID NO: 7677 - protein, 482 aa, Agrobacterium vitis
MFIRNNRRSKIVATVGPASSSPDMLRSLFLAGVDTFRLNFSHGARADHAEVYRNIRALEQEHDAAIAVLQDLQGPKIRIGVLAHGRLDLARGSTIGFILGREGGEGMNDIPLPHREIFEVAVPGMDLLIDDGRIKVRIMEVMDGRLVCEVLNGGALSNRKGVNVPGAVLDISPLTAKDREDLEFGLELGVDWVALSFVQRARDMIEARSLVGDRAGLIAKIEKPSALDDIEDIVRLSDSVMVARGDLGVEIPPEDVPGKQKEIIRACRLAAKPVIVATQMLDSMVSSPTPTRAEASDVAGAIYDGADAVMLSAETATGAYPVEAVEIMNRIIEKTEKHKHYRPILEATEPDVAQSPPHAVATAAANVAVALGSPVVVAYTSSGTTAARISRARPALPILALTPSEQVARRLNMFWGVVGVRSQDVHTYEASLIHAQQAVQEAKLASPSDHIVIVAGFPFAQQGSTNNLRVVQIAATDNLEIA

SEQ ID NO: 7678 - DNA, 2234 bp, Nicotiana tabacum
  CDS (59)..(1840)
cgttgctgtcgaccgaaaatttcctaaaaaatctcaaaatttctgctgaggaaaaacgatgtcgcaagctcttaacttcttcgtttcctcgtcttcacgttctccggcgactttcacaatctcaaggccgtcggttttcccgtcaaccggtagtttacggttactggtgaagaaatcgttgcggacgttagttgtggaagcgtcgtcggcggcggcgtcagatctcgacgagccgcagtcgtccccggtgttagtatcggagaatggttcaggaggggtattatcgagtgcgacgcaggagtacggtcgtaatgctgcaccggggaccgattcgagttcgattgaagtggatacagtaacggaggcggagttaaaggagaacgggtttaggagtacacgtagaacaaagttgatttgcacgattggacctgccacgtgtgggtttgagcagctggaacgattagctgagggaggaatgaatgtagctaggataaatatgtgccatggaacacgcgagtggcatcgtatggtgattgagagactgaggaggttgaatgaggagaaagggtttgctgtagctatcatgatggatactgaaggtagtgaaattcatatgggagatcttggtggcgcttcttctgctaaagctgaggatggtgaaatttggaatttcactgttcgttcatttgatccaccactcccagaacgcaccgttactgttaactatgatggctttgctgaagatgtgaaagtgggtgatgagctactagtagatggtggaatggtgagatttgaagtgattgagaaaattggcccagatgttaagtgtctttgcacagatcctggacttcttctacctcgggctaatctgacattttggcgggatggtaaactagtaagggaacgcaatgccatgcttccaacaatttcctcaaaggattggctagacatagactttggtattgctgagggtgttgattttattgctgtatcatttgtcaagtctgctgaagtcattaagcatcttaagagctacattcaagcccgggctcgggatagtgatatttctgtaattgcaaaaatagagagcattgactcattgaagaacttagaagagataatccaggcatcagatggtgctatggtcgcgagaggagatcttggtgctcaaattccattagaacaggttccatcagagcagcaaaagattgttcagatatgcaggcagctgaataggcctgttatagtagcctcccagctgctggaatctatgattgaataccctattccaactagagctgaagttgctgatgtttctgaagcagttaggcaaaggggggatgctttgatgctttctggtgagtcggccatgggacagtttcctgagaaggcattgactgtactaagaagtgttagcttgagaattgaaagaatgtggagggaacagaaacgccatgaagttattgaattgccatccatagcatcttcattttcagatagtatttcagaagagatctgcaactctgccgccaagatggcaaacaatttggaagttgatgctctttttgtttacaccaagaatgggcacatggcatctctcttgtcacgctgccgtcctgactgcccaatatttgcatttacaacgacaacatctgtacgcagacgcctgaacctgcaatggggtctaatgcctttccgcttgagtttctccgatgatatggaaagcaacctcaacaagacattctccttactaaaagctcggggcatgatcaagtcaggtgacctcatcattgctgtttccgacatgctgcagtccattcaagttatgaatgttccatgagtgcacaaattagttctgtgttttgagttttgagctaggcaaccccaattatatgccaattaaaccaattatgaagttcaacagttggttctgctagggagtaaaacaacgacgagcaatccttcctcagtgtgtcctcgtttcaggtgctggacttcaatgacatttggtgtaactcaactgtcgcttgtagtcaacacagatatgttgcaatgtataccccctgttttcctaggatttggatgtatcttctgcttgagttattgatctagaaatgagccttagaaatgatcgtgataattatggatttgttcttagaattgctattagcgtgctgtctttggtgtttttttaatgatctatcggtttgaattaccttttggaaaaaaaaaaa

SEQ ID NO: 7679 - protein, 593 aa, Nicotiana tabacum
MSQALNFFVSSSSRSPATFTISRPSVFPSTGSLRLLVKKSLRTLVVEASSAAASDLDEPQSSPVLVSENGSGGVLSSATQEYGRNAAPGTDSSSIEVDTVTEAELKENGFRSTRRTKLICTIGPATCGFEQLERLAEGGMNVARINMCHGTREWHRMVIERLRRLNEEKGFAVAIMMDTEGSEIHMGDLGGASSAKAEDGEIWNFTVRSFDPPLPERTVTVNYDGFAEDVKVGDELLVDGGMVRFEVIEKIGPDVKCLCTDPGLLLPRANLTFWRDGKLVRERNAMLPTISSKDWLDIDFGIAEGVDFIAVSFVKSAEVIKHLKSYIQARARDSDISVIAKIESIDSLKNLEEIIQASDGAMVARGDLGAQIPLEQVPSEQQKIVQICRQLNRPVIVASQLLESMIEYPIPTRAEVADVSEAVRQRGDALMLSGESAMGQFPEKALTVLRSVSLRIERMWREQKRHEVIELPSIASSFSDSISEEICNSAAKMANNLEVDALFVYTKNGHMASLLSRCRPDCPIFAFTTTTSVRRRLNLQWGLMPFRLSFSDDMESNLNKTFSLLKARGMIKSGDLIIAVSDMLQSIQVMNVP

SEQ ID NO: 7680 - DNA, 1599 bp, Agaricus bisporus
  CDS (1)..(1599)
atgtatcccgtcgatggcatccgttctcagatcgagtggaacaccactcttaacgtctctgatgctcctgtcccgactgagaccactaaatatcatcgcaagacagctatcattgcgaccattgggcctaaaatcaataccgtcgaaaagctcactgacgttcgcctagctggtgtaaacatcgttcgcatgaatttctcgcacggcacccatgagtaccatcagagtgttattgataacaccaggcaaatgatcaaaaacgacccacatgggcgccccgtagctattgctttggataccaaaggtcccgaaattcggaccggtcagacgagggatggcaatgactatcccattaaggctggggatgaatttatcgtcaccacagatcccaagtatagtgatatatgcgacaataaagttttgttcgttgactacgccaatcttgcaagcgtcactgcccctggcaaactgatctatattgatgatggtatcatctctcttctcattctctctattgatggtatgaacctccatgttcgtgctctcaataatgggaccctctcctctcgcaagggtgtaaatttgcccaaaacggacgtcgaccttccaccactttccgagaaagacaaagatgatctgcgtttcgggattcgtaatggagtcgatatgatcttcgcgtcttttatccgccgtggtgaggacgtaagacagatccgtgaagttctcggccccgatggtgccagcatcaaaattatcgtcaagattgaaaatgagcaaggtgtcgctaactttgatgagattttaaaggaggccgacggtgtcatggttgctcgcggcgatttgggaattgaaattcctgcaagtcaagtattccttgctcagaagatgatgatcgccaagtgcaacattgttgggaagccagtgatcgtcgcaactcaaatgcttgagtccatgacgtacaacccccggcctactcgtgcggaagttagtgacgtcgcaaatgctgtccttgatggctctgattgtgtcatgttgtcgggagagactgctaagggatcttatcccgttcaatctgtcctgatgatggcggagacttgcttgcttgcggaaactgctatttgctacccgcctctatatgacgacctccgcgctgtccaggctcggccaacagaaactgcggagactgttgctatcgccgctgttgctgctgcagccgaacaggatgccaaagcactacttgtcctatcaacaagtggggagactgcccgtctcgtttccaagtatcgccccaagatcccgatcatcactgtcacccgtaatgagcaaaccgcaagacaaatccacttgcatcgcggttgctatcctttctggtaccctgaacctcgaggtgtccaaaaccatcaatggcagactgatgtggacaaccgcatccggtttggtcttcgcaacgctttggcactcaatgtcatccaacctggcgccagtattatcgcagtgcagggttggaagggcggtcttggtcacaccaatacgcttcgcattctgacagtgcccactgaccctgccgaccttgagcttcagcctctgggttctctataa

SEQ ID NO: 7681 - protein, 532 aa, Agaricus bisporus
MYPVDGIRSQIEWNTTLNVSDAPVPTETTKYHRKTAIIATIGPKINTVEKLTDVRLAGVNIVRMNFSHGTHEYHQSVIDNTRQMIKNDPHGRPVAIALDTKGPEIRTGQTRDGNDYPIKAGDEFIVTTDPKYSDICDNKVLFVDYANLASVTAPGKLIYIDDGIISLLILSIDGMNLHVRALNNGTLSSRKGVNLPKTDVDLPPLSEKDKDDLRFGIRNGVDMIFASFIRRGEDVRQIREVLGPDGASIKIIVKIENEQGVANFDEILKEADGVMVARGDLGIEIPASQVFLAQKMMIAKCNIVGKPVIVATQMLESMTYNPRPTRAEVSDVANAVLDGSDCVMLSGETAKGSYPVQSVLMMAETCLLAETAICYPPLYDDLRAVQARPTETAETVAIAAVAAAAEQDAKALLVLSTSGETARLVSKYRPKIPIITVTRNEQTARQIHLHRGCYPFWYPEPRGVQNHQWQTDVDNRIRFGLRNALALNVIQPGASIIAVQGWKGGLGHTNTLRILTVPTDPADLELQPLGSL

SEQ ID NO: 7682 - DNA, 1446 bp, Buchnera aphidicola
  CDS (1)..(1446)
atgttaaatcgtgttagaagaacaaaaattgtagcaactttaggaccttctacagataaagcaaataatcttgaaaagattattttatctggagcaaatgttcttcgtttaaatttttctcatggttcatctgaagaacataaaaaaagagcgaaaaaagcaaaagaaataatgtttaaattaaattgtcatattgctttattaggtgatttacaaggaccaaaaatcagaatttctaaatttaaaaaaaacagtatttttttaaaagttaatgacgtttttatattagatgcaaatttaaatgaaaaaaatggaaacaatgaaagagtcggaattgattataaaaaattaccaaatgacctaaatgtaaatgatatcttgttgttagacgacggaagaatacaattaaaagtaataaaaattgaaaaatgtgcaatatttacaaaagttattataggtggcattctatctaataataagggtattaataaattaggtggtggtttatcagcagatgcattaacagaaaaagataaaaaagatataattcttgcttctgaaattgatgtagattatttggccgtatcgttccctcgttgtgctgatgatttaataaaagccagagagttattaaaaaaatctggtagtaacgctcaaattatagctaaaatagaaagagccgaagctgtatttgatcaaaatgctatagaaaatataatattgtcttcagatgcaattatgattgctagaggagacttaggtgtcgaaattggtgatgcagaattggtaggtattcaaaaaaaattaattagaactgctagaaaattaaataaggtagcaattactgcaacacaaatgatggaatcaatgattttaaatccgttacctactcgtgcagaagttatggatgtagccaatgctgtgttagatggaagcgatgcagtcatgctgtctgcggaaactgcatctggaaaatatccatctgaaactgtgataagtatggctaaagtttgcaaaggggcagaaaaagttcctagtattaatgtttctagacatcgtcttaatgtagaatttcaaagcattgaggaagccattgctatgtcatcaatgtatgcggcgaatcacttaaaaggaattacagcaattattactatgacagaatctggtaaaacagcattaatgacttctagaattacttctggactaccgatttttgctttatcaaaacataaaaaaactttaaatttaactgctctctatagaggtgtgattcctatttattttgatagtgataaggatggtgttgaagctgctaatgaagcaataattcttttgtgcaagaaaaaatttctatttaataatgatttagtcattgtcactcaaggtgacataatggggaaaataggtaaaacgaataccagtagaattttaagagttacatattaa

SEQ ID NO: 7683 - protein, 481 aa, Buchnera aphidicola
MLNRVRRTKIVATLGPSTDKANNLEKIILSGANVLRLNFSHGSSEEHKKRAKKAKEIMFKLNCHIALLGDLQGPKIRISKFKKNSIFLKVNDVFILDANLNEKNGNNERVGIDYKKLPNDLNVNDILLLDDGRIQLKVIKIEKCAIFTKVIIGGILSNNKGINKLGGGLSADALTEKDKKDIILASEIDVDYLAVSFPRCADDLIKARELLKKSGSNAQIIAKIERAEAVFDQNAIENIILSSDAIMIARGDLGVEIGDAELVGIQKKLIRTARKLNKVAITATQMMESMILNPLPTRAEVMDVANAVLDGSDAVMLSAETASGKYPSETVISMAKVCKGAEKVPSINVSRHRLNVEFQSIEEAIAMSSMYAANHLKGITAIITMTESGKTALMTSRITSGLPIFALSKHKKTLNLTALYRGVIPIYFDSDKDGVEAANEAIILLCKKKFLFNNDLVIVTQGDIMGKIGKTNTSRILRVTY

SEQ ID NO: 7684 - DNA, 1440 bp, Buchnera aphidicola
  CDS (1)..(1440)
atgatacgtcgttttagacgaacaaaaattgttgctacattaggtccgtcaactgataatcatattattttagagaatatgattaaatctggtgttaatgtttttcgtttaaacttttcacatggaacacgagaagaacatatttatagagcaaaactcgtaacaagtattgcaaaaagattaaattgtcacattgctcttttaggtgatttacaaggtcctaaaattcgaatttgtaaatttcaagataaaaaagtttttttaaaagtaaataattatttcatattagacgctaatttaaatgaaaatttagggacatcggaaagagttggaatagattataagaatttacctaaagacgtaaaaaaatgtgatattctcttattagatgatggaaaaatacaattaaaggttattaatatagtagatcaagaaatatttactaaaataattataggtggtgtgttatctaataataagggaattaacaaattaggaggaggtttatcagcaaggattttaactaaaaaagataaaagagatattatcacttcgattgatattggggtagattatttagctgtttcatttccgagatatggaagtgatttagatcatgcacgtaagtgtgcagtaaaatttggtagtaaagcaaaaataattgctaaaatagaaagagctgaagcagtcaaagatttaaaaataattgatgaaataatattagcatctgatgcaataatggtagcacgaggagatttaggtgtagaaataggagaatctgaattagctggaatacaaaaaacattgataaggcgagcacgccaattaaatcgagtagttataactgctacacaaatgatggaatctatgatcaataatcctatgccaactcgtgctgaagtcatggatgttgctaatgctgtattagatggtagtgatgctgttatgttatcagcggaaactgcgtcaggaaaatatcctattgagactattaaagttatgtctaaagtttgtatgggggcagaaaaaatgcctagcatcaatgtttctcagcataggattcatgacaaatttcatgatattgaagaagctattgctatgtctgcaatgtatgctgcaaatcatttaagtggtattactgctattattactatgactgaatctggcaaaacatctttaatgacttctagaattacttctggtttaccaattttcgcgttatcttcacatatacaaacgctgaaattaactgcgttatatcgaggagttacgccaattttttttaatagtagcaaagaaggtgtttctgctgctaatgaagttattaacttattagtaaaaaggggttttttagaacctggaaatttagttattattactcaaggagatattatgggaaaagtaggaaaaactaatacaagtagaattttaaaagtgtga

SEQ ID NO: 7685 - protein, 479 aa, Buchnera aphidicola
MIRRFRRTKIVATLGPSTDNHIILENMIKSGVNVFRLNFSHGTREEHIYRAKLVTSIAKRLNCHIALLGDLQGPKIRICKFQDKKVFLKVNNYFILDANLNENLGTSERVGIDYKNLPKDVKKCDILLLDDGKIQLKVINIVDQEIFTKIIIGGVLSNNKGINKLGGGLSARILTKKDKRDIITSIDIGVDYLAVSFPRYGSDLDHARKCAVKFGSKAKIIAKIERAEAVKDLKIIDEIILASDAIMVARGDLGVEIGESELAGIQKTLIRRARQLNRVVITATQMMESMINNPMPTRAEVMDVANAVLDGSDAVMLSAETASGKYPIETIKVMSKVCMGAEKMPSINVSQHRIHDKFHDIEEAIAMSAMYAANHLSGITAIITMTESGKTSLMTSRITSGLPIFALSSHIQTLKLTALYRGVTPIFFNSSKEGVSAANEVINLLVKRGFLEPGNLVIITQGDIMGKVGKTNTSRILKV

SEQ ID NO: 7686 - DNA, 2354 bp, Gallus gallus
  CDS (81)..(1673)
agcggcggcggcgctcgggcaggacaggctttgggcacggcggcggaagcagcagcaggagacaccgaactccagtaaccatgtcgaagcaccacgatgcagggaccgctttcatccagacccagcagctgcacgctgccatggcagacacctttctggagcacatgtgccgcctggacatcgactccgagccaaccattgccagaaacaccggcatcatctgcaccatcggcccagcctcccgctctgtggacaagctgaaggaaatgattaaatctggaatgaatgttgcccgcctcaacttctcgcacggcacccacgagtatcatgagggcacaattaagaacgtgcgagaggccacagagagctttgcctctgacccgatcacctacagacctgtggctattgcactggacaccaagggacctgaaatccgaactggactcatcaagggaagtggcacagcagaggtggagctcaagaagggcgcagctctcaaagtgacgctggacaatgccttcatggagaactgcgatgagaatgtgctgtgggtggactacaagaacctcatcaaagttatagatgtgggcagcaaaatctatgtggatgacggtctcatttccttgctggttaaggagaaaggcaaggactttgtcatgactgaggttgagaacggtggcatgcttggtagtaagaagggagtgaacctcccaggtgctgcggtcgacctgcctgcagtctcagagaaggacattcaggacctgaaatttggcgtggagcagaatgtggacatggtgttcgcttccttcatccgcaaagctgctgatgtccatgctgtcaggaaggtgctaggggaaaagggaaagcacatcaagattatcagcaagattgagaatcacgagggtgtgcgcaggtttgatgagatcatggaggccagcgatggcattatggtggcccgtggtgacctgggtattgagatccctgctgaaaaagtcttcctcgcacagaagatgatgattgggcgctgcaacagggctggcaaacccatcatttgtgccactcagatgttggaaagcatgatcaagaaacctcgcccgacccgcgctgagggcagtgatgttgccaatgcagttctggatggagcagactgcatcatgctgtctggggagaccgccaagggagactacccactggaggctgtgcgcatgcagcacgctattgctcgtgaggctgaggccgcaatgttccatcgtcagcagtttgaagaaatcttacgccacagtgtacaccacagggagcctgctgatgccatggcagcaggcgcggtggaggcctcctttaagtgcttagcagcagctctgatagttatgaccgagtctggcaggtctgcacacctggtgtcccggtaccgcccgcgggctcccatcatcgccgtcacccgcaatgaccaaacagcacgccaggcacacctgtaccgcggcgtcttccccgtgctgtgcaagcagccggcccacgatgcctgggcagaggatgtggatctccgtgtgaacctgggcatgaatgtcggcaaagcccgtggattcttcaagaccggggacctggtgatcgtgctgacgggctggcgccccggctccggctacaccaacaccatgcgggtggtgcccgtgccatgagctgccggcgcccccgcctcttccacccccgcgccccttccccatgcattaggccagcagtcgcttgcgatgttctcctcgtccctagcgtggatttaggttgctcaacaccaccgagtgcagcagcgggggaagagaccttaaatcactcagaatacttgaagtgtgtagttgtttccagacctctctccctgtagttagccatgtcagagcggggccctgtgctccccacgtccccctagcttagcactgccctcagggtgtggctgtgcctctccttgccccggctgtggggtgatggggaaggagtgggcgcttatggtaacggttctgctgctgcacaccgcagctcccccaggttggtgccctctgtccatgaggggttataggttgtcccctctgggcttacactccaaaggtgtgctccacggttcctacaagaatcccaaaccagggtgctgctcgttgtccccctgggtgcaggtggagtcctgcgggttgttggggtgcaggatgggtgggggacgcacgcttcatctccatgcagccacctgcccttctatggtgtctgtctgtgttgtcgcctttcctgagagcgttccttttgtctgggcgccctgtttgctccggtgggtgtattgggttgtggagcaccactgtgcacgtcaataaagagctgag

SEQ ID NO: 7687 - protein, 530 aa, Gallus gallus
MSKHHDAGTAFIQTQQLHAAMADTFLEHMCRLDIDSEPTIARNTGIICTIGPASRSVDKLKEMIKSGMNVARLNFSHGTHEYHEGTIKNVREATESFASDPITYRPVAIALDTKGPEIRTGLIKGSGTAEVELKKGAALKVTLDNAFMENCDENVLWVDYKNLIKVIDVGSKIYVDDGLISLLVKEKGKDFVMTEVENGGMLGSKKGVNLPGAAVDLPAVSEKDIQDLKFGVEQNVDMVFASFIRKAADVHAVRKVLGEKGKHIKIISKIENHEGVRRFDEIMEASDGIMVARGDLGIEIPAEKVFLAQKMMIGRCNRAGKPIICATQMLESMIKKPRPTRAEGSDVANAVLDGADCIMLSGETAKGDYPLEAVRMQHAIAREAEAAMFHRQQFEEILRHSVHHREPADAMAAGAVEASFKCLAAALIVMTESGRSAHLVSRYRPRAPIIAVTRNDQTARQAHLYRGVFPVLCKQPAHDAWAEDVDLRVNLGMNVGKARGFFKTGDLVIVLTGWRPGSGYTNTMRVVPVP

SEQ ID NO: 7688 - DNA, 1425 bp, Clostridium perfringens
  CDS (1)..(1425)
atgcaaaaaacaaaaatgatatttacaattggtccttcaagtgattcagaagaaattttaagagagttcataagaattggtatgaatgcagctagattaaacttctcacatggagaccatgcaagtcataaagaaaaaatagaacttattaagagacttagaaaagaagaaaaatcagctacagctatcttattagacattaagggtcctaaaataagaacatataattttaaaaatggcgaagctgaattaaaaaatggtgatgaattcacattctcttgcggagatgaaatattaggtgataacactaaatgttcaatctcttataaagaactatatgaagacataaaacctggtggatcaatacttgttgatgatggacttttagaatttaaagtaaaggaagtccgtggaactgatataatatgtgaagttattgaaggaggtactataaaagaccataaaggtgtaaatgtacctaatgtaccaatcaaactccctgcagtaactgaaaaggatagatctgacttaatatttggttgcgagatggaagtagactttgtagcagcttctttcataagaaaaccagaggatgtacttgaagttagagaaattctagactctcatggtggaaaagatataaaaataatatcaaaaatagaaagccaagaaggtgtagataacataaaagaaataattaaagttactgatggtgtaatggttgctagaggtgatatgggagtagaaattcctatagaaaatgtacctataattcaaaaaaatataattaagaaatgtaatcaagcagggaaaatagttataacggcaactcaaatgttagattctatgataagaaatccaagacctactagagctgaagcttctgacgtatgtaatgccatatttgatggtacagatgccataatgcttagtggagaaagtgcttctggtagcttccctatagaggcagcaatgacaatgtctagaatagcaaaaaaagcagaagctaacttagactataattatcttttaagaagattaaaagatccaaatccaaatcccgatgcctttgcagatgccataagttattcagcatcaaaaacagctagcaaattccctacaaaagctatagtagcagccactcagactggttcaactgctaagatattatcaaaatataaacctagctgtccaataatagctattactccatatgaaaaagttagaagaagcttagctttaaactttggaataatttctaagaaatgtgcttattttaatagtacagatgaaattatagaggaagctagaaaagtagctaaagaatttgaaatagctgaaactggagataatataatggtagctgctggattcccaacatcaataactggtggaacaaacatgctaaaaattgaaaaaatataa

SEQ ID NO: 7689 - protein, 474 aa, Clostridium perfringens
MQKTKMIFTIGPSSDSEEILREFIRIGMNAARLNFSHGDHASHKEKIELIKRLRKEEKSATAILLDIKGPKIRTYNFKNGEAELKNGDEFTFSCGDEILGDNTKCSISYKELYEDIKPGGSILVDDGLLEFKVKEVRGTDIICEVIEGGTIKDHKGVNVPNVPIKLPAVTEKDRSDLIFGCEMEVDFVAASFIRKPEDVLEVREILDSHGGKDIKIISKIESQEGVDNIKEIIKVTDGVMVARGDMGVEIPIENVPIIQKNIIKKCNQAGKIVITATQMLDSMIRNPRPTRAEASDVCNAIFDGTDAIMLSGESASGSFPIEAAMTMSRIAKKAEANLDYNYLLRRLKDPNPNPDAFADAISYSASKTASKFPTKAIVAATQTGSTAKILSKYKPSCPIIAITPYEKVRRSLALNFGIISKKCAYFNSTDEIIEEARKVAKEFEIAETGDNIMVAAGFPTSITGGTNMLKIEKI

SEQ ID NO: 7690 - DNA, 1425 bp, Corynebacterium efficiens
  CDS (1)..(1425)
atggaaagacgaactaagattgtatgcaccctcggtccggcggtcgccagcgcggatgggatcctccgactggttcaggacggcatggatgtggcccgcctgaacttctcgcacggcgatcaccccgaccatgaacagaactacaagtgggtccgtgaagccactgacaagaccggtcgcgcggtcggcatcctcgccgacctgcagggccccaagatccgtctcggacggttcaaggagggctcaaccgtatgggagaccggtgagacggtccgcatcacggtggatgatgtcgaaggcacccatgaccgtgtctccaccacctacaagaacctggccaaggatgcccgtccgggggaccgtctgctggtcgatgacggcaaggtcggcctcgtctgcgtctccgtcgagggcaacgatgtcatctgtgaggtcaccgaaggtggccccgtctccaacaacaagggtgtctccctgcccggcatggacatctccgtgccagccctatccgagaaagacatcaaggatcttcgtttcgccctgaagctcggcgttgacttcatcgccctgtccttcgtccgctccccagcggacgtcgaactcgtccatgccatcatggatgaggagggacgtcgcgtcccggtgatcgccaagctggagaagccggaggcggtcgcagcactcgagtccatcgtgctggcgttcgacgcgatcatggtcgcccgtggagacctcggcgtggaggtcccgctcgaggaggtcccgctcgtgcagaagcgggcgatccagatcgcccgggagaacgccaagccggtcatcgtggccacccagatgctcgattcgatgattgagaattcccgtccgacccgtgcggaggcctccgatgtggccaacgccgttctcgatggtgccgatgccgtcatgctctccggtgagacctccgtgggtaaggatccccacaatgtggtccgcacgatgtcccgtatcgtccgcttcgccgagaccgacggccgggttccggatctcacgcacattccgcgcaccaagcgtggcgtgatctcctattccgcccgcgacatcgccgagcgactcaatgcccgcgccctggtcgccttcaccacctcgggggacaccgccaagcgtctggcccgtctgcactcccatctgccgctgctggtcttcacccctgatccgagcgtccgctcccagctggcgctcacctggggtgcccagaccttcctgtgcccgaaggtggatgacaccgatggcatgatgcgtgaggttgaccgtgcgctgctggccatggacgagtatcagaaggatgacatgatggtggtcgtcgccggttcccctccgggggtcacgggaaacaccaacatgatccacgttcacctgctgggtgaggatacccggattcccaagtag

SEQ ID NO: 7691 - protein, 474 aa, Corynebacterium efficiens
MERRTKIVCTLGPAVASADGILRLVQDGMDVARLNFSHGDHPDHEQNYKWVREATDKTGRAVGILADLQGPKIRLGRFKEGSTVWETGETVRITVDDVEGTHDRVSTTYKNLAKDARPGDRLLVDDGKVGLVCVSVEGNDVICEVTEGGPVSNNKGVSLPGMDISVPALSEKDIKDLRFALKLGVDFIALSFVRSPADVELVHAIMDEEGRRVPVIAKLEKPEAVAALESIVLAFDAIMVARGDLGVEVPLEEVPLVQKRAIQIARENAKPVIVATQMLDSMIENSRPTRAEASDVANAVLDGADAVMLSGETSVGKDPHNVVRTMSRIVRFAETDGRVPDLTHIPRTKRGVISYSARDIAERLNARALVAFTTSGDTAKRLARLHSHLPLLVFTPDPSVRSQLALTWGAQTFLCPKVDDTDGMMREVDRALLAMDEYQKDDMMVVVAGSPPGVTGNTNMIHVHLLGEDTRIPK

SEQ ID NO: 7692 - DNA, 2084 bp, Drosophila melanogaster
  CDS (229)..(1830)
tctcgtcctcgccgcgtccgattttccatatatcccgattttcgtctcaaacttggaagatatattgccaaaatattgcattcggctagccgctgcgttgtgtgtgttgttgtgcgtggagttgcgtgtgcagttgcaagaagatatagtcgtctatatcgtcagaccgatctcgatcccaagtgcgattcccgttggttacatactacccgttcggtaggcaacaaaatggtgaacgtaaccatctacgatgaggcaccgcagctgaagcccaacgaagtaccccaaaacatggccgcaggagctgatacccaactggagcacatgtgccgtctgcagttcgactcgccagtgccccatgtgcgtctgtccggaatcgtgtgcaccatcggacctgcctccagcagcgtggagatgctggagaagatgatggccaccggcatgaacatcgcgcgcatgaacttctctcacggatcgcacgagtaccatgccgccaccgtggccaatgtgcgccaggcggtgaagaactactcggccaagctgggctacgaacaccccgtggccattgccctggacaccaaggggcccgagatccgtaccggtctgatcggaggcagcggcaccgccgagattgagctgaagaagggcgagaagatcaagctgaccaccaacaaggaattcctggagaagggctctctggagattgtgtacgtggactacgagaacattgtcaatgtggtgaagcccggcaaccgggtgttcgtcgatgacggtctgatctcactgattgtccgcgaggtaggcaaggattccctcacctgcgaggtggagaacggcggctctctgggttcccgcaagggtgtgaacctgccaggcgtgcccgtcgatctgcctgccgtctccgagaaggataagagcgatctgctgttcggtgtggagcaggaagtggacatgatctttgcttcgttcatccgcaacgccgctgctttgaccgagatccgtaaggttcttggcgagaagggcaagaacatcaagatcatttccaagatcgagaaccagcagggcatgcacaacctggacgagatcatcgaggccggtgatggcattatggtggcccgtggagatctgggtattgagattcccgccgagaaggtgttcctcgcccagaaggccatgattgcccgctgcaacaaggctggcaagcctgtgatctgcgccactcagatgttggagtcaatggtgaagaagccacgtcccactcgcgctgagatctctgatgtggccaacgctgtgctcgatggtgctgattgcgtcatgttgtctggtgagaccgccaagggcgagtacccgctggagtgcgtcctgaccatggccaagacctgcaaggaggccgaggctgccctctggcaccagaacctctttaacgacttggttcgcggcgctggtaccatcgatgcctctcacgcggctgccatcgctgccgttgaggctgccaccaaggccaaggcctccgccatcgtggtgatcaccaccagcggcaagtcggccttccaggtgagcaagtaccgcccacgctgccccatcatcgcggtcacccgtttcgcgcagaccgcccgacaggcccatctctaccgtggactggtgccactcatctacaaggagcccggtcttggtgactggctgaaggacgtggacgtgcgcgtgcagttcggtctgcaggtcggaaagaagaacggcttcatcaagaccggcgattccgtcgtggtggttaccggctggaagcagggctccggcttcaccaacaccatccgcattgtcaccgtcgaataaattctgccgctcaggaagtacctggatgcgtcgcagctgccgcgggcgtcgcgttgattactgttaataaccaagttaatttattaattacacaatattcggaatattggaaactgcaggaggctgctggaaccgctgtcagaagcgccgaaggccggcccgggcctcaaacagacacacaaatatactataccattgttgaataatagagatttcttcgaaaattataataaagtcatcactgtatttatgta

SEQ ID NO: 7693 - protein, 533 aa, Drosophila melanogaster
MVNVTIYDEAPQLKPNEVPQNMAAGADTQLEHMCRLQFDSPVPHVRLSGIVCTIGPASSSVEMLEKMMATGMNIARMNFSHGSHEYHAATVANVRQAVKNYSAKLGYEHPVAIALDTKGPEIRTGLIGGSGTAEIELKKGEKIKLTTNKEFLEKGSLEIVYVDYENIVNVVKPGNRVFVDDGLISLIVREVGKDSLTCEVENGGSLGSRKGVNLPGVPVDLPAVSEKDKSDLLFGVEQEVDMIFASFIRNAAALTEIRKVLGEKGKNIKIISKIENQQGMHNLDEIIEAGDGIMVARGDLGIEIPAEKVFLAQKAMIARCNKAGKPVICATQMLESMVKKPRPTRAEISDVANAVLDGADCVMLSGETAKGEYPLECVLTMAKTCKEAEAALWHQNLFNDLVRGAGTIDASHAAAIAAVEAATKAKASAIVVITTSGKSAFQVSKYRPRCPIIAVTRFAQTARQAHLYRGLVPLIYKEPGLGDWLKDVDVRVQFGLQVGKKNGFIKTGDSVVVVTGWKQGSGFTNTIRIVTVE

SEQ ID NO: 7694 - DNA, 1901 bp, Eimeria tenella
  CDS (57)..(1652)
ctgcgtcgaagagaaactgtggctcattgtagcttgtgcactccccactaggcaagatggcgaatcctacacactctcaagtcgtcgcagctccggacagttccggacggctgctccgcctagttagcgccagctcagtcatgatgcagcttttgggcaaaagtacgaatatccgcatgtcccagatcctggaacaccacgaagatgaggacttcagtgcgcaccgcacgaagattgtgtgcacgatgggccccagctgctgggatgtggacaagatggtgcagttgatcgatgccgggatgaacgtgtgccgtcttaacttctctcatggtgatcatgaggcacatggccgtgtggtcaagaaccttcaggaggctctcaagcagcgcccagggaagcgggttgccttgttgctcgacacgaagggtcctgaaatcaggacgggcatgctggagggtgacaagccaatcgagcttcacgcgggggacatgctcaagatcgtcaccgactacagctttgtaggcaacaagagctgcatcgcctgctcatacgagaaactgcccagctctgtcaagccaggaaataccattctcattgctgatggctccctatccgttgaagtcgtggagtgtggcaaggattacgtcatgactagggttatgaacccggccatcattggcaacaagaagaacatgaaccttcccggcgttaaggtcgacttgcccgttattggcgagaaggacaagaatgacattctgaattttggcattcctatgggctgcaacttcattgccgcgtccttcgtgcagtctgcagacgacgtgcgctatatccgcagcattcttggcaccaaggggcgcaacatcaagatcattcccaagattgaaaatgttgagggtctcctcaacttcgatgaaattcttcaggaggcagacggcattatgattgccagaggcgatctcggtatggagatcccacctgaaaaggtcttccttgcccagaagatgatgatctcaaaatgtaatgttgctggaaagcccgtcatcacggcaacgcagatgcttgagtcgatgacgaagaacccacgcccgacgcgtgccgaagctgcagatgtggcgaatgctgtccttgatggcactgattgcgtcatgctctccggggagacggcgaacggaagcttccctgttcaggctgtcactgtcatgtcccgtgtctgcttcgaggccgaaggctgcattgactatcagcaggtgttcagagccacttgccaagctaccatgactcctattgacacccaggaggcagtggctcgtgctgctgttgagacagctcagtcaatcaacgcatcgctcatcctcgcccttactgaaactggccgcactgctcgcctgatcgcgaagtataggccaatgcagccaattctggctttgagcgcttcggaggaaaccatcaagcagctgcaggtcattcgcggcgttacaacattcttggtgccgactttccagggcacggaccagctgattcgcaacgcactttctgcagccaaggagctgcagctggtcagcgaaggcgacagcattgtcgcagtgcacggaatcaaggaggaggttgcaggatggtccaacctcctgaaggttcttgtcgtcgagtaggcgacttgtcagcgttcgcctttcggggtgtaacagcggctgacgcgtggaattcttggctcagccatgagccgctgctgtcgcgcgagcaggcagtggatgcgcgaacgttcgctgcctctgcttaaccgccgttcggtggaactcgggcttttagctccattttaatagaccgcgaggcggtgtgctgcggcgttttctaaggacttctgcgttaggtcgttgtgaagctaaaaaaaaaaaaaaaaa

SEQ ID NO: 7695 - protein, 531 aa, Eimeria tenella
MANPTHSQVVAAPDSSGRLLRLVSASSVMMQLLGKSTNIRMSQILEHHEDEDFSAHRTKIVCTMGPSCWDVDKMVQLIDAGMNVCRLNFSHGDHEAHGRVVKNLQEALKQRPGKRVALLLDTKGPEIRTGMLEGDKPIELHAGDMLKIVTDYSFVGNKSCIACSYEKLPSSVKPGNTILIADGSLSVEVVECGKDYVMTRVMNPAIIGNKKNMNLPGVKVDLPVIGEKDKNDILNFGIPMGCNFIAASFVQSADDVRYIRSILGTKGRNIKIIPKIENVEGLLNFDEILQEADGIMIARGDLGMEIPPEKVFLAQKMMISKCNVAGKPVITATQMLESMTKNPRPTRAEAADVANAVLDGTDCVMLSGETANGSFPVQAVTVMSRVCFEAEGCIDYQQVFRATCQATMTPIDTQEAVARAAVETAQSINASLILALTETGRTARLIAKYRPMQPILALSASEETIKQLQVIRGVTTFLVPTFQGTDQLIRNALSAAKELQLVSEGDSIVAVHGIKEEVAGWSNLLKVLVVE

SEQ ID NO: 7696 - DNA, 3479 bp, Lactobacillus delbrueckii
  CDS (1277)..(3046)
aagctttaggccaaagaaagagcctggacttcaaaatttgggacatgaagcaggtaaatttgcgctgaaaacgacttgaccaatttgcttttttgaaaaaaatctctcctagtgaaataaataataaacgccaggctgggatttgtaagccctaacaggttgaaagtctaaaaaaatctaatttaaaccaaattttacaagactttatgcgggaaaaatgttatgatttacatgatgtgagatattacacaatttaaatcatgaatgaggtgaattcatgaaacggattggtattttgactagcggcggtgacgcccctggtatgaatgcagccgtaagagccgtaaccagagtcgcgatcgcgaacggtttggaagttttcggtatcagatacggttttgcaggtttggttgcgggcgacattttcccattggaaagtgaagacgtagcccacttgatcaatgtttccggtaccttcctctactctgcgcgttatcctgaatttgcagaagaagaaggacagctggctggtattgaacaattgaagaagcacggcatcgatgctgttgtcgttattggtggggatggttcctaccatggcgccctgcagctgacccgccacggcttcaactcaattggcctgccaggcacgatcgacaacgatatcccttacacggatgccacgatcggctatgacacggcctgcatgacggcaatggacgcgatcgacaagatccgtgacactgcttctagccaccaccgcgtcttcattgtcaacgtaatgggccgcaactgtggtgacatcgctatgcgcgtcggcgtagcctgcggggcggacgcgatcgtcattcctgaaagaccatatgatgtcgaagaaatcgccaaccggctcaagcaagcccaggaaagcggcaaggaccacggtttggtagttgttgctgaaggcgtaatgaccgctgaccaattcatggctgaactgaagaagtatggtgacttcgacgtccgggccaatgttttgggtcacatgcagcggggcggcacgccaactgtttctgaccgggtgctggcttccaagctgggcagcgaagccgttcaccttcttttggaaggcaagggcggcctggctgtcggcattgaaaacggcaaggttacttcacacgacatccttgatttatttgatgagtctcacaggggtgactatgacttgttaaagctcaacgcagatttatcaagatagttgtttctatagtttttgatttagggagattttttcaagatgaaaaaaacaaagattgttagtactttagggccagcttcagacgatattgaaactattaccaagttagccgaagcaggcgcaaacgtattccgtttcaacttctcacacggtaaccacgaagaacacttggcaagaatgaacatggttcgtgaagttgaaaagaagactggcaagcttttgggcatcgctttggacaccaagggtgctgaaatcagaaccactgaccaagaaggcggcaagttcactatcaacactggtgacgaaatccgcgtgtcaatggacgcaaccaaggccggcaacaaggacatgatccacgttacctacccaggtctgttcgacgacactcacgtaggcggcactgtattgatcgacgacggtgctgttggtttgactatcaaggccaaggacgaagaaaagcgcgaattggtttgtgaagctcaaaacactggtgtcatcggctcaaagaagggtgttaacgctccaggtgttgaaatccgcctcccagggattactgaaaaggacactgacgacatccgctttggtttgaagcacggtattaacttcatctttgcttcatttgtacgtaaggctcaagacgttcttgacattcgcgcactttgcgaagaagctaacgcatcatacgttaagatcttcccaaagattgaatcacaagaaggtattgacaacatcgacgaaatcttgcaagtttcagatggtttgatggttgcccgtggtgacatgggtgttgaaatcccattcatcaacgtgccatttgttcaaaagactttgatcaagaagtgcaacgctttgggcaagccagttatcactgctactcaaatgctggactcaatgcaagaaaacccacgtccaacccgtgccgaagtaactgacgttgctaacgccgttcttgacggtactgacgcaactatgctgtcaggtgaatcagcaaacggtttgtacccagtacaatcagttcaagctatgcacgacatcgatgttcggactgaaaaggaattggacacccggaacactctggctctgcaacgctttgaagaatacaagggctcaaacgttactgaagctatcggtgaatcagttgtccgcactgctcaagaactgggcgttaagactatcatcgctgctactagctccggctacacagctcgtatgatctccaagtaccgtccagacgcaaccatcgttgccttgactttcgacgaaaagatccaacactcattgggtatcgtttggggcgttgaaccagttttggcaaagaaaccttcaaacactgacgaaatgttcgaagaagctgcccgcgtagctaaggaacacggtttcgttaaggatggcgacctggtaatcatcgttgccggcgtaccattcggccaatcaggtactactaacttgatgaagctgcaaatcatcggcaaccaacttgctcaaggtttgggcgtaggcactggctcagttatcggcaaggctgttgttgcgaacagcgctgaagaagccaacgctaaggttcacgaaggcgacatcctggtagctaagactactgacaaggactacatgccagctatcaagaaggccagcggtatgatcgttgaagcttccggcttgaccagccacgcagctgttgtcggcgtatcactcggcattccagttgttgtcggtgttgctgacgcaacttcaaagatcgctgacggctcaactttgactgttgacgcacgtcgcggcgcaatttaccaaggtgaagtttcaaacctgtaatctaggattgcaagtctgacaaccacagaagaaagagttcaatcaatcgattgagctcttttcctttgccaattttttctctgctttctttaatgattgccttgaatatagctaaggcagaagaggtattttaaactgctgagccgctttaaatcacctgcaaacttaatctacccaaaaagcatagccgaccttagaagaccgatatgggctgtttagcagggaggaaaaagcgcattaaaaactccagctgagctagagttaaattatcacttttttaattgttaagctgcaaggtcatcttcacctaagatgatctgcaaggtgtcgtggacgatcttgtccttggccagttgggcctggtcatcgtcttggtcgcggaagtcgttgatcatttctgccgcgatgggttggtttttgatgacccagatcc

SEQ ID NO: 7697 - protein, 589 aa, Lactobacillus delbrueckii
MKKTKIVSTLGPASDDIETITKLAEAGANVFRFNFSHGNHEEHLARMNMVREVEKKTGKLLGIALDTKGAEIRTTDQEGGKFTINTGDEIRVSMDATKAGNKDMIHVTYPGLFDDTHVGGTVLIDDGAVGLTIKAKDEEKRELVCEAQNTGVIGSKKGVNAPGVEIRLPGITEKDTDDIRFGLKHGINFIFASFVRKAQDVLDIRALCEEANASYVKIFPKIESQEGIDNIDEILQVSDGLMVARGDMGVEIPFINVPFVQKTLIKKCNALGKPVITATQMLDSMQENPRPTRAEVTDVANAVLDGTDATMLSGESANGLYPVQSVQAMHDIDVRTEKELDTRNTLALQRFEEYKGSNVTEAIGESVVRTAQELGVKTIIAATSSGYTARMISKYRPDATIVALTFDEKIQHSLGIVWGVEPVLAKKPSNTDEMFEEAARVAKEHGFVKDGDLVIIVAGVPFGQSGTTNLMKLQIIGNQLAQGLGVGTGSVIGKAVVANSAEEANAKVHEGDILVAKTTDKDYMPAIKKASGMIVEASGLTSHAAVVGVSLGIPVVVGVADATSKIADGSTLTVDARRGAIYQGEVSNL

SEQ ID NO: 7698 - DNA, 1941 bp, Leishmania mexicana
  CDS (112)..(1611)
atactgacacacactgcacgctctgtgcttcactttgttgttttcaagcagctgtttctcaattcactttactcatatttccaacctcttatcctcctcttacgtaacaacatgtcccagttagcgcacaatctgacgctctcgatcttcgacccggttgcgaactaccgggccgcccggatcatctgcactatcggccccagcacgcaaagtgtggaggcgctgaaggggctgattcagagtggcatgtctgtggcgcgtatgaacttctcgcatgggtcacacgagtatcaccagacgacgatcaacaatgtgcgccaggcggccgcggagctcggtgtgaatatcgcgattgcgctggacacaaaggggcccgagattcggacgggacagttcgttggtggtgatgctgtgatggagcgaggagcgacgtgctatgtgacgacagaccctgcgtttgcggacaagggcaccaaggacaagttctacatcgactaccagaacctgtcgaaggtggtgcgccccggcaactacatctacatcgacgacggcatcctgatcctgcaagtgcagagccacgaggacgagcagacgctggagtgcacagtcaccaactcgcacacgatatctgaccggcgcggtgtgaacctgccggggtgcgacgtggacctgcccgctgtgtcggcgaaagaccgcgtggacctgcagttcggtgtcgaacagggtgtggacatgatcttcgcgtcgttcatccggagcgcggagcaggtgggtgatgtgcggaaggcgctcggaccgaagggccgagacatcatgatcatctgcaagatcgagaaccaccagggcgtgcagaacattgactctatcattgaggagagcgacggcatcatggttgcgcgcggcgacctcggcgttgagattccagcagagaaggtggtggttgcgcagaagattctgatcagcaagtgcaacgttgctggcaagccggtgatctgcgcgacgcagatgctggagagcatgacgtacaacccccgcccgacgcgcgctgaggtatcggacgtcgctaacgctgtcttcaacggtgccgattgcgtgatgctgtctggtgagacggcgaaaggcaagtatccgaatgaggtggttcagtacatggcgcgtatctgcctagaggcacagagcgcgcttaacgaatatgtcttcttcaacagcatcaaaaagctgcagcacatcccgatgagtgctgatgaggctgtttgcggcagtgctgtcaactccgtgtctgagaccaaagccaaggcaatggtggtgctgagcaacacaggcgcaggcgctcgactggtggcgaagtaccgtccgaactgcccgattgtgtgtgtgacgacgcgcctgcagacgtgccgccagctgaacatcacacagggcgtggagagtgtcttctttgatgcagataagctcggccacgacgagggcaaggagcatcgcgtggcagcaggtgttgaattcgccaagtcgaagggctatgtgcaaactggtgactactgcgttgtgattcatgccgatcacaaggtaaagggctatgccaaccagacgcgcatacttctcgtcgaatgaggccagatcccattcgcatatgcgcgccactttgtcctatacggaaaagggactctctgaggtattatatcctttggtttgtctccgcgcccttcgaactttcgacatgtgcttgcggttagcgtgatcggtggcatgttgctgcctctgccccttttgtttgtgtgatttgtcgtaccattcacgaatggcgaatgctgtttttttttctgttttttgctgttctcctggaccacctttcgtctatacacttcttgagctgccagctaccgcctttgtcggcgcacgggatcgtgggctgtgtatttgcgttgaggggagtggaggcag

SEQ ID NO: 7699 - protein, 499 aa, Leishmania mexicana
MSQLAHNLTLSIFDPVANYRAARIICTIGPSTQSVEALKGLIQSGMSVARMNFSHGSHEYHQTTINNVRQAAAELGVNIAIALDTKGPEIRTGQFVGGDAVMERGATCYVTTDPAFADKGTKDKFYIDYQNLSKVVRPGNYIYIDDGILILQVQSHEDEQTLECTVTNSHTISDRRGVNLPGCDVDLPAVSAKDRVDLQFGVEQGVDMIFASFIRSAEQVGDVRKALGPKGRDIMIICKIENHQGVQNIDSIIEESDGIMVARGDLGVEIPAEKVVVAQKILISKCNVAGKPVICATQMLESMTYNPRPTRAEVSDVANAVFNGADCVMLSGETAKGKYPNEVVQYMARICLEAQSALNEYVFFNSIKKLQHIPMSADEAVCGSAVNSVSETKAKAMVVLSNTGAGARLVAKYRPNCPIVCVTTRLQTCRQLNITQGVESVFFDADKLGHDEGKEHRVAAGVEFAKSKGYVQTGDYCVVIHADHKVKGYANQTRILLVE

SEQ ID NO: 7700 - DNA, 1452 bp, Methylobacterium extorquens
  CDS (1)..(1452)
atgatggaggcccctttgaagcgctcgcgccgcaccaagatcgtcgccaccctcggcccggcatccgacacgccggagatgatcgagaagctgttccacgccggtgcggacgtgttccgcatcaacatgagccatctggctcgcgagaagctgcctgaacgcatcgaggtgattcgcaccatcgagcgggagggcaagcgccccatcggcatcctcgtcgaccttcagggcccgaagctgcggctcggcaccttcgtcggcgacgcggccgtgctggagaacggccagaccttcgtgctcgattcggatccgacgccgggcgataccgaccgcgtcttccttccccatcctgagatcctgtcggcgctggagcccagccacggcatcctgatcgacgatggcaagcttcgcctcatcgtcacggaggtgagcgaggggcgtgccgtcacccgcgtcgaggtcggcggtcgcatctcgaatcgcaagggcgtgtcgctgccccacaccgcgctgccggtgccggcgatgaccgagaaggatcgcggtgatctggaagcgggcctcgcggccggcgccgactggatcgcggtgtccttcgtgcagcgcccggaagacgtggcggaggtcaagaaggtcgccgccgggcgcgccctggtgatggccaagatcgagaagccgcaggcgctcacccgcctcgatgagatcatcgagatctccgacggcatcatggtcgcccgcggcgacctcggcgtcgagatgccgctcgaacaggtgccgggcgtgcagaagcgcatcacccgcgtcgcccgccggctcggcaagccggtcgtcgtcgcgacgcagatgctcgaatcgatgatcacctcaccggtgccgacccgcgccgaggtgtcggacgtggccaccgccgtctacgagggcgcggatgcggtgatgctctcggccgaaagcgccgccggcgactttccggtcgaggcgatcggcaccatgaaccgcatcgccgaacaggtggagcgcgacgcgctctactggtcgatcctgatggcgcagcgttccgagccggagccgaccgcttccgacgccatcgcggccgcggcccaccagatcgtcgaggcgctgagcctgcgctcgatcatggcctggacccattccggttcaacggtgctgcggctggcgcgcgcccggcccaatgccagcgtcatcgcgctgacgccgaagcgcgagacggcgcggcgcctcaccatggcctggggcgtgcacccgatcgtcaccaaggatgccagcgacgtggacgacatggccttccgcgccgcgaagttcgcggtgcgcgagcgcttcgccgagatcggcgaccgagtgatcatcgtggccggcgtgccgttcggcattccgggggcgaccaacatggtgcgcatcgccttcgtcacccgcgagcacgccgagcgggcctga

SEQ ID NO: 7701 - protein, 483 aa, Methylobacterium extorquens
MMEAPLKRSRRTKIVATLGPASDTPEMIEKLFHAGADVFRINMSHLAREKLPERIEVIRTIEREGKRPIGILVDLQGPKLRLGTFVGDAAVLENGQTFVLDSDPTPGDTDRVFLPHPEILSALEPSHGILIDDGKLRLIVTEVSEGRAVTRVEVGGRISNRKGVSLPHTALPVPAMTEKDRGDLEAGLAAGADWIAVSFVQRPEDVAEVKKVAAGRALVMAKIEKPQALTRLDEIIEISDGIMVARGDLGVEMPLEQVPGVQKRITRVARRLGKPVVVATQMLESMITSPVPTRAEVSDVATAVYEGADAVMLSAESAAGDFPVEAIGTMNRIAEQVERDALYWSILMAQRSEPEPTASDAIAAAAHQIVEALSLRSIMAWTHSGSTVLRLARARPNASVIALTPKRETARRLTMAWGVHPIVTKDASDVDDMAFRAAKFAVRERFAEIGDRVIIVAGVPFGIPGATNMVRIAFVTREHAERA

SEQ ID NO: 7702 - DNA, 1439 bp, Mycobacterium intracellulare
  CDS (1)..(1419)
atgagtagacgcgggaagatcgtctgcacccttgggcctgcgaccaattcggacgagttgatcttggcgctggttgaggcgggaatggacgtcgcccggttgaacttcagccacggtgattacgccgatcacaaagcggcctacgaacgggtccgggtggcctccgacgccaccggccgtgccgtcggcgtgctcgccgatttgcagggccccaagatcaggctgggacgcttcgcgaccggcccaacctactgggccgacggtgagaccgtccggatcaccgtcgccgactgcgagggcagccacgaccgggtgtcgaccacctacaagaaactggccgaggacgccgccgtcggtgaccgggttctggtcgacgacggcaaggtctgcctggtggtcgatggcatcgagggcgacgacgtcatctgcacggtcgtcgagggcggcccggtcagcaacaacaagggaatctcgttgccgggcatgaacgtgtcggcaccggccttgtcggagaaggacatcgaggacctcaccttcgccctggacctcggcgtcgacctggtcgccctgtccttcgtgcgctcgccggccgacgtcgagctggtgcacgaggtgatggaccgggtcgggcgacgggttccggtgatcgccaagctggaaaagcccgaagccgtcgacaatctggaaaccatcgtgctggccttcgacgccatcatggtggcccgcggcgacctcggcgtcgagctgccactggaagaggttccgctggtgcagaagcgggccatccagatggcccgggagaacgcgaaaccggtcatcgtggccacccagatgctcgattccatgatcgagaactcacgcccgacccgcgccgaggcctccgacgtcgccaacgccgtcctcgacggcgccgacgcggtgatgctgtccggggagacgtcggtgggcaagtatccgatggctgccgtgcggaccatgtcgcgcatcatctgcgcggtcgaggacaattccacggccgccccgccgctgacccacgtgccgcgcaccaaacgcggcgtgatctcctatgcggcccgcgacatcggcgagcggctcgacgccaaagccctggtcgccttcacccaatccggcgacacggtcaagcggctcgcgcgcctgcacaccccgctgccgctgctggccttcaccgcctggcccgaggtgcgcagccagctcgccatgacctggggcaccgaaacgttcatcgtcccgatgatgacctccacgggcggcatgatccgccaggtcgacaagtcactgctcgaactcggtcgctacaagcgcggcgacctggtggtcatcgtcgccggcgcgccacctggcacagtagggtcgaccaacctgatccacgtgcaccggatcggggaggacgacgtctaacgcccggacccgaaggagag

SEQ ID NO: 7703 - protein, 472 aa, Mycobacterium intracellulare
MSRRGKIVCTLGPATNSDELILALVEAGMDVARLNFSHGDYADHKAAYERVRVASDATGRAVGVLADLQGPKIRLGRFATGPTYWADGETVRITVADCEGSHDRVSTTYKKLAEDAAVGDRVLVDDGKVCLVVDGIEGDDVICTVVEGGPVSNNKGISLPGMNVSAPALSEKDIEDLTFALDLGVDLVALSFVRSPADVELVHEVMDRVGRRVPVIAKLEKPEAVDNLETIVLAFDAIMVARGDLGVELPLEEVPLVQKRAIQMARENAKPVIVATQMLDSMIENSRPTRAEASDVANAVLDGADAVMLSGETSVGKYPMAAVRTMSRIICAVEDNSTAAPPLTHVPRTKRGVISYAARDIGERLDAKALVAFTQSGDTVKRLARLHTPLPLLAFTAWPEVRSQLAMTWGTETFIVPMMTSTGGMIRQVDKSLLELGRYKRGDLVVIVAGAPPGTVGSTNLIHVHRIGEDDV

SEQ ID NO: 7704 - DNA, 1635 bp, Thermoplasma acidophilum
  CDS (1)..(1635)
atgaagaccaagatagttgcgacaataggcccggctagcagttcgcccgagataatgaaacagatgatagacaacggtctttcgctggtaagaataaattctgcacatgcagatataaaggatgtatcgaagataacgcagatggttcgttctatcaacagggacgttggtataatgatagacctgaagggcccagagctcagaacgggcgaattcgcgggtggtacattgaaaatatcatccggtaaggactacgtcatgggcaaagacatagtcctgaacaacatgaacgtgctttcggctgttcaggttggcgacaggatactgatgagcgatggtgaagtatcattcgaggttgaatcaacagatccgttcacaatccgggctctaaacgatggcgttctaagggacaggagccgtgtgaatatccccggccgtttcatagagctcggaaccataacggacagggatcgtgccttcataagggagggcatagcggatggcgtggacttcttcgccctttcatttgtgcagaaatctgagaacgttgacagcctgcgcgacttcgttatagacagcggtggcgatcagtacataatatcgaagatagagacgaagagcggcctggataacatagaggagatagtgaagtcatccgatggcatcatggtggcgcgtggcgatctcggtgtggaacttcccttgaaagaggtcgtgctggctcagaagcacataataaagacagcgcatgaggatggcgatttcactatcgtagcgacccaggtgctggaatccatggtaaacaacagttcacccacaagggcagagatttcagacattacaaatgcgatcatagacaatgcagatgccttaatgctctccgaggagagtgcgataggaaagtatccggttcaggccgtccgtacgctcaaggaggtttcggattacgtggaggacaaggtgtcgttcgattcttcatattactttaagggaaacaccatagcatactcagtagcaagggcagcgaagatactctctgatgatatcaagagcgatgggatagtggcacttacgcatactggatcaaccgttaggatgatatcgtcgctgaggccaaaggccatggtctacgctgccactgtaagcgagagtcttgccagaaagctgaacatatacttcggcgtattgccattgcatatggagggcaacgcagaagatcttagtttttcagagattatggaatacatagtgcgttctggtaggttcgctgatggaagtaagctcgtgatgaccagcggcgatccgtacttcacgtttggagggacgaacgacgtcaaggtggccgttgtaggcaaattcataggaagaggctattcatttggagatagcttatccggtacggcaacttacggtacgaagggagacatactcatgtctgaggatggaagaattcctggaactgatttcagggcattcatattcacatctgatatcaagccatctcttatgtcttctttaaagggaaaaacggttgtaaccaaggcaagattggttcgtcagataaaggaaggcgagcgcatatacatcgatggaaatacgggaataatactcatggcttcgccggatcaaaaataa

SEQ ID NO: 7705 - protein, 544 aa, Thermoplasma acidophilum
MKTKIVATIGPASSSPEIMKQMIDNGLSLVRINSAHADIKDVSKITQMVRSINRDVGIMIDLKGPELRTGEFAGGTLKISSGKDYVMGKDIVLNNMNVLSAVQVGDRILMSDGEVSFEVESTDPFTIRALNDGVLRDRSRVNIPGRFIELGTITDRDRAFIREGIADGVDFFALSFVQKSENVDSLRDFVIDSGGDQYIISKIETKSGLDNIEEIVKSSDGIMVARGDLGVELPLKEVVLAQKHIIKTAHEDGDFTIVATQVLESMVNNSSPTRAEISDITNAIIDNADALMLSEESAIGKYPVQAVRTLKEVSDYVEDKVSFDSSYYFKGNTIAYSVARAAKILSDDIKSDGIVALTHTGSTVRMISSLRPKAMVYAATVSESLARKLNIYFGVLPLHMEGNAEDLSFSEIMEYIVRSGRFADGSKLVMTSGDPYFTFGGTNDVKVAVVGKFIGRGYSFGDSLSGTATYGTKGDILMSEDGRIPGTDFRAFIFTSDIKPSLMSSLKGKTVVTKARLVRQIKEGERIYIDGNTGIILMASPDQK

SEQ ID NO: 7706 - DNA, 1497 bp, Trypanoplasma borreli
  CDS (1)..(1497)
atgatgcgaaaatctcaacttcagttcaacactgagcttcgtgtacatcatccaccggcactcttccgttctaacaaaattatatgtacaatcggtccgtcgtcccaaagtgtggaggtactcaaagacctcatgaaggctggtctaaatgttgcgcgcatgaatttctcccatggaacttacgagtatcatcagaagaccatcgataatgtcaggaaggcagcctcagagcttggtatacacgtaggaatcgctttagatactaaaggacctgagatccgcactggtctgttccctgctggagatgttgtgatcgaggcccacaagacagtaatattaacaactgatgagacgttcaaagaaaaaggcacagctgagaagttctacgtggattacatgaatattaccaaggtagtccctgttggtggtcatatatttgtcgatgatggtcttctggacctgatagtcgtcaagatctccggtaaagacattgagtgtgtggcgcagaacacccatactatcagcaatcggaaaggcattaatcttcctaatgcagatgtggaccttcccgcagtttctgagaaggacctgatggacttgcagttcggggccaagaatcgcgtagactttgtgttcgcctcttttattcgtaatgctgatcaggtgaatgaggtacgtcaggcttttggagggaaaatagcagtaattgcgaagattgaaaactaccaaggaatagacaatatagatgcgattattgatgcagcagatggcattatggttgctcgtggtgatctcggtgtggagattcctgcagaaaaggttgttattgcccaaaagatgatcatgtccaagtgcaataaagttggtaagacagttatatgtgctacacagatgcttgattctatgacgcacggcccccgacctacccgtgcggaggtcagcgatgtggccaagtccgtgcttgatggagctgactgtgtaatgctatcaggggaaactgcaaaagggaaatatcctgttgaaaccgtcgtatacatgtcgcgtatatgctgcgaaacacaggtcacaatgtggaacatggccgccttcgaagctatcaagaatctccaatcgttcccgctgataccagaggaagccatctgctcttctgcagttaattctatatttgagctacacgctaaggcaatattggtgctaactaatacaggtcgcagtgcacatatggtgagtaagtatcgcccacctgtccccatcatatgtgcttcgcaagagctagacgtctgtcgtctgctcagcatcacccgcggtaccatacctgtgtactatgacactgagaagctggggcctgactatgatcgtgagaagcgagttggattggcaattgatgtagggaagcagatgggtgtgttcaaagaaggagatgtcgttgtggctgttcacgctgatcatcatacaaaagggtttgcgaaccagatcagggccatatacattaaataa

SEQ ID NO: 7707 - protein, 498 aa, Trypanoplasma borreli
MMRKSQLQFNTELRVHHPPALFRSNKIICTIGPSSQSVEVLKDLMKAGLNVARMNFSHGTYEYHQKTIDNVRKAASELGIHVGIALDTKGPEIRTGLFPAGDVVIEAHKTVILTTDETFKEKGTAEKFYVDYMNITKVVPVGGHIFVDDGLLDLIVVKISGKDIECVAQNTHTISNRKGINLPNADVDLPAVSEKDLMDLQFGAKNRVDFVFASFIRNADQVNEVRQAFGGKIAVIAKIENYQGIDNIDAIIDAADGIMVARGDLGVEIPAEKVVIAQKMIMSKCNKVGKTVICATQMLDSMTHGPRPTRAEVSDVAKSVLDGADCVMLSGETAKGKYPVETVVYMSRICCETQVTMWNMAAFEAIKNLQSFPLIPEEAICSSAVNSIFELHAKAILVLTNTGRSAHMVSKYRPPVPIICASQELDVCRLLSITRGTIPVYYDTEKLGPDYDREKRVGLAIDVGKQMGVFKEGDVVVAVHADHHTKGFANQIRAIYIK

SEQ ID NO: 7708 - DNA, 1629 bp, Yarrowia lipolytica
  CDS (1)..(1629)
atgatttacaccgccaattcgtccccttccaccaacctgcagtggctcagtaccctgaacacggatgacattcccaccaagaactaccgaaagtcgtccatcattggtactatcggtcccaacacaaactccgccgagatgatctccaagcttcgacaagctggtctcaacattgttcgaatgaacttctcccacggctcgtacgagtaccaccagtccgtcattgagaacgcccgagagtccgagcagcggttccgaggccgacccctagccattgctctcgacaccaagggccccgagatccgaaccggtgtcaccaaggacgacaaggactgggacgtcaaggccggccatgtcatgctcttctccaccaaccccaagtacaaggaccagtgcgacgataagatcatgtacattgactacaccaacattgtcaagcagattgacattggcaagatcatcttcgttgacgacggtgttctgtccttcaaggttctcgagaagattgacggcgagaccctcaaggtcgagactctcaacaacggtaagatctcttctcgaaagggtgtcaacctccctggcaccgatgtcgatctccccgctctgtccgagaaggacaaggccgatctcaagtttggtgttgagcacggtgtcgacatgatttttgcctctttcgtccgaaccgccaacgacgtccaggccatccgagacgtgctcggcgagaagggcaagggcatccaggtcatctccaagattgagaaccagcagggtgtcaacaactttgacgagattctgaaggagaccgacggtgtcatggttgcccgaggagacttgggtatcgagatccccgccccccaggttttcattgcccagaagcagctgatcgccaagtgtaacctggccggaaagcccgtcatctgtgccacccagatgctcgattccatgacctacaacccccgacccacccgagccgaggtctctgatgtcggtaacgccgtccttgatggtgctgactgtgtcatgctgtctggtgagacggccaagggaacctaccccattgagtccgtcaagatgatgcacgagacctgtctggttgccgagaaggccattgcctatgctcctctgttcaatgagatgcgaaccctgactgtccgacccaccgagaccgtcgagaccattgctatctccgccgtgtctgcttctttcgagcagcaggcccgagctattattgtgctgtccacatcgggaacctccgcccgactgtgttccaagtatcgacccaactgtcccattcttatggtgactcgaaacgcacaggccgctcgattctcccatctgtaccgaggcgtctaccccttcatctaccacaaggcccgagcttccaaccctgccgagtggcagcacgatgttgaggagcgactcaagtggggtatggacgaggctgttgctcttggtattcttaacaagggcgatgttgttgtcgccatccagggatggaccggtggtctggccacaccaacactctccgagttctcgagtgtgtctaaactttttaacacaaacctattagattataaaacatacagcatggtgattaagtcggtgaacggaggggttttgtacaagtag

SEQ ID NO: 7709 - protein, 542 aa, Yarrowia lipolytica
MIYTANSSPSTNLQWLSTLNTDDIPTKNYRKSSIIGTIGPNTNSAEMISKLRQAGLNIVRMNFSHGSYEYHQSVIENARESEQRFRGRPLAIALDTKGPEIRTGVTKDDKDWDVKAGHVMLFSTNPKYKDQCDDKIMYIDYTNIVKQIDIGKIIFVDDGVLSFKVLEKIDGETLKVETLNNGKISSRKGVNLPGTDVDLPALSEKDKADLKFGVEHGVDMIFASFVRTANDVQAIRDVLGEKGKGIQVISKIENQQGVNNFDEILKETDGVMVARGDLGIEIPAPQVFIAQKQLIAKCNLAGKPVICATQMLDSMTYNPRPTRAEVSDVGNAVLDGADCVMLSGETAKGTYPIESVKMMHETCLVAEKAIAYAPLFNEMRTLTVRPTETVETIAISAVSASFEQQARAIIVLSTSGTSARLCSKYRPNCPILMVTRNAQAARFSHLYRGVYPFIYHKARASNPAEWQHDVEERLKWGMDEAVALGILNKGDVVVAIQGWTGGLATPTLSEFSSVSKLFNTNLLDYKTYSMVIKSVNGGVLYK

SEQ ID NO: 7710 - DNA, 1596 bp, Oryctolagus cuniculus
  CDS (1)..(1596)
atgtcaaagtcccacagtgaagccgggtctgccttcatccagacgcagcagctgcacgcagccatggcggacacattcctggagcacatgtgccgcctggacatcgactccgcgcccatcacggcccgcaacacgggcatcatctgtaccattggccctgcctcccgatctgtggagacgctgaaggagatgatcaagtctgggatgaacgtggcgcgcatgaacttctcccacggaactcacgagtaccatgcggagaccatcaagaacgtgcgcacagccacggaaagctttgcctcagaccccatcctctaccggcccgtcgcggtggctctggacactaagggacccgagatccgaacggggctcatcaagggcagcggcacggcggaggtggagctgaagaagggagccacgctcaagatcacgctggacaacgcctacatggagaagtgcgacgagaacatcctgtggctggactacaagaacatttgcaaggtggtggacgtgggcagcaaggtctacgtggacgatggcctcatctccctgcaggtgaagcagaaaggtcctgacttcctggtgacggaggtggagaacggtggcttcttgggcagcaagaagggcgtgaacctccccggggctgcggtggacctgcctgccgtgtccgagaaggacatccaggatctgaagttcggcgtggagcaggacgtggacatggtgtttgcctctttcatccgcaaggcggctgacgtccatgaggtcaggaagatcctgggagagaaagggaagaacatcaagatcatcagcaaaattgagaaccacgagggggtgcgcaggtttgatgagatcctggaggccagcgacgggatcatggtggctcgtggtgatcttggcattgagattcctgcagagaaggtcttccttgcccagaagatgataattgggcgatgcaaccgtgctgggaagcctgtcatctgtgccacgcagatgctggagagcatgatcaagaagccccgccccacccgcgccgagggcagtgacgtggccaacgcggtcctggatggagccgactgcatcatgctgtctggagagacggccaagggcgactaccccctggaggccgtccgcatgcagcacctgatagctcgcgaggctgaggcagccatgttccaccgcaagctgttcgaagaacttgcgcgcagctccagtcactccacagacctcatggaggccatggccatgggcagcgtggaggcttcctataagtgtttagcggcagctttgatagttctcacggagtctggcaggtctgctcaccaagtggcccggtaccgcccgcgcgcccccatcattgccgtgacacggaaccaccagaccgcccgccaggcccacctgtaccgtgggatcttcccggtggtgtgtaaggatccggtccaggaggcctgggcagaggatgtcgacctccgggtaaacttggccatgaatgtcgggaaggcccgcggtttcttcaagaagggagatgtggtcattgtgctcaccggatggcgccctggctctggcttcaccaacaccatgcgcgtggtgcccgtcccgtga

SEQ ID NO: 7711 - protein, 531 aa, Oryctolagus cuniculus
MSKSHSEAGSAFIQTQQLHAAMADTFLEHMCRLDIDSAPITARNTGIICTIGPASRSVETLKEMIKSGMNVARMNFSHGTHEYHAETIKNVRTATESFASDPILYRPVAVALDTKGPEIRTGLIKGSGTAEVELKKGATLKITLDNAYMEKCDENILWLDYKNICKVVDVGSKVYVDDGLISLQVKQKGPDFLVTEVENGGFLGSKKGVNLPGAAVDLPAVSEKDIQDLKFGVEQDVDMVFASFIRKAADVHEVRKILGEKGKNIKIISKIENHEGVRRFDEILEASDGIMVARGDLGIEIPAEKVFLAQKMIIGRCNRAGKPVICATQMLESMIKKPRPTRAEGSDVANAVLDGADCIMLSGETAKGDYPLEAVRMQHLIAREAEAAMFHRKLFEELARSSSHSTDLMEAMAMGSVEASYKCLAAALIVLTESGRSAHQVARYRPRAPIIAVTRNHQTARQAHLYRGIFPVVCKDPVQEAWAEDVDLRVNLAMNVGKARGFFKKGDVVIVLTGWRPGSGFTNTMRVVPVP

SEQ ID NO: 7712 - DNA, 1799 bp, Xenopus laevis
  CDS (11)..(1606)
atcagagaacatggcgcagctgatgcaggacctgggaccggctttcgtccaacggcagcagctgaatgcctcaatggccgacaccttcctggatcacatgtgtctgttggacattgactcggagcccataacggccagaaacaccagcattgtctgtaccatcggtccagcctcgcgctctgtggaaatgctgaaggagatgataaaggctgggatgaacatcgctcgtctgaacttctctcacgggagccatgagtaccacgctgggtctattcacaatattcgggaagccaccgagagctttgcctcaaatcccattcactaccggcctgtggctatcgctctggacaccaaggggccagaaatccgaactggggtcatcaagacgggggagaacacagaggtggagctgatgaaaggctcaattatgaaagtgactaatgacgagtccttcaaggataagtgtgacgagaagatcctgtgggtggattataagaacatctgtaaagttgtgaaggtcggaggcaggatttttgtggacgatggactgatttctctgttggttagagagattggccctgattactgcatggctgaagtggagaatgggggtaacctgtgcagtaagaaaggggtgaatttgcctggggctccggtggaccttcctgcattatcggagagagattgcctggacttgaagtttgggattgagcagggagtagacatggtatttgcttccttcattcgcaaggcgcaagatgtacacaccattcgcaaggaactgggagaaaaaggtcggaatattcgcatcatcagcaaaatagaaaatcatgagggagtcaagaggttcgatgagattctcgaggccagtgatgggataatggtggcccggggtgatctcggcattgaaattccagcagagaaggttttcttggcacagaaaatgatgattggacgttgcaacagagccgggaagccagtgatctgtgccacgcagatgttggagagtatgatcaagaagcctcgtccgacccgtgcggagagcagtgatgtggccaatgctgtgctggatggagctgactgtatcatgttgtctggagagactgccaagggcctgtacccagtggagtctgtacacatgcagcatgcgattgcccgggaggctgaggcagcgatctacaatcgccagctgtttgaggaactcagacgagtgaccccactgacccaggatcccacagaggtgactgccataggggctgtagaggcctcgtttaaatgctgtgctggagccatcattgttctgaccacgtctggccggtctgcgcaactcctttctcgttaccgccctcgtgctcccatcattgcagtgacacgtagtgcccaggtggggcgccaggctcatctcaaccgcggggtcttccctgtcctgtaccaggaggcgcagctggaagtttgggctgatgatgtggatcgtagggtgcagtttgccatttccattggaaaagtccgtgggttcctgagcaaagacgacattgtgattattgtgactggctggaggcctgggtctggctacaccaatatcatgcaggtggtgagggtgccgtaagcctggcagtacaacactactcacaccctgtacctggggtcccctgtacaagtgggggtttccctgtatgtacccagtattttatcaatgcaggtttcctttatctgcttcccattccatattaaacatgggccaaagcttcaaaaaaaaaaaaaaaaaaaaaaaaaaaaaaaaaaaaaaaaaaaaaaaaaaa

SEQ ID NO: 7713 - protein, 531 aa, Xenopus laevis
MAQLMQDLGPAFVQRQQLNASMADTFLDHMCLLDIDSEPITARNTSIVCTIGPASRSVEMLKEMIKAGMNIARLNFSHGSHEYHAGSIHNIREATESFASNPIHYRPVAIALDTKGPEIRTGVIKTGENTEVELMKGSIMKVTNDESFKDKCDEKILWVDYKNICKVVKVGGRIFVDDGLISLLVREIGPDYCMAEVENGGNLCSKKGVNLPGAPVDLPALSERDCLDLKFGIEQGVDMVFASFIRKAQDVHTIRKELGEKGRNIRIISKIENHEGVKRFDEILEASDGIMVARGDLGIEIPAEKVFLAQKMMIGRCNRAGKPVICATQMLESMIKKPRPTRAESSDVANAVLDGADCIMLSGETAKGLYPVESVHMQHAIAREAEAAIYNRQLFEELRRVTPLTQDPTEVTAIGAVEASFKCCAGAIIVLTTSGRSAQLLSRYRPRAPIIAVTRSAQVGRQAHLNRGVFPVLYQEAQLEVWADDVDRRVQFAISIGKVRGFLSKDDIVIIVTGWRPGSGYTNIMQVVRVP

SEQ ID NO: 7714 - DNA, 2404 bp, Brachydanio rerio
  CDS (37)..(1635)
gtcagcgagagcaggatattaccagtctcctccacgatgtctcaaactaaagctcaggatatgggctctgccttcatccagacgcagcagctcaatgctgccatggccgacactttcctggagcacatgtgtctgctggacatcgactccgagcccaccatcgctcgcaacactggaatcatctgcaccatcggaccggcctcccgctcagtggacacactgaaggagatgatcaagtctggcatgaacatcgctcgcatgaacttctctcacggctcacacgagtatcatggagaaactattaaaaatgtacgtgaggcttgtgccagcttcaagccgggcagcatccagtacaggccagtgggcatcgccctcgacaccaaaggaccagaaatccgaactgggctcattaaagggagtggcacagctgaggtggagctgaagaagggaaataagatcaaggtgaccttagacgactccttcatggagaactgtgatgaagataccctctggctggactacaagaacatcaccaaggtggtggaggtgggcagtaaagtctacatcgatgacggactcatctctctccaggttctgcagatcgggtctgactatctgatctgtgagattgagaatggaggatctctgggcagtaagaagggtgtgaatctgccgggagccgcagtggatctgcctgcagtctcagagaaggacatcaaggatctgcagttcggtgtggagatgggtgtcgatatgatcttcgcctccttcatccgcaaggccgctgatgtgcaggcagtccgaaaagtgctgggagaaaagggcaaaaacatcaagattatcagcaagctggagaaccatgagggagtgcgcaggtttgatgagattatggaggccagcgacggcatcatggtggctcgtggtgatctaggaattgaaatccccacggaaaaggtgtttctggctcagaagatgatgattggtcgttgcaacaaggcaggaaagccaatcatctgtgccacacagatgttggagagcatgatcaagaagcctcgtcctacacgtgcggagggcagtgatgtggccaatgcagttctggacggagccgactgcattatgctgagcggagagacagctaaaggagattaccctctggaggccgtccgcacacagcacatgatcgctcgggaggcagaggctgccatgtttcatcggcaggtgtttgaggacctgcggcgctgtttgccactctccaccgaccccgccgaggccatcgccatcggggcagtggaggcctcctttaaaatcctgtcctcagcgtttatagtgctcactgggtccggcaggtctgctcatctgatctctcggtatcgtcctcgcgctccaatcctagcggtgacacgtaatgaacagacagctcgacaggctcatctttaccgtggtattttccccatatactacaacagcccatctaatgatgtgtgggccgaggacgtggacctgagggtcaacttcgccatggatgtcggtaaagctcgtggattcttcaaggctggtgatgtggtgatcgttctgactggctggcgtcccggctctggatacaccaacaccatgcgtgtcgtcccagtgccgtaaaaccgttaaaacccctctgctgttcatacatcactcctccatacatcacacaaaccccactccagcagaaaacacaaggccagtggaccaccctgttatcttctccccctgattggtcagtggatcatcatcctctctcctgattggttggtgtcccatcatcctctcatttgattggttgttctcacctgttttgtttttttatttcatctataatctcctgtttatctcacacacacatgaaacccgagctgtctgtctggtttgtgtctgtctgtccgcatggtgaagcgcagggatgggtggcgaatgctcaatcagctgtaacctgtaacggttatattagtagtgtttctctgtctgtgtgcttttatttgtgttcacactcctgacgatgttacattgtgtgtttgcactcgaccctgagatcgttatatattcatatattttctgaaatgtttggatgtctcgcgtccgcctcatttcagctgtggagtaaaggaggggtgaatattaatcattcccagcatcctctgctgtataaccccgtctctgctgctcacgtgtgtgtgtgtgtttgatgaatgaatgagagtgtgtgtttagatctacctgctttgtgtcgctagagtgcaagatgtactaactataagagtaatctatagtctcattctgaagtgttgtattattggagactgaattaataaaggagacgagcacttgaaaaaaaaaaaaaaaaaaaaaaaaaaaaaaaaaaaaaaaaaaaaaa

SEQ ID NO: 7715 - protein, 532 aa, Brachydanio rerio
MSQTKAQDMGSAFIQTQQLNAAMADTFLEHMCLLDIDSEPTIARNTGIICTIGPASRSVDTLKEMIKSGMNIARMNFSHGSHEYHGETIKNVREACASFKPGSIQYRPVGIALDTKGPEIRTGLIKGSGTAEVELKKGNKIKVTLDDSFMENCDEDTLWLDYKNITKVVEVGSKVYIDDGLISLQVLQIGSDYLICEIENGGSLGSKKGVNLPGAAVDLPAVSEKDIKDLQFGVEMGVDMIFASFIRKAADVQAVRKVLGEKGKNIKIISKLENHEGVRRFDEIMEASDGIMVARGDLGIEIPTEKVFLAQKMMIGRCNKAGKPIICATQMLESMIKKPRPTRAEGSDVANAVLDGADCIMLSGETAKGDYPLEAVRTQHMIAREAEAAMFHRQVFEDLRRCLPLSTDPAEAIAIGAVEASFKILSSAFIVLTGSGRSAHLISRYRPRAPILAVTRNEQTARQAHLYRGIFPIYYNSPSNDVWAEDVDLRVNFAMDVGKARGFFKAGDVVIVLTGWRPGSGYTNTMRVVPVP

SEQ ID NO: 7716 - DNA, 26 bp, Artificial sequence
  Primer sequence
atgtctagattagaaagattgacctc

SEQ ID NO: 7717 - DNA, 25 bp, Artificial sequence
  Primer sequence
ttaaacggtagagacttgcaaagtg

SEQ ID NO: 7718 - DNA, 1755 bp, Saccharomyces cerevisiae
  CDS (1)..(1755)
atgggaatacacataccatatctcacgtcaaagacatcgcaatcaaatgttggtgatgccgttggcaacgctgatagtgtagagttcaacagtgagcatgactcaccttcaaagagaggtaaaattacacttgagtcacatgaaatacagagggctcccgctagcgatgatgaagataggattcaaattaaacccgtgaacgacgaggatgacacgtcggtcatgatcacttttaaccaatctctttcgcccttcatcatcactctgacttttgtcgcatccatatccggtttcatgtttggttacgacactggttatatatccagtgcgctgatctcgatcggcacagatctggaccacaaggtacttacttatggggagaaggaaattgtcactgcggctacctctctgggagctttgattaccagtattttcgccggtactgcagctgacatatttggtaggaaacgttgtttaatgggttcgaatctgatgtttgtcattggcgcaatcttacaggtctccgcacacacattctggcaaatggctgttggtagactgatcatgggtttcggtgtcggtatcggctccttgatcgcgccacttttcatcagtgaaattgctcccaaaatgatcagagggagactaactgtcatcaattccttatggttgactggtggtcaattagtcgcttacggttgcggtgctgggttaaactacgtcaacaatggttggagaattcttgttggattgtcactaattcccactgctgtgcaattcacatgcctgtgctttttacctgacactccaagatactacgttatgaagggcgacttggcaagggctactgaggtgttgaagagaagttacactgacacttcggaggaaatcattgaacgtaaggtggaagaacttgttactttgaatcaatctattcctggtaagaatgtccctgaaaaagtctggaataccatcaaagaattgcacacagtaccatctaatctaagggctttgatcattggttgtggtttacaagcaattcaacagtttaccggttggaattcgttgatgtatttctctggtaccatcttcgaaactgtcggtttcaaaaattcttccgctgtttcaatcatcgtgtccggtaccaattttattttcactttagttgcctttttttccattgacaaaataggccgtagaaccatattattgattggattaccaggcatgaccatggctttagtcgtgtgctctattgctttccattttctaggtattaagtttgatggcgctgtcgctgtggtggtttcctccggtttctcctcttggggtattgtgatcatcgtatttattatcgtatttgctgcgttctacgctcttggtatcggtactgttccatggcaacaatcggaactattcccccaaaacgtgagaggtattgggacttcatatgcaactgctacaaactgggctggttcactggttattgcatccacatttttgaccatgttacagaatatcactcctgcaggtacatttgcctttttcgcgggattgtcgtgcttatcaaccattttctgctacttctgttatccagaattatcgggattggagttagaagaggtacaaactattttgaaggacgggttcaacatcaaagcctcgaaagctttggccaagaagagaaaacagcaagttgccagagttcatgaattgaaatatgaaccaactcaagagattatagaggatatatag

SEQ ID NO: 7719 - protein, 584 aa, Saccharomyces cerevisiae
MGIHIPYLTSKTSQSNVGDAVGNADSVEFNSEHDSPSKRGKITLESHEIQRAPASDDEDRIQIKPVNDEDDTSVMITFNQSLSPFIITLTFVASISGFMFGYDTGYISSALISIGTDLDHKVLTYGEKEIVTAATSLGALITSIFAGTAADIFGRKRCLMGSNLMFVIGAILQVSAHTFWQMAVGRLIMGFGVGIGSLIAPLFISEIAPKMIRGRLTVINSLWLTGGQLVAYGCGAGLNYVNNGWRILVGLSLIPTAVQFTCLCFLPDTPRYYVMKGDLARATEVLKRSYTDTSEEIIERKVEELVTLNQSIPGKNVPEKVWNTIKELHTVPSNLRALIIGCGLQAIQQFTGWNSLMYFSGTIFETVGFKNSSAVSIIVSGTNFIFTLVAFFSIDKIGRRTILLIGLPGMTMALVVCSIAFHFLGIKFDGAVAVVVSSGFSSWGIVIIVFIIVFAAFYALGIGTVPWQQSELFPQNVRGIGTSYATATNWAGSLVIASTFLTMLQNITPAGTFAFFAGLSCLSTIFCYFCYPELSGLELEEVQTILKDGFNIKASKALAKKRKQQVARVHELKYEPTQEIIEDI

SEQ ID NO: 7720 - DNA, 1560 bp, Glycine max
  CDS (1)..(1560)
atgcctgcggtaggaggtattagcaacggagggggcaaggagtaccctggaagcctcactccttttgtgacggtaacatgtatagttgcagccatgggtgggttaatcttcggttacgatatcggaatttcaggtggggtgacatccatggatccgtttctgctcaagtttttcccgtcggtgttccggaagaagaattccgacaaaacggtgaaccagtactgtcaatacgacagccagacactgacgatgttcacgtcgtcgctgtatctcgccgcgttgctgtcgtcgttggttgcctccaccgtcacacgtaggttcggccgaaaactctccatgcttttcggaggcttgcttttcctcgtcggtgcccttatcaacggttttgcccaacacgtgtggatgctcatcgtgggtcggatcttgctcgggttcggtatcgggtttgccaatcaatctgtgccactctacctatctgaaatggcttcatacaaatatagaggagcattgaacattggctttcaattgccaatcacattggtattcctcgtggccaatgtgttgaactacttctttggtaaaatccatggtggttggggatggaagattgaagtttgggaaggtgctatggtccctgcccttataatcacagtaggatcactagtccttccagacactcccaattccatgattgaaaggggtgatcgcgagaaggccaaggctcagcttcagagaattcgcggcatcgacaatgttgatgaagagttcaatgaccttgtggcagcaagtgaatcctctagccaagtggagcacccttggaggaacttgttgcaaagaaagtacagaccccacctcaccatggcagtgttgattccattcttccagcaactcactggaatcaatgtcatcatgttttacgcgccggtcctgttcagctccatcgggtttaaggatgatgctgctctaatgtcagctgtgatcaccggcgttgttaatgttgtcgcaacttgtgtctcaatttatggtgttgacaagtggggtaggagagcccttttccttgaaggtggagtccaaatgctcatttgccaggctgtagttgcagctgcaattggagcaaagtttggaactgatgggaacccaggtgatttgccaaagtggtatgcaattgttgtggttctcttcatttgcatttatgtatcagcatttgcctggtcatggggtcccctaggttggttggtgcctagtgagatctttcccttggagattcgttcggctgctcagagtatcaatgtgtcggtgaacatgcttttcactttcttgattgcacaagtcttcttgacaatgctttgccacatgaagttcggcttgttcctcttctttgccttcttcgtgttgatcatgacattcttcgtctacttcttcttgcccgaaacaaagggcattccaattgaagaaatggggcaggtttggcaggcacaccccttctggtccagattcgtggagcatgatgattatggcaatggtgttgagatgggaaagggagctattaaagaagtgtag

SEQ ID NO: 7721 - protein, 519 aa, Glycine max
MPAVGGISNGGGKEYPGSLTPFVTVTCIVAAMGGLIFGYDIGISGGVTSMDPFLLKFFPSVFRKKNSDKTVNQYCQYDSQTLTMFTSSLYLAALLSSLVASTVTRRFGRKLSMLFGGLLFLVGALINGFAQHVWMLIVGRILLGFGIGFANQSVPLYLSEMASYKYRGALNIGFQLPITLVFLVANVLNYFFGKIHGGWGWKIEVWEGAMVPALIITVGSLVLPDTPNSMIERGDREKAKAQLQRIRGIDNVDEEFNDLVAASESSSQVEHPWRNLLQRKYRPHLTMAVLIPFFQQLTGINVIMFYAPVLFSSIGFKDDAALMSAVITGVVNVVATCVSIYGVDKWGRRALFLEGGVQMLICQAVVAAAIGAKFGTDGNPGDLPKWYAIVVVLFICIYVSAFAWSWGPLGWLVPSEIFPLEIRSAAQSINVSVNMLFTFLIAQVFLTMLCHMKFGLFLFFAFFVLIMTFFVYFFLPETKGIPIEEMGQVWQAHPFWSRFVEHDDYGNGVEMGKGAIKEV

SEQ ID NO: 7722 - DNA, 1536 bp, Glycine max
  CDS (1)..(1536)
atggctggtggaggattgacaaatggaggtccaggcaaaagagctcatctctatgagcacaaattcactgcttattttgcctttacctgtgttgttggagctcttggtggttctctttttggttatgatcttggtgtttcaggtggggtgccttcaatggatgatttcctgaaggaattcttcccaaaggtttacagaaggaagcagatgcatctgcatgaaacagactattgtaaatatgacgaccaagtgctgacactgtttacatcatctctttatttctcagcacttgtcatgacattctttgcttccttcttgacaagaaagaagggaagaaaggccattatcattgtgggagcccttagcttcctggctggggctatcctcaatgccgcagccaagaacattgcaatgctaattattggcagagtccttcttggtggaggcattggatttggcaaccaagctgttccattgtatctttcggaaatggctccagctaagaaccgaggagcagtgaaccaactgtttcagttcacaacttgtgctggaatcttaattgcaaacctagtgaattactttactgaaaaaatccatccctatggatggaggatatctctgggtttggcaggtcttccagcatttgcaatgcttgttggaggtatttgttgtgctgagacaccaaacagccttgtggagcaaggaaggttggataaagcaaaacaagtattgcagagaattagaggtaccgagaacgttgaagccgaatttgaggatcttaaagaagccagtgaagaagcacaagctgttaagagcccgtttaggacactcctcaagaggaagtacaggccacaactgatcataggtgcattggggattccagcgttccagcagctaactggcaataactccatcctcttctatgcccctgtcatttttcagagcttgggctttggtgccaatgcttcactgttttcatcttttattaccaatggggctcttcttgttgccactgtcatctcaatgtttttggttgacaagtatggtagaagaaaattctttctggaagctggctttgaaatgatatgctgcatgattattacaggtgcagtcttggctgtgaactttgggcacggcaaagaaattgggaaaggagtgagtgcctttctggttgttgtgatcttcttgttcgttttggcatatgggagatcttggggtccccttgggtggttggttcccagtgagctcttcccattagagataagatcatctgcacagagtattgtggtctgtgtcaacatgatcttcactgcacttgttgctcaattgttcctcatgtcactttgccacctcaaatttgggatcttcttgctctttgcttccttaattatcttcatgagcttctttgtcttcttccttttgcccgaaaccaagaaagttccaattgaggagatttatcttctttttgagaatcattggttctggaggagatttgtaactgaccaagacccagagacatcaaaggggactgcttaa

SEQ ID NO: 7723 - protein, 511 aa, Glycine max
MAGGGLTNGGPGKRAHLYEHKFTAYFAFTCVVGALGGSLFGYDLGVSGGVPSMDDFLKEFFPKVYRRKQMHLHETDYCKYDDQVLTLFTSSLYFSALVMTFFASFLTRKKGRKAIIIVGALSFLAGAILNAAAKNIAMLIIGRVLLGGGIGFGNQAVPLYLSEMAPAKNRGAVNQLFQFTTCAGILIANLVNYFTEKIHPYGWRISLGLAGLPAFAMLVGGICCAETPNSLVEQGRLDKAKQVLQRIRGTENVEAEFEDLKEASEEAQAVKSPFRTLLKRKYRPQLIIGALGIPAFQQLTGNNSILFYAPVIFQSLGFGANASLFSSFITNGALLVATVISMFLVDKYGRRKFFLEAGFEMICCMIITGAVLAVNFGHGKEIGKGVSAFLVVVIFLFVLAYGRSWGPLGWLVPSELFPLEIRSSAQSIVVCVNMIFTALVAQLFLMSLCHLKFGIFLLFASLIIFMSFFVFFLLPETKKVPIEEIYLLFENHWFWRRFVTDQDPETSKGTA

SEQ ID NO: 7724 - DNA, 2856 bp, Homo sapiens (man)
  CDS (180)..(1658)
tagtcgcgggtccccgagtgagcacgccagggagcaggagaccaaacgacgggggtcggagtcagagtcgcagtgggagtccccggaccggagcacgagcctgagcgggagagcgccgctcgcacgcccgtcgccacccgcgtacccggcgcagccagagccaccagcgcagcgctgccatggagcccagcagcaagaagctgacgggtcgcctcatgctggctgtgggaggagcagtgcttggctccctgcagtttggctacaacactggagtcatcaatgccccccagaaggtgatcgaggagttctacaaccagacatgggtccaccgctatggggagagcatcctgcccaccacgctcaccacgctctggtccctctcagtggccatcttttctgttgggggcatgattggctccttctctgtgggccttttcgttaaccgctttggccggcggaattcaatgctgatgatgaacctgctggccttcgtgtccgccgtgctcatgggcttctcgaaactgggcaagtcctttgagatgctgatcctgggccgcttcatcatcggtgtgtactgcggcctgaccacaggcttcgtgcccatgtatgtgggtgaagtgtcacccacagcctttcgtggggccctgggcaccctgcaccagctgggcatcgtcgtcggcatcctcatcgcccaggtgttcggcctggactccatcatgggcaacaaggacctgtggcccctgctgctgagcatcatcttcatcccggccctgctgcagtgcatcgtgctgcccttctgccccgagagtccccgcttcctgctcatcaaccgcaacgaggagaaccgggccaagagtgtgctaaagaagctgcgcgggacagctgacgtgacccatgacctgcaggagatgaaggaagagagtcggcagatgatgcgggagaagaaggtcaccatcctggagctgttccgctcccccgcctaccgccagcccatcctcatcgctgtggtgctgcagctgtcccagcagctgtctggcatcaacgctgtcttctattactccacgagcatcttcgagaaggcgggggtgcagcagcctgtgtatgccaccattggctccggtatcgtcaacacggccttcactgtcgtgtcgctgtttgtggtggagcgagcaggccggcggaccctgcacctcataggcctcgctggcatggcgggttgtgccatactcatgaccatcgcgctagcactgctggagcagctaccctggatgtcctatctgagcatcgtggccatctttggctttgtggccttctttgaagtgggtcctggccccatcccatggttcatcgtggctgaactcttcagccagggtccacgtccagctgccattgccgttgcaggcttctccaactggacctcaaatttcattgtgggcatgtgcttccagtatgtggagcaactgtgtggtccctacgtcttcatcatcttcactgtgctcctggttctgttcttcatcttcacctacttcaaagttcctgagactaaaggccggaccttcgatgagatcgcttccggcttccggcaggggggagccagccaaagtgataagacacccgaggagctgttccatcccctgggggctgattcccaagtgtgagtcgccccagatcaccagcccggcctgctcccagcagccctaaggatctctcaggagcacaggcagctggatgagacttccaaacctgacagatgtcagccgagccgggcctggggctcctttctccagccagcaatgatgtccagaagaatattcaggacttaacggctccaggattttaacaaaagcaagactgttgctcaaatctattcagacaagcaacaggttttataatttttttattactgattttgttatttttatatcagcctgagtctcctgtgcccacatcccaggcttcaccctgaatggttccatgcctgagggtggagactaagccctgtcgagacacttgccttcttcacccagctaatctgtagggctggacctatgtcctaaggacacactaatcgaactatgaactacaaagcttctatcccaggaggtggctatggccacccgttctgctggcctggatctccccactctaggggtcaggctccattaggatttgccccttcccatctcttcctacccaaccactcaaattaatctttctttacctgagaccagttgggagcactggagtgcagggaggagaggggaagggccagtctgggctgccgggttctagtctcctttgcactgagggccacactattaccatgagaagagggcctgtgggagcctgcaaactcactgctcaagaagacatggagactcctgccctgttgtgtatagatgcaagatatttatatatatttttggttgtcaatattaaatacagacactaagttatagtatatctggacaagccaacttgtaaatacaccacctcactcctgttacttacctaaacagatataaatggctggtttttagaaacatggttttgaaatgcttgtggattgagggtaggaggtttggatgggagtgagacagaagtaagtggggttgcaaccactgcaacggcttagacttcgactcaggatccagtcccttacacgtacctctcatcagtgtcctcttgctcaaaaatctgtttgatccctgttacccagagaatatatacattctttatcttgacattcaaggcatttctatcacatatttgatagttggtgttcaaaaaaacactagttttgtgccagccgtgatgctcaggcttgaaatcgcattattttgaatgtgaagggaa

SEQ ID NO: 7725 - protein, 492 aa, Homo sapiens (man)
MEPSSKKLTGRLMLAVGGAVLGSLQFGYNTGVINAPQKVIEEFYNQTWVHRYGESILPTTLTTLWSLSVAIFSVGGMIGSFSVGLFVNRFGRRNSMLMMNLLAFVSAVLMGFSKLGKSFEMLILGRFIIGVYCGLTTGFVPMYVGEVSPTAFRGALGTLHQLGIVVGILIAQVFGLDSIMGNKDLWPLLLSIIFIPALLQCIVLPFCPESPRFLLINRNEENRAKSVLKKLRGTADVTHDLQEMKEESRQMMREKKVTILELFRSPAYRQPILIAVVLQLSQQLSGINAVFYYSTSIFEKAGVQQPVYATIGSGIVNTAFTVVSLFVVERAGRRTLHLIGLAGMAGCAILMTIALALLEQLPWMSYLSIVAIFGFVAFFEVGPGPIPWFIVAELFSQGPRPAAIAVAGFSNWTSNFIVGMCFQYVEQLCGPYVFIIFTVLLVLFFIFTYFKVPETKGRTFDEIASGFRQGGASQSDKTPEELFHPLGADSQV

SEQ ID NO: 7726 - DNA, 2487 bp, Oryctolagus cuniculus (domestic rabbit)
  CDS (124)..(1602)
cggcgcgcaggcagcgagaggccgagcgacccaagtcggagtcagccgccgtcggagtctcgggatccgaatcgcagagcccgcccgccgacccagcactgccagaaccactagcgcagggccatggaacccagcagcaagaaggtgacgggccgcctcatgctggccgtgggaggagcagtgctcggctccctgcagtttggctacaacactggagtcatcaacgccccccagaaggtgatcgaggagttctacaaccagacgtggatccaccgctatggggagcgcatcttgcccaccacgctcaccacgctgtggtccctctcggtggccatcttctccgtcgggggaatgattggctccttctctgtgggcctcttcgttaaccgctttggccggcggaactcaatgctgatgatgaacctgctggccttcgtgtccgccgtgctcatgggcttctcaaagctggccaagtccttcgagatgctcatcctgggccgcttcatcattggcgtgtactgcggcctgaccacaggcttcgtgcccatgtacgtgggggaggtgtcgcctacagccctgcgcggggccctgggtaccctgcaccagctgggcatcgtcgtcggcatcctcatcgcgcaggtgttcggcctggactccatcatgggcaacgaggacctgtggcccctgctgctgagcgtcatcttcgtcccagccctgctgcagtgcatcgtgctgcccctgtgccccgagagcccccgcttcctgctcatcaaccgcaacgaggagaaccgggccaagagtgtgctgaagaagctgcgtgggaatgccgacgtgacccgggacctgcaggagatgaaggaggagagccggcagatgatgcgggagaagaaggtcaccatcctggagctcttccgctcacctgcctaccgccagcccatcctcagcgccgtggtgctgcagctgtcccagcagctgtccggcatcaacgccgtcttctattactccacgagcatcttcgagaaggcgggggtgcagcagcctgtgtacgccaccatcggctccggcatcgtcaacaccgccttcaccgtcgtatcgctgttcgtggtggagcgagccggccggcggaccctgcacctcatcggcctggcaggcatggcagcgtgtgctgtgctcatgaccatcgcgctggccctgctggagcagctgccctggatgtcctatctgagcatcgtggccatctttggcttcgtggccttctttgaagtgggccctggccccatcccgtggttcatcgtggctgagctcttcagccagggtcctcggccagcagctgttgccgtcgctggcttctccaactggacctcgaatttcattgtgggcatgtgcttccagtatgtggagcaactgtgcggcccctacgtgttcatcatcttcaccgtgctcctggttctgttcttcatcttcacctacttcaaagttcctgagactaaaggccggaccttcgatgagatcgcttccggcttccggcaggggggagccagccaaagcgacaagacgcccgaggagctcttccaccctctgggggctgattcccaagtgtgaggcgccccacactgcctgcccggcctgctcccagcagccccatggagctctctggaagacaggcttagctgggtgggacttccaaacctgacacatcgcagccgagccgggccggggcttctttcttcatccagcagcaatgtccacaagaacattcaggacttttcatggctccaggatttgaacaaaaccaagactgttgctcaaccctattcagacaagcagcaggttttataagttttttattattgattttgttattatttttttatcaccagagtctcctgtccccaccctccaggcttcactctgaatgcctcaacgcctgagcgtggggaccaagccctgtccagacacttgccttcttcgccaagctaatctgtagggctggacttctgaccaaggacacactaatcgaactacgaacttcaaggcttctactccgggaggtggctgtggccaccttccgcagcctggatctcctgccctggggtcaggctccgttagattcacccgcccctctcttcctactcaaaccactcagattaatctttccttgcctgagaccagttgggagcactggagagcagggaggagaggggaagggccagactgggctgccaggttctagtctcctttgcactgagggccagatgaccaccccgagagagagccccacgaggctgagaactcactgctccagaagacatggacactcctgccctgctgtgtatagatggaagatatttatatatattttttggttgtcaatattaaatacagacactaagttatagtatatctggacaaaccaacttgtaaatacaccaacacatccttctgtaacttacctaaacagatataaatggctggtttttagaaaaa

SEQ ID NO: 7727 - protein, 492 aa, Oryctolagus cuniculus (domestic rabbit)
MEPSSKKVTGRLMLAVGGAVLGSLQFGYNTGVINAPQKVIEEFYNQTWIHRYGERILPTTLTTLWSLSVAIFSVGGMIGSFSVGLFVNRFGRRNSMLMMNLLAFVSAVLMGFSKLAKSFEMLILGRFIIGVYCGLTTGFVPMYVGEVSPTALRGALGTLHQLGIVVGILIAQVFGLDSIMGNEDLWPLLLSVIFVPALLQCIVLPLCPESPRFLLINRNEENRAKSVLKKLRGNADVTRDLQEMKEESRQMMREKKVTILELFRSPAYRQPILSAVVLQLSQQLSGINAVFYYSTSIFEKAGVQQPVYATIGSGIVNTAFTVVSLFVVERAGRRTLHLIGLAGMAACAVLMTIALALLEQLPWMSYLSIVAIFGFVAFFEVGPGPIPWFIVAELFSQGPRPAAVAVAGFSNWTSNFIVGMCFQYVEQLCGPYVFIIFTVLLVLFFIFTYFKVPETKGRTFDEIASGFRQGGASQSDKTPEELFHPLGADSQV

SEQ ID NO: 7728 - DNA, 3642 bp, Saccharomyces cerevisiae
  CDS (551)..(3205)
ttcagtctcaaaactttcagtacaaaaagtggcgtattggccttgtttttttcttattatgtcttatagtattatatttatatatttatgtacttatccttttatgtttaaacctaatcaagatcacaattagaactagcttaacattacttctcaaaaccaaccaatacctcttatatcttttttacagcctttcccttatgtttttaccatgtacacctcgagcggcaaatctccggggaaattttaaacttgccgcatcgcacattctaaagaacaaaaggaggaggaactgtcaattattctataatctggggaaattcagtcatactgagaaaaactagacaatagtcctatcctcggcaaattgcattgatagtacttacacatcgagagatcataggacagataagaagcattttattgaagaaaaacagagagagtcactataagttgacctcactatagaaattaaaacagaaaagttttactgaggacctttttaaacagaaggatatgcctttgttggcatagaaagaagaatttataaatggatcctaatagtaacagttctagcgaaacattacgccaagagaaacagggtttcctagacaaagctcttcagagggtgaagggcatagcactgcgacgaaacaatagtaacaaagatcatacaacagatgatacgacaggtagcatacgaacccctacgagcttgcagcggcaaaattctgacaggcaatctaatatgacatccgtgtttacggatgacatttctaccatagacgacaactcaattttattttcagagcctcctcagaaacaatctatgatgatgtctatatgcgtaggtgtttttgttgcagttggcggatttttatttggttatgatacaggtctgatcaacagtattacatctatgaactatgtgaagtcacacgtagcacctaatcacgattcatttaccgcccaacaaatgtccattttggtgtcatttttgtcattgggaactttttttggggctttaactgcaccatttatatctgattcgtatggcaggaagcctactatcattttcagtacaattttcatcttctctatcggaaattctttacaggtaggtgctggaggaatcacattattgattgtgggaagggtcatttcaggtatcggtataggcgcaatttcagcggttgttccattataccaagcagaagctacacataaatcattaagaggtgctattatttctacttaccaatgggccattacctggggcttgctcgtgtcaagtgcagtgtcgcaagggacacacgcaagaaacgacgcatcttcgtatcggattcccatagggttgcaatatgtctggtcgtcatttctcgctatcgggatgttctttctccctgagagtccacgctattacgttttgaaagacaagctagatgaagcagctaaatctttatcgtttttaagaggtgtaccagtccatgattctgggttactggaagaactagttgaaataaaggcaacatatgattacgaggcatcttttggttcttcgaacttcattgattgttttatttcaagtaaaagtagaccaaagcaaactctaaggatgtttacgggaattgcccttcaagcatttcaacaattttcaggtatcaactttatattttactacggtgtcaatttcttcaataagacaggagtcagtaatagttatctggtttcatttataacctatgctgttaatgttgtctttaatgttcctggtttgttttttgtggaattttttggtagacgtaaggtgctggttgttgggggtgttatcatgactatagccaactttattgtggccattgttgggtgttccttaaagactgtagcggccgcaaaagttatgatagcatttatatgtctattcatagctgccttttctgctacatggggtggtgttgtttgggttatttcagcagaactgtacccattgggtgtgagatctaaatgtacggctatatgcgctgctgctaactggcttgtaaactttatttgtgctttaattaccccttatattgtagatactgggtcgcatacatcatcattaggtgcaaaaatattcttcatttggggctccttaaatgcgatgggggtgatagttgtttacttgaccgtttatgaaacgaagggtttgacattagaagagattgatgaattatatattaagtcatccactggtgtcgtgtcaccaaaatttaataaagatattagggaacgcgcacttaaattccaatacgatcctttgcaaagattagaagacggaaagaacacttttgttgctaaaagaaataattttgacgatgaaacaccaagaaatgattttcgaaatacgatatcgggcgaaatagatcatagtcccaatcaaaaagaagttcattctatcccagaacgtgttgatattcctactagtacagaaattcttgaaagcccgaacaaaagtagtggtatgacagtccctgtgtcaccttctctgcaagacgttccaatcccgcaaacaacagagcctgctgaaattcgaaccaaatatgtggacctaggaaatgggcttggtcttaatacgtataatagagggcctccctcactctcaagcgactcaagcgaagattacacagaagatgaaataggcgggccctcatctcaaggcgaccaaagtaatagaagtactatgaatgatattaatgattatatggcacgtctcattcacagtacttctactgcaagtaacacgacagataagttctccggtaaccaaagtacccttcgttaccacacggcttcctcacattcggatacaactgaagaggacagcaatttgatggacctgggaaacgggcttgccttgaatgcttataacagaggtccaccttcaattttaatgaattccagtgatgaagaggcaaatggtggtgagacgtctgataatttgaacacagctcaagacttggctggtatgaaggaacgaatggcgcagtttgcgcagagctatattgacaagagaggcggtctggaacctgaaactcaatctaatattttgagcacttctctctccgtgatggctgacactaatgaacataataatgaaatcctccactcaagcgaagaaaacgccactaatcaacctgtaaatgaaaataatgatttgaaataattaatttaatgttattcgatgtattaattaagcggacgtgcattataattttaatcatgtgaaagaaataattgtaacttgagatactactcaacttttatagatacacaatgtttatcttgacacacattcaattacattacttgatttaatgcctttccaaaattatgatcttttcttctataacacttttggatacttagccgccgacggataccatcttcggtcaacgtcggaagtcattataaacgaaaaggtttcccaatagaaaagtcctgcaggagccacgtataacactggcttgaattatcaacaactctcgaaggcgctggaagagaatttttacgcaagttagtattcgcataacattagttggcaaattacacaattttttgatacaatatatatacatatattttccccattgtttttcttag

SEQ ID NO: 7729 - protein, 884 aa, Saccharomyces cerevisiae; identical to SEQ ID NO: 168

SEQ ID NO: 7730 - DNA, 1774 bp, Mus musculus (house mouse)
  CDS (80)..(1561)
cgaggaacacttgctgccgagaacattggctggatacctctagatctaccctttaagacttgagaactaggttgggaccatggggacaacgaaggtgaccccatctctggtgttcgccgtgactgttgccacgatcggctctttccagtttggctacaacactggagtcatcaatgcacctgagacaatcctaaaggactttcttaactacactttggaagagcggttagaagacctaccaagtgagggactgctgactgccctctggtccttatgtgtggccatcttctctgttggtggcatgattggctctttttctgttggactctttgtcaaccgctttggcagacgcaactctatgcttctagtcaacttgctggccatcattgcgggctgccttatgggattcgccaagatagcggagtctgttgaaatgctgatcctgggccgcttactcattggcattttctgtggcctgtgcacgggctttgtgcctatgtacattggagaggtgtctcccactgcccttcggggtgcatttggcacactaaaccagctgggcatcgttgttgggattctggtagctcagatctttggtttggactttattctgggctctgaagaactgtggcctgggctccttggcttaaccatcattccagctatcctgcaaagcgcagcccttccattttgccctgagagtccaagattcttgctcattaacaaaaaggaggaagaccaagctacagagatcctgcagcgcttgtggggcacctcggacgtggtccaggagatccaggagatgaaggatgagagtgttcggatgtcacaggagaagcaggtgactgtgctggagctcttcaggtcacccaactacgtccagccgcttctcatctccattgtcctccagctgtctcagcagctctctgggatcaatgctgtgttctattactcaacaggaatcttcaaggacgcgggtgtccaggaaccgatctatgccacgattggagcaggcgtggtcaatactatcttcactgtagtttctctgttcctggtggagagggcagggaggagaaccctgcatatgataggcctgggaggcatggctgtttgctccgttttcatgacgatttcgctgttactaaaggatgactatgaagccatgagttttgtctgtattgtggctatcttgatctacgtagccttctttgagattggacctggccccattccctggtttattgtggctgagctcttcagccagggcccccgcccagctgccattgcggtggctggctgttgtaactggacctccaactttctggtcggaatgctcttcccctcagctgcagcctacttaggagcctacgtttttatcatcttcgctgccttcctcatcttcttcctaatcttcaccttcttcaaagtcccggagaccaaaggcaggactttcgaggacattgcccgggccttcgaggggcaggcgcactctggaaaaggccctgccggtgtggagttgaacagcatgcagccggtcaaggagacccctggcaacgcctgagccgggagcacctccttcacctccctccactgtggaaagccacctccccttaagtggggagacctcatcaggatgaaccaggactgcttctgagtgctgctattctcaccccacacactccatgaaaactcagctgcacccaatgctggggttgaccagatcgccaatggcttttaagtgtttgatttggggatacttccttgtaatcaggaa

SEQ ID NO: 7731 - protein, 493 aa, Mus musculus (house mouse)
MGTTKVTPSLVFAVTVATIGSFQFGYNTGVINAPETILKDFLNYTLEERLEDLPSEGLLTALWSLCVAIFSVGGMIGSFSVGLFVNRFGRRNSMLLVNLLAIIAGCLMGFAKIAESVEMLILGRLLIGIFCGLCTGFVPMYIGEVSPTALRGAFGTLNQLGIVVGILVAQIFGLDFILGSEELWPGLLGLTIIPAILQSAALPFCPESPRFLLINKKEEDQATEILQRLWGTSDVVQEIQEMKDESVRMSQEKQVTVLELFRSPNYVQPLLISIVLQLSQQLSGINAVFYYSTGIFKDAGVQEPIYATIGAGVVNTIFTVVSLFLVERAGRRTLHMIGLGGMAVCSVFMTISLLLKDDYEAMSFVCIVAILIYVAFFEIGPGPIPWFIVAELFSQGPRPAAIAVAGCCNWTSNFLVGMLFPSAAAYLGAYVFIIFAAFLIFFLIFTFFKVPETKGRTFEDIARAFEGQAHSGKGPAGVELNSMQPVKETPGNA

SEQ ID NO: 7732 - DNA, 2798 bp, Leishmania donovani
  CDS (676)..(2319)
cccgggtagttccggacaaactacacggacgtgccaaaggaagagaggaagagaggcaacgaagagggagagaaggggtggggagagcgggacaaccccgacgctctcctccacctcactctcatttcatggagcgggtcttgtgaaactcctggctaggtttaccgcattgtgcagaggcatctcgcacgctgctaccgctgctgctgtccctcctcccgctgattctgcgctcacccgtgttcttcccacttttttctctcttctcgctccacttgcaccgacgtcatgctttccaccttttctcgaaacaccatcggtgccgtttctatacatacacgcctctgccacactcgctatcgctaccacatacacgcacatgctggcgtacccgtgcagctaagaagaaacaacagaaccaagcacagcacagcacacaacacgagcaacagtgtccttctctcaggaagtttgtacagacgcccactcccataacacgcatattgaatacgcaaccagagcacgcacacgcatatatatatatatatatatatataactgtaaggcaaatatatcgcacgctcacgcactagcacgtactgtgccgcgaacgaaagccaaacaacaacaaaaaggaagcagcctgcggagcacaagctcaaaacaaagccgacgatgcgagcatctgtcatgctatgtgccgccttgggcggttttctcttcggctatgacacgggcgtcatcaatgctgccctgttccagatgaaggaccacttcggcttcagcgagcattcgtggcagtacgccctcatcgtcgccattgccatcgctggtgccttcgttggcgcctttatttctggcttcatctctgccgcctttggtcgccgtccatgcatcgccgtggcggacgccctgttcgttatcggctctgtgcttatgggcgctgccccaaatgtggaagtggtgctcgtgtcgcgcgtcatcgtcggcttggctatcggtatcagctctgccaccattccagtgtacctggcggaagtaacatcgccgaagcaccgtggcgccaccatcgttctcaacaacctgtttctgacaggtggccagtttgttgcggccggtttcaccgcgatcatggtcgtcttcacgagcaagaacatcggttggcgtgtggcgatcggcataggtgcgctgccggctgtcgttcaggcgttctgcctcctctttttcctgccggagagcccacgctggcttctctcgaagggccacgcggaccgcgccaaggcggtagcggacaagttcgaggtggacctctgcgagttccaggagggcgatgagctgccgtccgtcagaatcgactatcgcccgctgatggcgcgcgacatgcgcttccgcgtggtgctcagctctgggctgcagatcattcagcagttttcgggtatcaacaccatcatgtactacagctctgtgatcctgtacgacgccggcttccgagacgccatcatgccagtcgttctgtccatcccgctcgccttcatgaatgccctcttcacggcggtagccatcttcacggtcgaccgctttggtcgccgccgcatgctgctcatctctgtctttggctgccttgtgctgctggtggtgattgccataattggcttcttcatcggcacgcgcatctcgtactccgttggtggcgggcttttcttggcgctgctcgccgtctttctcgccttgtacgcgcctggcattggctgcatcccgtgggtgatcatgggcgagatctttcctacgcacctgcggacgtcggcggcatccgtcgcgaccatggccaactggggggccaacgtactcgtgtcgcaggtgtttccgatcctgatgggcgccatcggcgtcggcggcaccttcacgatcatctccggtctcatggccctcggctgcatatttgtctacttcttcgccgtggagacgaaggggctcacgctggagcagatcgacaacatgttccgcaagcgcgccggcctgccgccgcgcttccacgaggaaggcgagagcggcgaaagcggtgccggttaccgcgaagacggcgacctcggccgcctggcgacggaggatgtctgtgacctgtcctcgttgggcaaccgggttgtgtcctttgccaaagcggaggacgccttcacggaggtggcaatgcccgatcgccacgccgtgtccaacaagtttgaagagagagcgacgagctcttcctcagatccccagtcgctcgaaaaccaggacgaggtgcggcaagcagccatcaaagcagctccgcacgagcccaagtagagaccgtaaaccccactccctccctccctccctacaactgcatcttccctaccgactccatataaagtccatgcacgcctatatgcgagtcgctgaggtggcgagatgagcggacggaggaggaacagagaataaaagggaaaaggcttctggcacatgtagtctggcgcacctgtgcagcacgcatcagaacgaaaaaagaaagacagcccgcgccgctcggggatgatctggtgcgcacctcttcctctatccattgtgttcgcgtgtatgtttctgtgccttgtacgtctcctgggggagtcatcgagactttggcccagctctctgtctacgcttcaaaggatgtgttgtcttcatccagctcgtatgcacgtgtatgagaatgttttctttttttctcttccagcctgcatgcgagtctgaggtgcctgcgtgcgtgcactctttacttcgccaaaaacacatctgtgaagctt

SEQ ID NO: 7733 - protein, 547 aa, Leishmania donovani
MRASVMLCAALGGFLFGYDTGVINAALFQMKDHFGFSEHSWQYALIVAIAIAGAFVGAFISGFISAAFGRRPCIAVADALFVIGSVLMGAAPNVEVVLVSRVIVGLAIGISSATIPVYLAEVTSPKHRGATIVLNNLFLTGGQFVAAGFTAIMVVFTSKNIGWRVAIGIGALPAVVQAFCLLFFLPESPRWLLSKGHADRAKAVADKFEVDLCEFQEGDELPSVRIDYRPLMARDMRFRVVLSSGLQIIQQFSGINTIMYYSSVILYDAGFRDAIMPVVLSIPLAFMNALFTAVAIFTVDRFGRRRMLLISVFGCLVLLVVIAIIGFFIGTRISYSVGGGLFLALLAVFLALYAPGIGCIPWVIMGEIFPTHLRTSAASVATMANWGANVLVSQVFPILMGAIGVGGTFTIISGLMALGCIFVYFFAVETKGLTLEQIDNMFRKRAGLPPRFHEEGESGESGAGYREDGDLGRLATEDVCDLSSLGNRVVSFAKAEDAFTEVAMPDRHAVSNKFEERATSSSSDPQSLENQDEVRQAAIKAAPHEPK

SEQ ID NO: 7734 - DNA, 1536 bp, Arabidopsis thaliana (mouse-ear cress)
  CDS (1)..(1536)
atgagttcctcaggagaagaacgaggtgttgttgttgccgagtccgagccgccaagagggaatagaagccgatttgcttttgcttgtgcaatcttagcctccatgacttctatcatccttggttatgatattggagtgatgagtggagctgcaattttcataaaagacgatttgaagctgtcggacgtacaacttgagattcttatgggaattctaaatatctattctctgatcggttcaggagcagctggaagaacttccgattggatcggaagacgatataccatagtgttggcaggattcttcttcttttgtggagccctactaatgggttttgccactaactatcctttcattatggtcggccgttttgtagccggtatcggtgtcggttacgctatgatgattgcgcctgtttataccacggaagtcgctccagcctcttctcgaggcttccttagctctttccctgagatatttatcaacattggtatactattgggatacgtatccaattacttcttcgccaagcttccagagcacattggatggaggttcatgttaggtattggagctgtgccctcagtgtttctagccattggagtgttggcaatgcccgagtctccacggtggctcgtcatgcagggtcgtctaggggacgcttttaaagtccttgacaaaacctcaaacaccaaagaagaagccatctcaaggctcaatgacatcaaacgcgcagttggaatccccgatgatatgacagacgatgttatagtcgttccgaataaaaagagcgctggaaaaggcgtgtggaaggaccttctcgttcgaccaaccccgtccgttcgacacatcctcatagcatgccttggtatccatttctcccagcaagcctccggaattgatgctgtcgtgctttactctccgaccatcttctcaagggctggactgaagtccaagaatgaccagctcttggctacggtcgctgtcggagttgtcaagactctcttcatcgtagtaggaacttgtttggtggaccggtttggacgtcgtgccttgttgcttacgagtatgggtggaatgtttttttccttgaccgcccttggaactagtctcacggtgatcgacaggaaccccgggcaaacactcaagtgggctatagggctcgccgttacgacggtgatgacttttgtcgcaacattctcattaggtgcaggccccgtgacgtgggtctacgcctcagagatattccccgtgaggctaagagcgcaaggagcaagtttgggagtgatgttgaatagactaatgagtggtattataggaatgacattcctatctctttctaagggtctcaccatcggtggtgcattccttctcttcgccggagttgcggttgccgcgtgggtcttcttcttcactttcctcccggagacacgtggtgtgcctttagaagaaatagagagtctcttcgggagctacagcgcaaacaaaaagaacaatgttatgagcaaagggaaacaagtagttgatgaacaatga

SEQ ID NO: 7735 - protein, 511 aa, Arabidopsis thaliana (mouse-ear cress)
MSSSGEERGVVVAESEPPRGNRSRFAFACAILASMTSIILGYDIGVMSGAAIFIKDDLKLSDVQLEILMGILNIYSLIGSGAAGRTSDWIGRRYTIVLAGFFFFCGALLMGFATNYPFIMVGRFVAGIGVGYAMMIAPVYTTEVAPASSRGFLSSFPEIFINIGILLGYVSNYFFAKLPEHIGWRFMLGIGAVPSVFLAIGVLAMPESPRWLVMQGRLGDAFKVLDKTSNTKEEAISRLNDIKRAVGIPDDMTDDVIVVPNKKSAGKGVWKDLLVRPTPSVRHILIACLGIHFSQQASGIDAVVLYSPTIFSRAGLKSKNDQLLATVAVGVVKTLFIVVGTCLVDRFGRRALLLTSMGGMFFSLTALGTSLTVIDRNPGQTLKWAIGLAVTTVMTFVATFSLGAGPVTWVYASEIFPVRLRAQGASLGVMLNRLMSGIIGMTFLSLSKGLTIGGAFLLFAGVAVAAWVFFFTFLPETRGVPLEEIESLFGSYSANKKNNVMSKGKQVVDEQ

SEQ ID NO: 7736 - DNA, 1482 bp, Arabidopsis thaliana (mouse-ear cress)
  CDS (1)..(1482)
atggccgatcaaatctccggcgagaagccggccggagttaatagattcgctcttcaatgtgctatcgtcgcctccatcgtctccatcatctttggttacgatactggtgttatgagtggagcgatggtgtttatagaagaagatttgaagacaaacgacgttcaaatagaagttctcactggaattctcaacctttgtgcccttgtcggatcattgctcgccggaagaacgtcggacataatcggacggcgttacacaatcgtcttggcctcaatactattcatgttaggctcaatattgatgggttggggtccgaattatccggttctcctatccggtagatgcaccgctggactcggagtcggttttgctctgatggttgctccggtttactctgccgagatcgcaactgcttcacatagaggactcttagcttctcttcctcacctttgtatcagtatagggattttactaggttatatcgtgaattacttcttctccaagttacctatgcatatcggttggagactcatgctcggtatagccgcggttccgtccctagtgctagcgttcgggatcttgaaaatgccggaatctccacggtggttgattatgcaaggccgtcttaaggaaggcaaggagatattggaattggtatctaattcccctgaagaagcagaactccgctttcaagacatcaaagctgctgcgggaatcgacccgaaatgcgtagacgatgttgtgaaaatggagggtaagaagactcatggtgaaggagtgtggaaagagctcattctaagaccaactcctgcagtgagacgtgttcttttaactgctcttgggattcatttcttccaacacgcctccggaatcgaagcagtgcttttatacggtccgaggatctttaagaaagcaggaatcacgactaaagacaagcttttcttggttactatcggtgtcggaatcatgaaaacgacgtttattttcactgcgactttattgttagacaaggtaggtcgaaggaagcttttgttgaccagcgttggaggaatggtcattgcgttgacaatgttgggatttgggcttacaatggcccaaaatgctggcgggaaattagcgtgggctttagtactgagcatagttgcggcttatagtttcgtggcgtttttctctattgggctcggcccaataacttgggtctacagttctgaggttttcccgttgaagcttagggcacaaggagcgagtctcggcgttgcggtgaacagagtaatgaacgccaccgtgtcgatgtcgtttttgtcgttgactagtgcgataaccaccggtggagctttctttatgttcgccggagttgcggcagtggcgtggaatttcttcttcttcctcttgccggagacgaaaggaaaatcacttgaagaaatcgaagcgctttttcaaagagacggtgataaagtacgcggcgaaaacggtgcagcttag

SEQ ID NO: 7737 - protein, 493 aa, Arabidopsis thaliana (mouse-ear cress); identical to SEQ ID NO: 172

SEQ ID NO: 7738 - DNA, 1395 bp, Salmonella enterica subsp. enterica serovar Typhi
  CDS (1)..(1395)
atgcctgacaataaaaaacaagggcgttccaacaaggccatgacattttttgtctgctttcttgcagccctggcaggattactttttggcctggatatcggcgttatcgccggtgctttacccttcattaccgacgagtttcagattaccgcacacactcaggaatgggtggtcagctccatgatgtttggcgcggccgtcggcgctgtcggcagcggctggctctcctttaagctgggtcgtaaaaaaagcctgatgatcggcgctatcctgttcgtcgccggttcgctgttctccgctgcggcgcctaacgttgaagtcctgattatttctcgcgtgctgctgggtctggccgtcggcgtcgcttcctacactgcaccgttgtacctgtccgagatcgcgccggaaaaaattcgcggcagtatgatctcaatgtaccaactcatgatcaccatcgggattctgggcgcttatctgtccgataccgcgttcagctacagcggcgcatggcgctggatgctcggcgtgatcatcatcccggctattctgctgctgatcggcgtcttcttcctgccggacagcccgcgctggtttgcggcgaaacgccgtttccatgatgctgaacgcgtcctgttgcgcctgcgtgacaccagtgcggaagcaaaacgtgagctcgatgaaattcgcgaaagtttgcaggttaaacagagcggttgggcgctgttcaaagagaacagcaacttccgccgcgccgtgtttcttggcattttgttgcaggtcatgcagcaatttaccgggatgaacgtcatcatgtattacgcgccgaaaatcttcgaactggcggggtacacgaataccacggagcagatgtggggcaccgttattgttggtctgactaacgtgctggcaaccttcatcgctatcggcctggttgaccgctggggccgcaagccgaccctgacgctgggcttcctggtcatggcgattggtatggggattctgggtacgatgatgcacatcggcatccattcgccgtctgcgcaatacttcgctatcgctatgctgctgatgttcatcattggatttgcgatgagcgctggtccgctgatttgggtactgtgctccgaaatccagccgctgaaaggccgcgatttcggcatcacctgctccaccgcgaccaactggatcgccaatatgatcgtcggcgcaacgttcctgaccatgctgaacaatctgggtaacgccaacaccttctgggtctatgcgggcctgaacgtactgtttatcctgctgaccctgtggctggtgccggaaaccaaacacgtttcgctggaacacattgaacgtaacctgatgaaaggtcgtaaactgcgcgaaatcggcgcccacgactaa

SEQ ID NO: 7739 - protein, 464 aa, Salmonella enterica subsp. enterica serovar Typhi
MPDNKKQGRSNKAMTFFVCFLAALAGLLFGLDIGVIAGALPFITDEFQITAHTQEWVVSSMMFGAAVGAVGSGWLSFKLGRKKSLMIGAILFVAGSLFSAAAPNVEVLIISRVLLGLAVGVASYTAPLYLSEIAPEKIRGSMISMYQLMITIGILGAYLSDTAFSYSGAWRWMLGVIIIPAILLLIGVFFLPDSPRWFAAKRRFHDAERVLLRLRDTSAEAKRELDEIRESLQVKQSGWALFKENSNFRRAVFLGILLQVMQQFTGMNVIMYYAPKIFELAGYTNTTEQMWGTVIVGLTNVLATFIAIGLVDRWGRKPTLTLGFLVMAIGMGILGTMMHIGIHSPSAQYFAIAMLLMFIIGFAMSAGPLIWVLCSEIQPLKGRDFGITCSTATNWIANMIVGATFLTMLNNLGNANTFWVYAGLNVLFILLTLWLVPETKHVSLEHIERNLMKGRKLREIGAHD

SEQ ID NO: 7740 - DNA, 2568 bp, Saccharomyces cerevisiae
  CDS (461)..(2299)
ctcgaggagaacttctagtatattctgtatacctaatattatagcctttatcaacaatggaatcccaacaattatctcaacattcacccatttctcaccttcagctcaaatcctcatcccggaaccttttttcttatttgttccctcttctactacaagagctttcaaattgtagtcaaaaacccgctttactaaaaaaacatcgccaaaaaaatttccaaaatcgctcgtcttgccactaaaagtatgcaaaatattatgtgaagcaaagttatttcgtgtcttccgcctaacagaacgtaagcagttgaccatactttagtatagagtacgaaaaaacacaaagaataccttaataaaataaacattgtcgttcgctaggaaaacggtaacgaaaacaaaaaactaaaagaagaaaagaggcaggacgcagtaaaagcaagaaaactgcttttttttcatggctgaaatgaagaattcgacagctgctagttccagatggacgaagagtcgtctctcccatttctttccctcgtacactaatagcagtggtatgggggccgcctcaactgatcaatcttctacgcagggagaagaactgcaccataggaagcactgtgaagaagacaatgatggtcaaaaaccgaaaaagtctcccgtatccacctctacaatgcaaataaaatctagacaggatgaggacgaggatgacggtcgaattgtcattaaaccagttaacgatgaagatgatacatcagtgattataactttcaatcagtcaatatccccttttattattacattgacattcgttgcgtccatttctgggttcatgtttggttatgatactggttacatatcgagtgcgctaatttctatcaatagagatttagacaacaaagttttaacttatggagaaaaagaattaattacggccgccacatcattgggcgctttgattacaagtgtgggcgctggtactgctgctgatgtgtttggaagaagaccatgtttaatgttctccaatctgatgtttttgatcggagcaattttacaaattaccgcgcacaagttttggcaaatggcggccggtagactgattatgggtttcggtgtcggtattggttctttgatttctcctctttttattagtgaaattgctcctaagatgatcaggggtaggttaaccgttataaattccctatggctgacaggtggtcaattgattgcttacggttgtggtgcgggcctgaaccacgtcaaaaacggttggagaatcttagttggtttgtccttgatacctactgttttgcagttttcttttttctgttttttgccggatacaccaagatactacgtaatgaaaggcgatttaaagagagcaaaaatggttctcaaacgaagttacgtaaacactgaagatgaaataattgatcaaaaagttgaagaattatctagcttaaatcaatcgataccaggaaaaaatccaataacaaaattctggaatatggtcaaggaattgcacactgtgccttcaaatttcagagctttgattattggttgtggtctacaagccattcaacaattcacaggttggaattccttaatgtatttctccggtacaatatttgaaactgttggattcaaaaattcttctgccgtttctattattgtctcaggtactaattttgtgttcacattaatagcatttttctgtattgataaaatcggccgtaggtacattttactgattggactacctggtatgactgtggcgctggttatatgtgctatagcgttccatttcctaggtattaagtttaacggtgctgatgcagtagtggcatctgatggattttcatcttggggcattgtcattatcgtatttattattgtgtatgcagccttttatgccctcggtatcggcactgttccatggcaacaatcggaattatttccacaaaacgtcagaggtgtagggacatcctacgctactgccaccaattgggcaggttctttagtcattgcgtctacgttcttgactatgttacaaaatattacaccaacgggtacattttcattctttgccggtgtagcatgtttatcaaccattttttgttacttttgttatccagaactatcaggattggagttagaggaagttcaaacaattttaaaggacggattcaatatcaaagcctctaaagctctagctaaaaagaggaaacaacaggtggccgaaggtgctgcccatcataaactcaaattcgaacctacacaggaaattgtagaaagttagactgctacaccaacaaaaaataaaagataaagaacaaaaaagaaggaagaaagctataaaagggagacaattcatttcatctaatcttaaaagtttttatttaaatatataagtaagagcgaagtatttaaaaataaaaattcataaaagttgagcttgatgaaagttatatcttttcgagcggtatgtttctttcgtgtaaaattcttcttaaagtatctaacttctcctcatctttcaagtttcctttaactacaactttttggatc

SEQ ID NO: 7741 - protein, 612 aa, Saccharomyces cerevisiae
MAEMKNSTAASSRWTKSRLSHFFPSYTNSSGMGAASTDQSSTQGEELHHRKHCEEDNDGQKPKKSPVSTSTMQIKSRQDEDEDDGRIVIKPVNDEDDTSVIITFNQSISPFIITLTFVASISGFMFGYDTGYISSALISINRDLDNKVLTYGEKELITAATSLGALITSVGAGTAADVFGRRPCLMFSNLMFLIGAILQITAHKFWQMAAGRLIMGFGVGIGSLISPLFISEIAPKMIRGRLTVINSLWLTGGQLIAYGCGAGLNHVKNGWRILVGLSLIPTVLQFSFFCFLPDTPRYYVMKGDLKRAKMVLKRSYVNTEDEIIDQKVEELSSLNQSIPGKNPITKFWNMVKELHTVPSNFRALIIGCGLQAIQQFTGWNSLMYFSGTIFETVGFKNSSAVSIIVSGTNFVFTLIAFFCIDKIGRRYILLIGLPGMTVALVICAIAFHFLGIKFNGADAVVASDGFSSWGIVIIVFIIVYAAFYALGIGTVPWQQSELFPQNVRGVGTSYATATNWAGSLVIASTFLTMLQNITPTGTFSFFAGVACLSTIFCYFCYPELSGLELEEVQTILKDGFNIKASKALAKKRKQQVAEGAAHHKLKFEPTQEIVES

SEQ ID NO: 7742 - DNA, 1449 bp, Bacillus subtilis; identical to SEQ ID NO: 173
  CDS (1)..(1449)

SEQ ID NO: 7743 - protein, 482 aa, Bacillus subtilis; identical to SEQ ID NO: 174

SEQ ID NO: 7744 - DNA, 1644 bp, Arabidopsis thaliana (mouse-ear cress); identical to SEQ ID NO: 175
  CDS (1)..(1644)

SEQ ID NO: 7745 - protein, 547 aa, Arabidopsis thaliana (mouse-ear cress); identical to SEQ ID NO: 176

SEQ ID NO: 7746 - DNA, 1560 bp, Caulobacter crescentus
  CDS (1)..(1560)
atggtcgtcagaaccaccgcttgcgcgctgataccggtaacactaatgtcgccggcaaccaaaggtccgacaaggaccagtagggcatcaacgggccggtacggccccatggggaggacacctgtggcttcagtatccaacgccggtcccagcgccggcatgagcgcggacggcgggaaggtcaacatgaccttcgtcgccgcgatcgtcgccgtcgccacgatcggcggcttcatgttcggctacgacagcggcgtcatcaacggcacgcaagagggcctggaaagcgccttcaatctcagcaagctgggcaccggcctgaatgtcggcgccatcctgatcggctgcgccatcggcgccttcgccgccggccgcctggccgacgtgtggggccgccgcacggtgatgatcatctcggccctgctgttcgtgatcagcgccatcggcaccggcgcggccgagagctcgatcgtgttcatcatcttccgcctgatcggcggtctgggcgtcggcgccgccagcgtgctgtgcccggtctacatctcggaagtcacgcccgcgaacatccgcggccgcctgtcgtccgtgcagcagatcatgatcatcaccggcctgaccggcgccttcgtggccaactacgccctggcccacaccgccggcagctcgacggccgagttctggctgggcctgcccgcctggcgctggatgttctggatgcagatcattcccgccggcgtgttcttcctctgcctgctgggcattcccgaaagcccccgctacctcgtggccaagggcaaggacgcccaggccgaagcgatcctctcgcgcctgttcggcgcgggccagggcgccaagaaggtcgaggaaatccgcgcctcgctgtcggccgatcacaagcccacgttctcggaccttctggatccgacgaccaagaagctgcgcgtcatcctgtgggcgggcctcgtcttggccgtgttccagcagctggtgggcatcaacatcgtcttctactacggctcggtgctgtggcagtcggtgggcttcaccgaggacgacagcctgaagatcaacatcctgtcgggcacgctgtcgatcctggcctgtctgctggccatcggcctgatcgacaagatcggccgcaagccgctgctgctgatcggttcggccggcatggccgtgacgcttggcgtgctgacctggtgcttctcgaccgccaccacggtcaacggcgccctgaccctgggcgaccagatcggcctgaccgcccttatcgccgccaacctctacgtgatcttcttcaacctctcgtggggtccggtcatgtgggtgatgctgggcgagatgttccccaaccagatgcgcggctcggccctggccgtctgcggcttcgcccagtggatcgccaacttcgccatctcggtcagcttcccggccctggccgcggccagcctgccgatgacctacggcttctatgcgctgagcgctgtcgtctcgttcttcctggtccagaagctggtccacgaaacgcgcggcaaggaactggaagcgatgcaggggtga

SEQ ID NO: 7747 - protein, 519 aa, Caulobacter crescentus
MVVRTTACALIPVTLMSPATKGPTRTSRASTGRYGPMGRTPVASVSNAGPSAGMSADGGKVNMTFVAAIVAVATIGGFMFGYDSGVINGTQEGLESAFNLSKLGTGLNVGAILIGCAIGAFAAGRLADVWGRRTVMIISALLFVISAIGTGAAESSIVFIIFRLIGGLGVGAASVLCPVYISEVTPANIRGRLSSVQQIMIITGLTGAFVANYALAHTAGSSTAEFWLGLPAWRWMFWMQIIPAGVFFLCLLGIPESPRYLVAKGKDAQAEAILSRLFGAGQGAKKVEEIRASLSADHKPTFSDLLDPTTKKLRVILWAGLVLAVFQQLVGINIVFYYGSVLWQSVGFTEDDSLKINILSGTLSILACLLAIGLIDKIGRKPLLLIGSAGMAVTLGVLTWCFSTATTVNGALTLGDQIGLTALIAANLYVIFFNLSWGPVMWVMLGEMFPNQMRGSALAVCGFAQWIANFAISVSFPALAAASLPMTYGFYALSAVVSFFLVQKLVHETRGKELEAMQG

SEQ ID NO: 7748 - DNA, 1386 bp, Bacillus subtilis
  CDS (1)..(1386)
atgaagaaagacacaaggaaatatatgatctactttttcggcgctttagggggactgctatatggttacgatacaggtgttatctccggagcactcctgtttatcaataacgatattcctttaacgacattgacagaaggattggttgtcagcatgctgctccttggcgcgattttcggttctgccttgagcggcacatgctcagaccgctggggcaggagaaaggttgtatttgtcctttccatcatttttattatcggtgcgctcgcttgcgcattttctcaaacaatcggcatgctgattgcatctagggtgatactcgggttggccgtcggcggttcaacggcacttgtgcccgtgtatctttccgaaatggcaccgacgaaaattcgcgggacactcggcacaatgaacaacttaatgattgtcaccgggattttgctcgcctatatcgttaactacctgttcacaccgtttgaagcgtggcgctggatggtcggtctggctgcagtgcctgccgtgcttctattaatcggcatcgccttcatgccggaatcgccaagatggctcgtgaagcgcggcagcgaagaagaagcgagacgcatcatgaacatcactcatgaccccaaagacatcgaaatggaattggcagagatgaagcaaggggaagcggagaaaaaagaaacgacacttggcgtgctgaaagccaagtggattcgccctatgcttctgattggcgtcggccttgccattttccagcaggcagtcggcattaacacggtcatctactacgcgccaaccatttttacgaaggccggtcttggcacatcagcttcggcgctcggcacaatgggaatcggcatcctcaacgtcatcatgtgtatcactgccatgatcttaattgaccgtgtcggccgcaaaaaacttctgatctggggaagtgtcggcatcacactgagccttgctgctttatcaggcgtgctcctgacactggggctttccgcatcaacagcgtggatgacagtagtctttctcggtgtctatatcgtcttttaccaggcgacatggggtccggtagtgtgggtgctcatgcctgagctcttcccgtccaaagcacgcggagccgcgacagggttcacgactttggtgttatcggcggctaacctgatcgtgtcgcttgtcttcccgctgatgctaagcgcgatgggcatcgcatgggtctttatggttttctcagtcatttgtcttctctcatttttcttcgcgttctacatggtaccggaaaccaaagggaaaagcttggaggaaattgaagcaagcctgaaaaaacggtttaaaaagaagaaaagcacccaaaaccaagtgctgaatgagcgtacattataa

SEQ ID NO: 7749 - protein, 461 aa, Bacillus subtilis
MKKDTRKYMIYFFGALGGLLYGYDTGVISGALLFINNDIPLTTLTEGLVVSMLLLGAIFGSALSGTCSDRWGRRKVVFVLSIIFIIGALACAFSQTIGMLIASRVILGLAVGGSTALVPVYLSEMAPTKIRGTLGTMNNLMIVTGILLAYIVNYLFTPFEAWRWMVGLAAVPAVLLLIGIAFMPESPRWLVKRGSEEEARRIMNITHDPKDIEMELAEMKQGEAEKKETTLGVLKAKWIRPMLLIGVGLAIFQQAVGINTVIYYAPTIFTKAGLGTSASALGTMGIGILNVIMCITAMILIDRVGRKKLLIWGSVGITLSLAALSGVLLTLGLSASTAWMTVVFLGVYIVFYQATWGPVVWVLMPELFPSKARGAATGFTTLVLSAANLIVSLVFPLMLSAMGIAWVFMVFSVICLLSFFFAFYMVPETKGKSLEEIEASLKKRFKKKKSTQNQVLNERTL

SEQ ID NO: 7750 - DNA, 1743 bp, Arabidopsis thaliana (mouse-ear cress)
  CDS (1)..(1743)
atggtggaagaagcatcgaaatcagagcagataaatatcacagaggtgtggacgacgacatgggagacaccttacattatgcggctggctctctctgccggtattggaggactcctcttcggatacaacacgggagtcatcgcaggggctcttctctatataaaagaggagtttggtgaggtagacaacaagacatggcttcaggagatcattgtgagcatgaccgtggctggagccattgttggagcagctataggaggatggtacaacgataagtttggtaggaggatgtctgttcttatagcggatgtgctcttcctgctgggtgccctggtgatggtgattgctcatgcgccgtgggtcatcatcctcggcagactcttggtgggttttggggttggtatggcttctatgacctcaccgctttacatctctgagatgtctcctgcgagaatcagaggcgccttggtcagcaccaacggacttctcatcaccggaggacagtttctatcttatctcatcaaccttgccttcgtccatacaccgggtacatggaggtggatgttgggagtctcggcgattccagcgatcattcagttctgcctcatgctaacgctgccagagtctccacggtggctctatagaaatgataggaaagccgagtcaagagacatcctcgagagaatatacccggcagagatggttgaagcggagatagctgcactcaaggagtctgtccgggcagagacggctgacgaggatattatcggccataccttctctgataagctcagaggcgctctctcgaatccagttgtccgccacggtctggccgcaggtatcaccgtccaggtcgcccagcagtttgtgggaatcaacacagtcatgtactacagtcctactattctgcagtttgcaggttacgcatccaacaagacagccatggctcttgctctcataacctccggtctcaatgcagtggggtctgtagtaagcatgatgtttgtagaccgttatggtcggcgcaagcttatgatcatttccatgttcgggatcataacttgccttgtcattttggctgccgttttcaatgaagcctcaaaccacgctccaaagatcgataagagagactccagaaacttcgcaaaaaatgctacttgtcccgcatttgccccattcacagcctcccgttctcctccctccaactggaattgtatgaagtgtcttcaatacgattgcggattctgctccaacggagcacaggagtacgcacctggagcatgcattgttcagtctgctgatatgaaggcattgtgccactcgaaaggcagaaccttcttcaaagacggatgccccagcaagttcgggtacctggccattgtcttccttggcctctacatcattgtgtacgcgcccggtatgggcacagttccatggattgtcaactcagagatctatcctcttcgctacagagggctcgcgggaggaatcgctgcagtctcaaactggatgtcaaatctcgtagtgagtgagacgttcctgacattgacaaacgcagtcgggtcatcgggaacattccttctatttgcagggtcatccgcagtcgggctgttcttcatctggctgcttgtgcctgagaccaaagggcttcagtttgaggaagtggaaaagttgctagaaggagggtttaggcctagtttattgcggccaacgaccaaggaaaatcaagtggaaacgccttag

SEQ ID NO: 7751 - protein, 580 aa, Arabidopsis thaliana (mouse-ear cress)
MVEEASKSEQINITEVWTTTWETPYIMRLALSAGIGGLLFGYNTGVIAGALLYIKEEFGEVDNKTWLQEIIVSMTVAGAIVGAAIGGWYNDKFGRRMSVLIADVLFLLGALVMVIAHAPWVIILGRLLVGFGVGMASMTSPLYISEMSPARIRGALVSTNGLLITGGQFLSYLINLAFVHTPGTWRWMLGVSAIPAIIQFCLMLTLPESPRWLYRNDRKAESRDILERIYPAEMVEAEIAALKESVRAETADEDIIGHTFSDKLRGALSNPVVRHGLAAGITVQVAQQFVGINTVMYYSPTILQFAGYASNKTAMALALITSGLNAVGSVVSMMFVDRYGRRKLMIISMFGIITCLVILAAVFNEASNHAPKIDKRDSRNFAKNATCPAFAPFTASRSPPSNWNCMKCLQYDCGFCSNGAQEYAPGACIVQSADMKALCHSKGRTFFKDGCPSKFGYLAIVFLGLYIIVYAPGMGTVPWIVNSEIYPLRYRGLAGGIAAVSNWMSNLVVSETFLTLTNAVGSSGTFLLFAGSSAVGLFFIWLLVPETKGLQFEEVEKLLEGGFRPSLLRPTTKENQVETP

SEQ ID NO: 7752 - DNA, 1774 bp, Arabidopsis thaliana (mouse-ear cress)
  CDS (1)..(1743)
atggagggaggaataatacatggaggagcagatgaatcagctttcaaagaatgtttctctctaacatggaagaatccttatgttcttcgtcttgctttctctgccggaatcggtggtcttctctttggttacgacaccggagtgatatcaggtgctctgctttatatcagagatgatttcaagtctgttgacagaaatacttggttacaggagatgatagtgagcatggcagttgcaggagccatcgttggagccgccataggaggttgggcgaacgacaaattagggaggagaagcgcgattctcatggcggatttcctctttttattaggagctatcattatggcggctgctcctaacccgtccctccttgtcgttggccgtgtttttgtgggcctcggggtcgggatggcctcgatgaccgctcctctatacatctcagaagcttcgcctgctaagatcagaggagctttggtcagtactaatgggtttctcattaccggaggacagttcttgtcttacctcataaacttagcctttactgatgtgaccggaacgtggagatggatgctcggaatcgccggaattccagctcttttacagtttgtcttaatgtttacactcccggagtcacctcgatggttataccgcaagggaagagaagaagaggctaaagcgattctaagaagaatatactcagcagaagatgtagaacaagagatacgtgcacttaaagactcagttgaaacagagatacttgaagaagggtcttccgagaaaatcaacatgatcaaactatgcaaagctaaaaccgttagacgaggactaatagctggtgttggtctccaagtgtttcaacagttcgttgggatcaacacagttatgtattacagtccaaccattgttcagcttgccggtttcgcttcaaacagaacagctcttctcttgtctctagttaccgcaggacttaatgcatttggttctataattagcatttacttcattgatagaatcggaaggaaaaagcttttgatcattagccttttcggagtcattatctcgctaggaatactaaccggtgttttttatgaagcggctactcacgctcctgcgattagctcactcgagacacaaaggttcaataatattagttgtccggattataagtcagctatgaataccaatgcttgggattgtatgacttgtttgaaagcttcttctccatcttgtggctattgttcctctcccattggaaaggaacatcccggggcatgttggatctctgatgattcggttaaggacttatgtcataacgaaaaccggctttggtacacgagaggatgtcctagcaattttggttggtttgctcttcttggattgggactttatatcatcttcttctctcctggaatggggactgttccatggatagttaactcagagatttatccattgagattcagaggaatatgtggaggaatagctgcaactgcaaattggatatcaaatttgattgtggctcaatcttttttgtcattgaccgaagctattgggacttcttggacttttctcatctttggagtgatctcagtcattgctcttctctttgttatggtttgtgttccggagacaaaaggaatgccaatggaggagattgagaagatgcttgaacgaagatcgatggagtttaagttttggaagaaaaaatcaaaacttgttgagaaacaaaaccagagtgcatgagagaaactcttaaaggaagcataatcaatga

SEQ ID NO: 7753 - protein, 580 aa, Arabidopsis thaliana (mouse-ear cress)
MEGGIIHGGADESAFKECFSLTWKNPYVLRLAFSAGIGGLLFGYDTGVISGALLYIRDDFKSVDRNTWLQEMIVSMAVAGAIVGAAIGGWANDKLGRRSAILMADFLFLLGAIIMAAAPNPSLLVVGRVFVGLGVGMASMTAPLYISEASPAKIRGALVSTNGFLITGGQFLSYLINLAFTDVTGTWRWMLGIAGIPALLQFVLMFTLPESPRWLYRKGREEEAKAILRRIYSAEDVEQEIRALKDSVETEILEEGSSEKINMIKLCKAKTVRRGLIAGVGLQVFQQFVGINTVMYYSPTIVQLAGFASNRTALLLSLVTAGLNAFGSIISIYFIDRIGRKKLLIISLFGVIISLGILTGVFYEAATHAPAISSLETQRFNNISCPDYKSAMNTNAWDCMTCLKASSPSCGYCSSPIGKEHPGACWISDDSVKDLCHNENRLWYTRGCPSNFGWFALLGLGLYIIFFSPGMGTVPWIVNSEIYPLRFRGICGGIAATANWISNLIVAQSFLSLTEAIGTSWTFLIFGVISVIALLFVMVCVPETKGMPMEEIEKMLERRSMEFKFWKKKSKLVEKQNQSA

SEQ ID NO: 7754 - DNA, 1554 bp, Arabidopsis thaliana (mouse-ear cress)
  CDS (1)..(1554)
atggctggaggagcctttgtatcagaaggtggtggtggaggaaacagctatgaaggcggagtcaccgtctttgtcatcatgacatgtattgtggccgctatgggaggtctcctctttggttatgacctcggtatctcaggtggagtgacatctatggaggagtttctgagcaagtttttcccggaggtggataagcaaatgcacgaagcaaggcgcgagactgcttactgcaaattcgataaccaattgctacagttgttcacttcctcactctacctcgcggcactcgcgtcttcctttgtagcttcggctgtcacaaggaagtacggacgcaaaatctccatgtttgttggaggggttgctttcctcataggttctctattcaacgcatttgctaccaatgtcgcaatgctcatcgttggtagattgttgctcggagtcggtgttggatttgccaatcagtctacgcctgtttatctctcggagatggctccagcgaagatccgaggagcacttaacatcgggtttcaaatggctataaccatcgggattttgattgcaaacttaatcaactacggaacatctcaaatggctaagaacggatggagagtatcattgggtttagccgctgtaccggcagttattatggttattggatcttttgtcttgcccgatacaccaaactcgatgctcgagagaggcaagtacgaacaagcgagagagatgttgcaaaagattcgtggagctgataacgtagatgaggagtttcaagatctgtgtgatgcttgtgaggctgctaagaaagtggataatccatggaagaacattttccaacaggcaaaatacagacccgctcttgttttctgttctgcgattcctttcttccaacagattactggtatcaatgttatcatgttctacgcccccgttctctttaagactctcggttttgcggatgatgcctcgctcatctcagcggttattacgggtgcggtcaatgttgtctctacccttgtctccatctatgcggttgacaggtacggaagaaggattctcttccttgaaggaggcatccaaatgattgtttcccagatcgttgttggtaccttgattggtatgaagtttggaaccacgggatcagggaccttaacacctgcaacagcagattggatcctggctttcatatgtttgtatgttgcaggatttgcatggtcatggggtccattaggatggttagtaccaagtgagatctgtccattggaaatcagaccagcgggacaagccatcaacgtctctgtcaacatgttcttcactttcctcattggacagtttttcctcacgatgctttgccacatgaagtttggtctcttctacttctttggaggaatggttgcagtcatgaccgtcttcatctacttcttgttgccggagacaaaaggggttccaattgaagaaatgggaagagtatggaagcaacatccgttctggaaacgttacatgccagatgatgctgttattggaggaggtgaagaaaactacgtcaaggaggtttga

SEQ ID NO: 7755 - protein, 517 aa, Arabidopsis thaliana (mouse-ear cress)
MAGGAFVSEGGGGGNSYEGGVTVFVIMTCIVAAMGGLLFGYDLGISGGVTSMEEFLSKFFPEVDKQMHEARRETAYCKFDNQLLQLFTSSLYLAALASSFVASAVTRKYGRKISMFVGGVAFLIGSLFNAFATNVAMLIVGRLLLGVGVGFANQSTPVYLSEMAPAKIRGALNIGFQMAITIGILIANLINYGTSQMAKNGWRVSLGLAAVPAVIMVIGSFVLPDTPNSMLERGKYEQAREMLQKIRGADNVDEEFQDLCDACEAAKKVDNPWKNIFQQAKYRPALVFCSAIPFFQQITGINVIMFYAPVLFKTLGFADDASLISAVITGAVNVVSTLVSIYAVDRYGRRILFLEGGIQMIVSQIVVGTLIGMKFGTTGSGTLTPATADWILAFICLYVAGFAWSWGPLGWLVPSEICPLEIRPAGQAINVSVNMFFTFLIGQFFLTMLCHMKFGLFYFFGGMVAVMTVFIYFLLPETKGVPIEEMGRVWKQHPFWKRYMPDDAVIGGGEENYVKEV

SEQ ID NO: 7756 - DNA, 1260 bp, Bacillus subtilis
  CDS (1)..(1260)
atggatatgaatgaacatcgaaatcgaaggttgaaattaataatgatttcagcaacttttggagggcttctctttggatatgacaccggagttataaatggagctttaccttttatggcaaggccagatcagcttgatttaacacctgttacagaagggcttgttacgagtattcttttattaggtgccgcgtttggagcgttgttatgcggaagattggctgatcgagatcgccgccgtaaaatgatccttaatctttcctttttatttttcctggcatcactgggaacagcgttagcacctaatgttttcatcatggcggtctttcgttttttactggggctggctgttggaggagcctcggcgatggtgccggcctttttagcagaaatggcaccgcatgaaaagagagggcgtatggtaacccaaaatgaactaatgattgttggcgggcaatttttagcatatgtttttaatgcgatcctcggtgtaacaatggcaaatacgggacatgtttggagatacatgctagtcatttgtgctgtaccggctatcatgttatttgccagtatgcttaaggtaccagaaagcccccgatggctaatctccaaaggcaaaaacagtgaggcgctgcgagttcttaaacaaattcgagaagataaacgtgcagaagctgaatgtagagaaattcaagaagcggtagaaaaagatacagcactagaaaaggcatcactcaaggacttttctacaccatggctgcgccgtcttttatggattggaatcggtgttgccatcgtgaatcaaattacaggtgtgaactcgattatgtattatggcacacaaatccttaaagaatctggttttggtacaaaagcggctttaatcgctaatattggaaatgggctgatatcagttattgcagttatatttgggatttggctggtcggaaaagtgagacggcgtccaatattattgattggtttggcagggacgactacagcgctcctattgattgcgattttctcaattgtgcttgatggatctatggcacttccttatgtagtgctttctttgaccgttttatttcttgcctttatgcaagggtgtgtaggacctgtgacttggcttgtcatagcggaaatattccctcaaaggttaagaggacttggttctgggataagtgtttttttcctttggatattaaactttgtgatcggttttgctttcccgatcttgcttagctctgtaggtttgtcttaa

SEQ ID NO: 7757 - protein, 419 aa, Bacillus subtilis
MDMNEHRNRRLKLIMISATFGGLLFGYDTGVINGALPFMARPDQLDLTPVTEGLVTSILLLGAAFGALLCGRLADRDRRRKMILNLSFLFFLASLGTALAPNVFIMAVFRFLLGLAVGGASAMVPAFLAEMAPHEKRGRMVTQNELMIVGGQFLAYVFNAILGVTMANTGHVWRYMLVICAVPAIMLFASMLKVPESPRWLISKGKNSEALRVLKQIREDKRAEAECREIQEAVEKDTALEKASLKDFSTPWLRRLLWIGIGVAIVNQITGVNSIMYYGTQILKESGFGTKAALIANIGNGLISVIAVIFGIWLVGKVRRRPILLIGLAGTTTALLLIAIFSIVLDGSMALPYVVLSLTVLFLAFMQGCVGPVTWLVIAEIFPQRLRGLGSGISVFFLWILNFVIGFAFPILLSSVGLS

SEQ ID NO: 7758 - DNA, 1518 bp, Bacillus subtilis
  CDS (16)..(1389)
aagggagtcatctttatgaaaaagcagtcaaatatatggctttattttttcggagctcttggaggcgcgttatatggctatgataccggagtgatttccggagctattttatttatgaaaaaggagttaggcttaaacgcgtttacagaaggtcttgttgtcagctccttgctggttggggcgatattgggctcaggagcggccggcaagctgactgaccgtttcggaagaaaaaaagcaattatggcagccgcgctgctgttttgtataggcggtcttggtgtggcactggccccaaatacaggagtcatggtgctgtttcgcatcattttgggacttgcagtcggaacatcgacgacaatcgtacccctttatttatctgaactggcgccaaaacataaacgcggggcgctgtcatcactgaatcagctgatgatcacggtcggcatccttctttcttacattgtcaattacatatttgccgatgccgaagcgtggcgctggatgcttggattggctgctgtgccgtcattgctcttgcttattggcattttgtttatgccggagagcccgcgctggctgttcacgaatggcgaagaaagcaaagcgaagaaaattcttgaaaaattgcgtggcacaaaagatattgatcaggaaatacatgatataaaagaagcggaaaagcaggatgaaggcggtctgaaggagctgttcgatccatgggtgcgcccagcgcttattgcaggtttgggactcgcttttttgcagcaatttatcggaacgaatacgatcatctactatgcgccaaagacctttacaaacgtcggattcggaaactccgcttcgattttaggcacggtcggaatcggcacagtcaatgttctcatgacattagtagcgattaaaatcatcgacaagattggaagaaagccgttactgctattcgggaatgcgggcatggtgatcagcttgatcgttctcgctttagtaaatctctttttcaataacactccggctgcctcatggacgaccgtcatttgtttaggcgtgtttatcgttgtctttgcggtcagctggggaccggttgtgtgggtgatgcttcctgaattgttcccgcttcacgtcagaggaatcgggaccggtgtttcgaccttaatgttgcacgttgggacactgattgtttcattaacctatccaatattaatggaagcgatcggaatcagttatttattcctgatttatgccgcgatcggtatcatggcgttcttatttgtccgatttaaagtgacagagacaaagggaagaagccttgaagaaattgagcaggatttacgggacaaaaacggacagggaggagcggccggaaaacagcagactgtcggaacataaaaaagggtgcgcgatcatgcgcacccttttgattgcttactttcccaccgtgccaaagttaatgattttaaaagaaatatcgtacttaaaatcagtctcagaaaatatttcatcccaatgcccttttac

SEQ ID NO: 7759 - protein, 457 aa, Bacillus subtilis
MKKQSNIWLYFFGALGGALYGYDTGVISGAILFMKKELGLNAFTEGLVVSSLLVGAILGSGAAGKLTDRFGRKKAIMAAALLFCIGGLGVALAPNTGVMVLFRIILGLAVGTSTTIVPLYLSELAPKHKRGALSSLNQLMITVGILLSYIVNYIFADAEAWRWMLGLAAVPSLLLLIGILFMPESPRWLFTNGEESKAKKILEKLRGTKDIDQEIHDIKEAEKQDEGGLKELFDPWVRPALIAGLGLAFLQQFIGTNTIIYYAPKTFTNVGFGNSASILGTVGIGTVNVLMTLVAIKIIDKIGRKPLLLFGNAGMVISLIVLALVNLFFNNTPAASWTTVICLGVFIVVFAVSWGPVVWVMLPELFPLHVRGIGTGVSTLMLHVGTLIVSLTYPILMEAIGISYLFLIYAAIGIMAFLFVRFKVTETKGRSLEEIEQDLRDKNGQGGAAGKQQTVGT

SEQ ID NO: 7760 - DNA, 1695 bp, Arabidopsis thaliana (mouse-ear cress)
  CDS (12)..(1475)
agaatcaaaagatgagtttcagggatgataatgaggaggctaggaatgatttgcgtcggccgtttattcacaccggaagctggtaccggatgggttcgagacaatcgagtatgatgggttcctctcaagttattcgagacagctctatctctgttcttgcatgtgttttgatcgttgctcttggccctattcaattcggattcacttgtggttattcatctccaactcaagctgcaatcaccaaggatctcggtttaacagtatctgagtactctgtgtttggttctctttccaatgtgggtgctatggttggtgcaattgccagtggtcagattgcagaatacattggacgaaaagggtctcttatgattgctgcaattcccaatatcattggatggctttgcatatcatttgcaaaagatacttcttttctttacatgggaagacttttagaaggctttggcgttgggatcatctcttacactgtacctgtatatatcgctgagatagctccacaaaatatgagaggaggattgggttcggttaaccagctttctgtgacaattggaataatgttggcgtatttacttggcctctttgttccatggagaattcttgcagttctggggatattgccgtgtacattattgataccaggtctctttttcatccccgaatcccctcgctggctggcaaaaatgggtatgacagatgaatttgaaacttcattacaagttcttcgaggatttgagactgatattaccgttgaagttaatgaaatcaagagatctgtggcatcatctacaaagcgaaatacagttcggtttgtagatctcaaacgcaggagatactatttcccacttatggttggtatagggttgcttgtacttcaacaacttggtggaattaatggtgtcctattctattccagtacaatatttgaatctgcaggagttacatcgagtaacgcagcaacatttggggtcggggctattcaggtagtagcgactgcaatatccacttggttggtggacaaagcaggtcgtcggcttctgcttactatctcttcggttgggatgacgattagccttgtaattgttgcagctgctttctatcttaaggaatttgtgtctcctgattcagacatgtacagttggctgagcatattgtcagtagttggagttgtggcaatggttgtctttttctcattgggaatgggaccaataccgtggctcattatgtctgagatccttcctgtgaacataaagggtttagctggaagtattgcaactctagccaattggttcttttcttggttgatcaccatgacagcaaatttgctgttagcctggagcagtggaggaactttcactctgtatggattggtttgtgcattcacagtggtgttcgtgactctatgggttcctgagaccaaaggcaaaactcttgaagaacttcaatccttgttcagatgaacaaattgaaacaacttcattctttgtcaccctctctctccctctctgttttggccaagaacaagaagaaacaagagattttccagctttgttaattgggctgagaacgttactaagatttgtttgtttgttcgttgtgtgtcaataatcgcattatcttctatcacatgtatatcaacatactacattcaagtatttgtaattttattgaactctttac

SEQ ID NO: 7761 - protein, 487 aa, Arabidopsis thaliana (mouse-ear cress)
MSFRDDNEEARNDLRRPFIHTGSWYRMGSRQSSMMGSSQVIRDSSISVLACVLIVALGPIQFGFTCGYSSPTQAAITKDLGLTVSEYSVFGSLSNVGAMVGAIASGQIAEYIGRKGSLMIAAIPNIIGWLCISFAKDTSFLYMGRLLEGFGVGIISYTVPVYIAEIAPQNMRGGLGSVNQLSVTIGIMLAYLLGLFVPWRILAVLGILPCTLLIPGLFFIPESPRWLAKMGMTDEFETSLQVLRGFETDITVEVNEIKRSVASSTKRNTVRFVDLKRRRYYFPLMVGIGLLVLQQLGGINGVLFYSSTIFESAGVTSSNAATFGVGAIQVVATAISTWLVDKAGRRLLLTISSVGMTISLVIVAAAFYLKEFVSPDSDMYSWLSILSVVGVVAMVVFFSLGMGPIPWLIMSEILPVNIKGLAGSIATLANWFFSWLITMTANLLLAWSSGGTFTLYGLVCAFTVVFVTLWVPETKGKTLEELQSLFR

SEQ ID NO: 7762 - DNA, 1395 bp, Bacillus subtilis; identical to SEQ ID NO: 177
  CDS (1)..(1395)

SEQ ID NO: 7763 - protein, 464 aa, Bacillus subtilis; identical to SEQ ID NO: 178

SEQ ID NO: 7764 - DNA, 1780 bp, Arabidopsis thaliana (mouse-ear cress)
  CDS (1)..(1749)
atggtggaaggaggaattgcgaaagcagacaaaacagagttcacagagtgttggagaacaacatggaagacaccttacatcatgcgacttgctctctccgccggaatcggaggtcttctcttcggttacgataccggagtcatttccggagctcttcttttcatcaaagaagattttgatgaagttgataagaaaacatggcttcagtcaactattgttagtatggcagtggctggagccatcgtcggagcagcagtcggaggttggatcaatgataagtttggtaggaggatgtcgattcttatcgccgatgttcttttcttgatcggtgcgattgtgatggcatttgctccggctccttgggttatcatcgttggaagaatctttgttgggtttggtgttggtatggcttcgatgacgtctccgttgtatatctctgaagcttctccggcgaggattagaggtgcacttgttagtaccaatggtcttctcatcactggtggacaattcttctcgtacctcatcaatcttgcttttgtccatactccgggaacatggagatggatgttgggtgttgcgggagttccagctattgttcagtttgtgcttatgttgtcgctacctgagtctccaaggtggttatatagaaaggacaggattgcggaatccagagcgattcttgagaggatttacccggctgacgaagtggaggcggagatggaagctttgaaactgtcagtggaggcagagaaagcagacgaggcaatcattggagatagcttctctgcaaagctgaaaggagctttcgggaatcccgttgttcgacgtggactcgctgctggtatcacggtgcaagtggctcagcagtttgtggggatcaacactgtcatgtactacagtccttctattgtgcaatttgctggttacgcctctaacaagacagctatggccttgtctcttattacttccggtttgaatgctttgggttctattgtgagcatgatgtttgtcgatcggtacgggagaaggaagctcatgatcatctctatgtttgggatcatagcatgtcttatcatcttagccacggtgttctcacaagcggccatccacgcccccaagatcgatgcgtttgagtcaaggacgtttgcaccaaatgctacttgttcagcatatgcccctctcgcagccgaaaatgctcctccctcgaggtggaactgcatgaagtgtctcaggtccgaatgtggattctgcgccagcggggtacagccgtacgcaccaggagcatgtgtggtgttgtcagatgacatgaaagcaacttgcagctcaagaggaagaacattcttcaaagatggatgtccaagcaagtttgggttcttagctatagtgtttttggggctttacatcgtagtctacgcaccaggtatgggcactgtcccgtggatcgtcaactctgagatctatccgctcagatacagaggtcttggtggaggaatagccgccgtctcgaattgggtctccaacctgatagtgagtgagagcttcctctcactcacccatgctctcggctcctctggtaccttccttctctttgctggcttctccacgatcgggctcttcttcatttggttgctcgttcctgagaccaaagggcttcagtttgaggaggtcgagaagttgctcgaggtcggcttcaagcccagtctcttgcggcggagggagaagaagggcaaagaagtcgatgctgcttaagacgatgatgatcacttatctctctctttct

SEQ ID NO: 7765 - protein, 582 aa, Arabidopsis thaliana (mouse-ear cress)
MVEGGIAKADKTEFTECWRTTWKTPYIMRLALSAGIGGLLFGYDTGVISGALLFIKEDFDEVDKKTWLQSTIVSMAVAGAIVGAAVGGWINDKFGRRMSILIADVLFLIGAIVMAFAPAPWVIIVGRIFVGFGVGMASMTSPLYISEASPARIRGALVSTNGLLITGGQFFSYLINLAFVHTPGTWRWMLGVAGVPAIVQFVLMLSLPESPRWLYRKDRIAESRAILERIYPADEVEAEMEALKLSVEAEKADEAIIGDSFSAKLKGAFGNPVVRRGLAAGITVQVAQQFVGINTVMYYSPSIVQFAGYASNKTAMALSLITSGLNALGSIVSMMFVDRYGRRKLMIISMFGIIACLIILATVFSQAAIHAPKIDAFESRTFAPNATCSAYAPLAAENAPPSRWNCMKCLRSECGFCASGVQPYAPGACVVLSDDMKATCSSRGRTFFKDGCPSKFGFLAIVFLGLYIVVYAPGMGTVPWIVNSEIYPLRYRGLGGGIAAVSNWVSNLIVSESFLSLTHALGSSGTFLLFAGFSTIGLFFIWLLVPETKGLQFEEVEKLLEVGFKPSLLRRREKKGKEVDAA

SEQ ID NO: 7766 - DNA, 1368 bp, Clostridium acetobutylicum
  CDS (1)..(1368)
atgaataaaaaaatatctccagcactaatttatttctttggagccttcggtggatttatgtttggatatgatattggaataattaatggtgctttacctggaattaatgcaacttggcacgtaagttcttggttagaaggatttatcacttctggattgtttgttggagctatgataggagcctcattaatggcttcactagcagataggtttggtcgtcgtagaatgattatgtggagtgcaattgtgtttgcacttggtgcattaggttctgccgtttctactagtactaatcttttaatcggtgctcgtgttattttaggagtagctgtaggtggagcttctgctttagttccaatgtatatgggagaaattagccctgctgaaacacgtggaaaactatctggtttaaatcaattaatgataactgttggaatgcttttctcatatggtgtaaattttgcgtttgctggtgcatttgaaggatggcgttggatgcttggaggagctatggtacctgcaatggtactattaattggaacatttatacttccagagtcaccaagatttttagctagaataggaaagacagaattagcaaaacaagtacttcagactttacgttcaaaggaagaggcagaaactgaatatcaagagattattaattcaaaacatactgaaacaggttcttttggagatttatttgcaaaacaggctttgccagctgtaattgcaggctgtgggttaacacttcttcaacaaattcaaggtgcaaacactattttctactattcatcacaaattttatccaatgtttttggatcagcaaatggtggaactattagtactgttggaattggtgtggttctagtattagcaactattgtaactttattggttgtagacaaattcaaacgtcgtacattatttatgactggttctattggaatgggcgcatctctattattagttggattaatttatccatactctgaagctaaacatgcgtgggcaacttggttagtattcttcttcatatgtttatacgttgttttctatgcatactcttgggcagctactacatggattgttgttggagaattattcccaagtaatgttagaggacttgcaacaggtattgcatcagcagtaaactggtttggtaacattttagttgctttattcttcccagtattacttgaaactgtaggtttatctgtaatcttcttcggttttgctgcaatttgtatcataggatttttatttgcaaaatatgttctttatgaaacaaaaggaaaatctttagaagaaattgagacatatttgtacaatcgttctattggaaaagttagaggattaaatgagtag

SEQ ID NO: 7767 - protein, 455 aa, Clostridium acetobutylicum
MNKKISPALIYFFGAFGGFMFGYDIGIINGALPGINATWHVSSWLEGFITSGLFVGAMIGASLMASLADRFGRRRMIMWSAIVFALGALGSAVSTSTNLLIGARVILGVAVGGASALVPMYMGEISPAETRGKLSGLNQLMITVGMLFSYGVNFAFAGAFEGWRWMLGGAMVPAMVLLIGTFILPESPRFLARIGKTELAKQVLQTLRSKEEAETEYQEIINSKHTETGSFGDLFAKQALPAVIAGCGLTLLQQIQGANTIFYYSSQILSNVFGSANGGTISTVGIGVVLVLATIVTLLVVDKFKRRTLFMTGSIGMGASLLLVGLIYPYSEAKHAWATWLVFFFICLYVVFYAYSWAATTWIVVGELFPSNVRGLATGIASAVNWFGNILVALFFPVLLETVGLSVIFFGFAAICIIGFLFAKYVLYETKGKSLEEIETYLYNRSIGKVRGLNE

SEQ ID NO: 7768 - DNA, 1422 bp, Bacillus subtilis
  CDS (1)..(1422)
atgaataaacaaggaaatcaaatgtcatttttacgtacaattattttagtctccactttcggcgggcttctttttggctatgataccggtgtgctcaatggagctttgccgtatatgggagagccggatcagcttaatctcaatgccttcacagaaggccttgtcaccagttcacttctttttggagcggcactgggtgctgtgtttggcggcaggatgtctgattttaacggccgccgcaaaaatattttgttcctcgctgttatattttttatttcaacgattgggtgtacgtttgcaccaaatgttacggtcatgattatttcccgttttgtgctcggtattgcggttgggggtgcatccgtaacggtgcctgcctatttagcagagatgtctcctgtggaaagcaggggacggatggtgacgcagaacgaattgatgattgtatcaggacagcttttggcctttgtttttaatgcgatccttggaacaacaatgggagacaactcccatgtgtggaggtttatgctggtcattgcgtcacttccagccttgttcctgtttttcggcatgatcagaatgcccgagagtccccgttggcttgtttctaaaggaagaaaagaagatgctttgcgtgtattgaaaaaaatcagggacgaaaaacgggcagcagctgagctgcaagaaattgaattcgctttcaaaaaagaagaccagcttgaaaaagcgacatttaaagatctttcagtcccatgggtgcgccgtattgtgtttattggattagggattgcgattgtacagcaaattacaggtgtgaattcgattatgtattatgggactgaaattctaagaaattccggtttccaaacggaagccgctttaatcggaaatattgcgaatggcgtgatttcggtattggcaacattcgtcggaatctggctgctgggaagagtggggcgccggccgatgctgatgacaggcttgatcggtacgacaacagcattattgctaatcgggatattctcacttgtacttgaaggatcaccggcacttccgtatgtagtcctgtcattaacggtcacatttcttgcttttcagcagggcgccatttcaccagtgacttggctgatgctatctgaaattttcccgcttcgccttcgcggactgggaatgggtgttacggtattctgtctgtggatggtgaattttgcagtcagtttcacgtttccgatattgctggcagctatcgggctgtccacaacgttctttatcttcgttggattaggaatttgctctgtcttgtttgtgaagaggtttttgccggaaacgaaagggctttcgcttgagcagctggaggaaaacttccgcgcttatgatcacagcggggcaaagaaggattctggggctgaagtgattggataa

SEQ ID NO: 7769 - protein, 473 aa, Bacillus subtilis
MNKQGNQMSFLRTIILVSTFGGLLFGYDTGVLNGALPYMGEPDQLNLNAFTEGLVTSSLLFGAALGAVFGGRMSDFNGRRKNILFLAVIFFISTIGCTFAPNVTVMIISRFVLGIAVGGASVTVPAYLAEMSPVESRGRMVTQNELMIVSGQLLAFVFNAILGTTMGDNSHVWRFMLVIASLPALFLFFGMIRMPESPRWLVSKGRKEDALRVLKKIRDEKRAAAELQEIEFAFKKEDQLEKATFKDLSVPWVRRIVFIGLGIAIVQQITGVNSIMYYGTEILRNSGFQTEAALIGNIANGVISVLATFVGIWLLGRVGRRPMLMTGLIGTTTALLLIGIFSLVLEGSPALPYVVLSLTVTFLAFQQGAISPVTWLMLSEIFPLRLRGLGMGVTVFCLWMVNFAVSFTFPILLAAIGLSTTFFIFVGLGICSVLFVKRFLPETKGLSLEQLEENFRAYDHSGAKKDSGAEVIG

SEQ ID NO: 7770 - DNA, 1566 bp, Arabidopsis thaliana (mouse-ear cress); identical to SEQ ID NO: 181
  CDS (1)..(1566)

SEQ ID NO: 7771 - protein, 521 aa, Arabidopsis thaliana (mouse-ear cress); identical to SEQ ID NO: 182

SEQ ID NO: 7772 - DNA, 1302 bp, Lactococcus lactis subsp. lactis
  CDS (1)..(1302)
atgagaaaactttctcccactttcatctatttttttggtgctttaggtggcttattatttggatatgacacaggcgtcatatcgggagcgctactttttattgaaaaagagagctggcaggtgagttcttgggcttggatggaaggatggattacagcggcagttttaatgggagctgtaattggcgcggtcgtaattggaccaatgagtgaccgttttggtcggaaacgtctgttacttttgtcagcggtcatcttttttgttggagctttaggttcaggactttcaaatagtgctgagttactaatcatctctcgggttattctcgggatggctgttgggtcagcttcagctttggtgccgacttatttatcggaactttcacccgctaaaattcgtggtggagtttcaactatgtttcaattgatgattatgactgggattttattagcctatatctcaaactatgctttaaaaggagtttcaggaaattggcattggatgcttggtttggccactgttccagcagcccttcttttcatcggtggactctttttgccagaatctccaagatttcttgttcgtcatgataatgaagcaggtgcccgtgaaatattagggatgataaatgacgatccaaactcgattgaagcagaaatttctgatattcaattgatggctaaggaagaaaaacaaggtggcttacaagaattatttggtcaaatgtcacgtccagttttgattatggcaattggtctggcaatttttcaacaggttatgggctgtaatacagtattatactttgcaccatcaatttttgttgcggtaggatttggggcaagcgcagctttacttgctcatattgggattggtattttcaatgttattgtaacttatattgcaatgagagtaatggataaagttaatcgtcggtggatgctcaattttggtgcttggggaatgggaatttctcttgtattgatgtcagtagggatgattttagcagaaaatgctcatattggctttggtaaatatttagcagttatcgctttaacggtatatattgccttcttctcagcaacatggggaccagtaatgtgggtgatgattggtgaatctttcccacttaaaatccgtggcttaggaaattcatttggtgctgctgtcaactgggctgctaactgggtggtgtcattaacattcttaccattattatcattttttggaacaggtaaaattttcctgatttatgcggcttgttgtttcctctcaatttggtttactagtaaaaaaagttattga

SEQ ID NO: 7773 - protein, 433 aa, Lactococcus lactis subsp. lactis
MRKLSPTFIYFFGALGGLLFGYDTGVISGALLFIEKESWQVSSWAWMEGWITAAVLMGAVIGAVVIGPMSDRFGRKRLLLLSAVIFFVGALGSGLSNSAELLIISRVILGMAVGSASALVPTYLSELSPAKIRGGVSTMFQLMIMTGILLAYISNYALKGVSGNWHWMLGLATVPAALLFIGGLFLPESPRFLVRHDNEAGAREILGMINDDPNSIEAEISDIQLMAKEEKQGGLQELFGQMSRPVLIMAIGLAIFQQVMGCNTVLYFAPSIFVAVGFGASAALLAHIGIGIFNVIVTYIAMRVMDKVNRRWMLNFGAWGMGISLVLMSVGMILAENAHIGFGKYLAVIALTVYIAFFSATWGPVMWVMIGESFPLKIRGLGNSFGAAVNWAANWVVSLTFLPLLSFFGTGKIFLIYAACCFLSIWFTSKKSY

SEQ ID NO: 7774 - DNA, 1536 bp, Arabidopsis thaliana (mouse-ear cress); identical to SEQ ID NO: 183
  CDS (1)..(1536)

SEQ ID NO: 7775 - protein, 511 aa, Arabidopsis thaliana (mouse-ear cress); identical to SEQ ID NO: 184

SEQ ID NO: 7776 - DNA, 1410 bp, Clostridium acetobutylicum; identical to SEQ ID NO: 185
  CDS (1)..(1410)

SEQ ID NO: 7777 - protein, 469 aa, Clostridium acetobutylicum; identical to SEQ ID NO: 186

SEQ ID NO: 7778 - DNA, 2890 bp, Saccharomyces cerevisiae; identical to SEQ ID NO: 189
  CDS (818)..(2443)

SEQ ID NO: 7779 - protein, 541 aa, Saccharomyces cerevisiae; identical to SEQ ID NO: 190

SEQ ID NO: 7780 - DNA, 2613 bp, Mus musculus (house mouse)
  CDS (180)..(1658)
aaaaaggcagctccgcgcgctctcccccaagagcagaggcttgcttgtagagtgacgatctgagctacggggtcttaagtgcgtcagggcgtggaggtctggcgggagacgcatagttacagcgcgtccgttctccgtctcgcagccggcacagctagagcttcgagcgcagcgcggccatggatcccagcagcaagaaggtgacgggccgcctcatgttggctgtgggaggagcagtgctcggatcactgcagttcggctataacactggtgtcatcaacgccccccagaaggttattgaggagttctacaatcaaacatggaaccaccgctacggagagcccatcccatccaccacactcaccacgctttggtctctctccgtggccatcttctctgtcgggggcatgattggttccttctctgtcggcctctttgttaatcgctttggcaggcggaactccatgctgatgatgaacctgttggcctttgtggctgctgtgcttatgggcttctccaaactgggcaagtcctttgagatgctgatcctgggccgcttcatcatcggtgtgtactgcggcctgactactggctttgtgcccatgtatgtgggagaggtgtcacctacagctctacgtggagccctaggcacactgcaccagctgggaatcgtcgttggcatccttattgcccaggtgtttggcttagactccatcatgggcaatgcagacttgtggcctctgctgctcagtgtcatcttcatcccagccctgctacagtgtatcctgttgcccttctgccccgagagcccccgcttcctgctcatcaatcgtaacgaggagaaccgggccaagagtgtgctgaagaagcttcgagggacagccgatgtgacccgagacctgcaggagatgaaagaagagggtcggcagatgatgcgggagaagaaggtcaccatcttggagctgttccgctcacccgcctaccgccagcccatcctcatcgctgtggtgctgcagctgtcccagcagctgtcgggtatcaatgctgtgttctactactcaacgagcatcttcgagaaggcaggtgtgcagcagcctgtgtacgccaccatcggctccggtatcgtcaacacggccttcactgtggtgtcgctgtttgttgtagagcgagctggacgacggaccctgcacctcattggcctggctggcatggcaggctgtgctgtgctcatgaccatcgccctggccttgctggaacggctgccttggatgtcctatctgagcatcgtggccatctttggctttgtggccttctttgaagtaggccctggtcctattccatggttcattgtggccgagctgttcagccaggggccccgtcctgctgctattgctgtggctggcttctccaactggacctcaaacttcattgtgggcatgtgcttccagtatgtggagcaactgtgcggcccctacgtcttcatcatcttcacggtgctcctcgtgctcttcttcatcttcacctacttcaaagtccctgagaccaaaggccgaaccttcgatgagatcgcttccggcttccggcaggggggtgccagccaaagtgacaagacacccgaggagctcttccaccctctgggggcggactcccaagtgtgaggagccccacacccagcccggcctgctccctgcagcccaaggatctctctggagcacaggcagctagatgagacctcttccgaaccgacagatctcgggcaagccgggcctgggcgcctttcctcagccagcagtgaagtccaggaggatattcaggactttgatggctccagaatttttaatgaaagcaagactgctgctcagatctattcagataagcagcaggttttataatttttttattactgattttgttattttttttttttatcagccactctcctatctccacactgtagtcttcaccttgattggcccagtgcctgagggtggggaccacgccctgtccagacacttgccttctttgccaagctaatctgtagggctggacctatggccaaggacacactaataccgaactctgagctaggaggctttaccgctggaggcggtagctgccacccacttccgcaggcctggacctcggcaccataggggtccggactccattttaggattcgcccattcctgtctcttcctacccaaccactcaattaatctttccttgcctgagaccagttggaagcactggagtgcagggaggagagggaagggccaggctgggctgccaggttctagtctcctgtgcactgagggccacacaaacaccatgagaaggacctcggaggctgagaacttaactgctgaagacacggacactcctgccctgctgtgtatagatggaagatatttatatattttttggttgtcaatattaaatacagacactaagttatagtatatctggacaaacccacttgtaaatacaccaacaaactcctgtaactttacctaagcagatataaatggctggtttttagaaaaaaaaaaaaaaaaaaaaaaaaaaaaaaaaaaaaaaaaaaaaaaaaaaaaaaaaaaaaaaaaaaaaaaaaaa

SEQ ID NO: 7781 - protein, 492 aa, Mus musculus (house mouse)
MDPSSKKVTGRLMLAVGGAVLGSLQFGYNTGVINAPQKVIEEFYNQTWNHRYGEPIPSTTLTTLWSLSVAIFSVGGMIGSFSVGLFVNRFGRRNSMLMMNLLAFVAAVLMGFSKLGKSFEMLILGRFIIGVYCGLTTGFVPMYVGEVSPTALRGALGTLHQLGIVVGILIAQVFGLDSIMGNADLWPLLLSVIFIPALLQCILLPFCPESPRFLLINRNEENRAKSVLKKLRGTADVTRDLQEMKEEGRQMMREKKVTILELFRSPAYRQPILIAVVLQLSQQLSGINAVFYYSTSIFEKAGVQQPVYATIGSGIVNTAFTVVSLFVVERAGRRTLHLIGLAGMAGCAVLMTIALALLERLPWMSYLSIVAIFGFVAFFEVGPGPIPWFIVAELFSQGPRPAAIAVAGFSNWTSNFIVGMCFQYVEQLCGPYVFIIFTVLLVLFFIFTYFKVPETKGRTFDEIASGFRQGGASQSDKTPEELFHPLGADSQV

SEQ ID NO: 7782 - DNA, 1559 bp, Synechocystis sp
  CDS (92)..(1498)
gaattcatgacgaagtttttttacttggtaggatttattccgtgggcaagcgcaacttgccataggctaacttcttcaatttcagctttacatgaatccctcctcttctccttcccaatctacggctaacgttaagtttgtcctgctgatttcgggggtagcagccctgggggggttcctgtttggctttgacactgcggtgatcaatggggcggtggcggccctacaaaaacattttcagacggacagtcttttaacaggtttatctgtatccttagctctgttgggatcagcactgggagcctttggggcgggaccgatcgccgatcgccatgggcggattaaaacgatgattttagcggcggtgctgttcaccctcagttccattgggtcgggtttacctttcaccatttgggattttattttttggcgggtgttggggggcattggggtgggggccgctagcgttattgccccggcctacattgcggaagtgtcgccggcccatctgcgggggcgtttaggatctttgcaacagttggccattgtttctggcattttcattgccctgctcagtaattggtttattgctttgatggcggggggatcggcccaaaatccctggttgttcggtgcggcggcctggcgttggatgttctggacagagctaattcccgccctgctctatggagtttgcgctttcctgatccccgaatctccccggtatttagtcgcccaagggcaaggggaaaaagcggcggctattttgtggaaagtggaagggggagacgtgcccagtcgcattgaggaaatccaggcaacggttagtctcgaccataaaccccggtttagcgatctgctcagtcgtcggggaggattattgcccattgtctggattggtatggggttgtcggcactacaacagtttgttggcattaacgtaattttttattacagtagcgtgctctggcgatcggtgggttttaccgaagaaaagtctctgttaatcacggtaatcactggttttatcaatatcctcaccaccctagtggcgatcgcctttgtggataaatttggccgtaagcctttgttgctcatgggctccattggtatgaccattaccttgggcatcctttccgtggtgtttgggggagcaacggtggttaatggccaacccaccctgacgggggccgctgggataattgctttggtgacagccaatctttatgtatttagttttggtttttcttgggggcccattgtttgggtcttgctgggggaaatgtttaataacaaaattcgagcggcggccctatcggtggcggcgggggtacagtggattgctaactttattatttccactacttttccgcccctattggatacggtgggtttgggccccgcctatggtttatatgccacttcagcggccatttcaattttctttatctggttttttgtgaaggaaactaagggtaaaactctggagcaaatgtgattaattttttattttgaggggaattaattgacattagcttgatttttttcgggagggtacc

SEQ ID NO: 7783 - protein, 468 aa, Synechocystis sp
MNPSSSPSQSTANVKFVLLISGVAALGGFLFGFDTAVINGAVAALQKHFQTDSLLTGLSVSLALLGSALGAFGAGPIADRHGRIKTMILAAVLFTLSSIGSGLPFTIWDFIFWRVLGGIGVGAASVIAPAYIAEVSPAHLRGRLGSLQQLAIVSGIFIALLSNWFIALMAGGSAQNPWLFGAAAWRWMFWTELIPALLYGVCAFLIPESPRYLVAQGQGEKAAAILWKVEGGDVPSRIEEIQATVSLDHKPRFSDLLSRRGGLLPIVWIGMGLSALQQFVGINVIFYYSSVLWRSVGFTEEKSLLITVITGFINILTTLVAIAFVDKFGRKPLLLMGSIGMTITLGILSVVFGGATVVNGQPTLTGAAGIIALVTANLYVFSFGFSWGPIVWVLLGEMFNNKIRAAALSVAAGVQWIANFIISTTFPPLLDTVGLGPAYGLYATSAAISIFFIWFFVKETKGKTLEQM

SEQ ID NO: 7784 - DNA, 1704 bp, Kluyveromyces marxianus var. lactis, Candida sphaerica; identical to SEQ ID NO: 193
  CDS (1)..(1704)

SEQ ID NO: 7785 - protein, 567 aa, Kluyveromyces marxianus var. lactis, Candida sphaerica; identical to SEQ ID NO: 194

SEQ ID NO: 7786 - DNA, 1545 bp, Arabidopsis thaliana (mouse-ear cress)
  CDS (1)..(1545)
atggccggagggttcgtcagtcaaacgccgggtgttcggaactacaattacaaactgacaccgaaagtgtttgtgacatgtttcatcggtgcttttggtggtctcatcttcggatacgatctcgggatctcaggaggggtaacctcaatggagccattcttggaagagttcttcccttacgtctacaagaagatgaagagcgcacatgagaacgagtactgtcgatttgatagtcagcttctcactctcttcacttcgtctctctatgtggcggctttggtgtcttctctctttgcctccaccattactagagttttcggaaggaaatggtcgatgtttctcggtggtttcaccttcttcatcggttctgctttcaacggctttgcccaaaacatcgctatgcttctcattggtcgtatcctacttggtttcggagtcggattcgccaatcaatctgtaccggtttatttatcagaaatggctcctccgaatctaagaggagctttcaacaacgggtttcaagtagcgattatctttggtattgtggttgcaacgatcatcaattacttcaccgcacagatgaaaggaaacatcggatggagaatctctctcggattagcttgtgtccctgcagtgatgatcatgatcggagctctgatccttcccgacactcccaactctctcatcgaacgtggctacaccgaagaggccaaggaaatgcttcagtccatccgaggaaccaatgaagtcgatgaagagtttcaagatctcattgatgcaagtgaggagtccaagcaagtgaaacacccatggaagaacatcatgcttcctcgttacagaccacaattgatcatgacttgcttcattcctttctttcaacaacttaccggaatcaatgtcattaccttctacgccccggttttgttccaaaccctcgggttcggtagcaaagcttccctcctatcagctatggtaacgggtatcatcgagctcttgtgtaccttcgtctctgtttttacagtggataggtttggaagaagaatcttgttcctccaaggaggtatccagatgcttgtctctcagatcgctattggagccatgattggagtcaaatttggagtggctggaacaggaaacatagggaaaagtgatgccaatctaatcgtggcactgatctgcatctatgtagcgggtttcgcctggtcatggggaccgttgggatggttggttcctagtgagatatctccactagagatccgatcagcagctcaagccataaacgtttcggtcaacatgttcttcacattccttgtggctcagctcttcctcactatgctttgtcacatgaaattcggactattcttcttcttcgccttctttgttgtcataatgacaatattcatctacttgatgttgcctgagacaaagaatgtgccaatcgaagagatgaacagagtgtggaaggcacattggttctggggaaagtttattcctgatgaagctgtcaatatgggtgctgctgagatgcaacagaagtccgtatga

SEQ ID NO: 7787 - protein, 514 aa, Arabidopsis thaliana (mouse-ear cress)
MAGGFVSQTPGVRNYNYKLTPKVFVTCFIGAFGGLIFGYDLGISGGVTSMEPFLEEFFPYVYKKMKSAHENEYCRFDSQLLTLFTSSLYVAALVSSLFASTITRVFGRKWSMFLGGFTFFIGSAFNGFAQNIAMLLIGRILLGFGVGFANQSVPVYLSEMAPPNLRGAFNNGFQVAIIFGIVVATIINYFTAQMKGNIGWRISLGLACVPAVMIMIGALILPDTPNSLIERGYTEEAKEMLQSIRGTNEVDEEFQDLIDASEESKQVKHPWKNIMLPRYRPQLIMTCFIPFFQQLTGINVITFYAPVLFQTLGFGSKASLLSAMVTGIIELLCTFVSVFTVDRFGRRILFLQGGIQMLVSQIAIGAMIGVKFGVAGTGNIGKSDANLIVALICIYVAGFAWSWGPLGWLVPSEISPLEIRSAAQAINVSVNMFFTFLVAQLFLTMLCHMKFGLFFFFAFFVVIMTIFIYLMLPETKNVPIEEMNRVWKAHWFWGKFIPDEAVNMGAAEMQQKSV

SEQ ID NO: 7788 - DNA, 1853 bp, Nicotiana tabacum (common tobacco)
  CDS (103)..(1674)
atttctacagtttacgattacagttctctctcaacttttttcttttttcttgatcatttcttgtgccacaagttgttcttgttttgtgatcagctcagaaagatggctggtggtggtggtattggtcccggcaacgggaaagaatatcccggcaatttaactctttatgttaccgttacgtgcattgtcgctgccatgggtggtctcattttcggttacgatattggaatttctggaggtgtgacatcaatggactcattcttgagcagatttttcccatctgtgttcaggaagcaaaaggcagatgattcaacaaatcaatactgcaaatttgacagccaaacattgacgatgttcacgtcgtcattgtacttggctgctcttttgtcgtctctggtggcatctactgtcaccagaaaacttggacggagactttctatgctctgtggaggtgtcctcttctgtgctggagctttgatcaatggctttgctcagaatgttgctatgctcattgttggtcgtattttactaggttttggtattggattcgccaatcagtctgttccactatacctatctgaaatggctccatacaagtacagaggagcactcaacctaggttttcaactgtccattacaattggtatacttgtagcaaatgtgttgaactatttctttgccaagattcattggggatggagattaagcttaggaggtgctatggtacctgcattgatcatcacaataggctcacttttccttcccgagacaccaaactccatgatcgaacgtggcaatcacgacgaagccaaagctaggcttaaaagaatcagaggcattgatgatgtagacgaagagttcaatgatttagtcgtggcgagtgaggcttctaggaaaattgagaacccttggagaaatttgttgcaaaggaaatataggccacatctcacaatggcaattatgatcccatttttccagcaacttactggaatcaatgtgattatgttctatgcaccagttttgtttaagactattggttttggtgctgatgcttcccttatgtctgctgttattactggtggagtcaatgtacttgcaactgttgtttctatttactatgttgataaattgggaagaagattcttgttccttgaaggtggcattcaaatgctcatctgccaaatagcggtgtcaatttgcatagctataaaatttggagtgaatggaactccaggggatttaccaaagtggtacgcgatagtagtggtgatattcatctgtgtttatgtagctggatttgcttggtcctggggacctctaggatggttggtacctagtgaaattttcccacttgaaattcgatcagctgctcaaagtatcaatgtttcagtgaacatgatcttcacatttatagtggcacaagtattcttgacaatgttgtgtcatttgaagtttggattgttcctcttctttgcattctttgttgtgattatgactgtcttcatttacttcttcttgcctgagacaaagaatatcccaattgaagagatggtgattgtgtggaaagagcattggttctggtctaagttcatgactgaagtggactatcctggaactaggaatggaacaagtgttgaaatgtcaaaagggagtgctggttacaaaatagtatgacctaattaaagaagatgtttggatttattttaattttatttgttgttgtataatgttttagtgggatgatattgttagatttgaactgtttctcttgtctctattgcatagaaaatacatactttactgtgttcaatttcaacctctcaacaattaatataagatttgtcagagcaaaa

SEQ ID NO: 7789 - protein, 523 aa, Nicotiana tabacum (common tobacco)
MAGGGGIGPGNGKEYPGNLTLYVTVTCIVAAMGGLIFGYDIGISGGVTSMDSFLSRFFPSVFRKQKADDSTNQYCKFDSQTLTMFTSSLYLAALLSSLVASTVTRKLGRRLSMLCGGVLFCAGALINGFAQNVAMLIVGRILLGFGIGFANQSVPLYLSEMAPYKYRGALNLGFQLSITIGILVANVLNYFFAKIHWGWRLSLGGAMVPALIITIGSLFLPETPNSMIERGNHDEAKARLKRIRGIDDVDEEFNDLVVASEASRKIENPWRNLLQRKYRPHLTMAIMIPFFQQLTGINVIMFYAPVLFKTIGFGADASLMSAVITGGVNVLATVVSIYYVDKLGRRFLFLEGGIQMLICQIAVSICIAIKFGVNGTPGDLPKWYAIVVVIFICVYVAGFAWSWGPLGWLVPSEIFPLEIRSAAQSINVSVNMIFTFIVAQVFLTMLCHLKFGLFLFFAFFVVIMTVFIYFFLPETKNIPIEEMVIVWKEHWFWSKFMTEVDYPGTRNGTSVEMSKGSAGYKIV

SEQ ID NO: 7790 - DNA, 2114 bp, Saccharomyces cerevisiae
  CDS (373)..(2076)
ggatcggtaactctgattatcacagagaaagcttcgtggagaatttttccagattttccgctttccccgatgttggtatttccggaggtcattatactgaccgccattataatgactgtacaacgaccttctggagaaagaaacaactcaataacgatgtgggacattgggggcccactcaaaaaatctggggactatatccccagagaatttctccagaagagaagaaaagtcaaagttttttttcgcttgggggttgcatataaatacaggcgctgttttatcttcagcatgaatattccataattttacttaatagcttttcataaataatagaatcacaaacaaaatttacatctgagttaaacaatcatgaattcaactccagatttaatatctccacaaaagtcaagtgagaattcgaatgctgacctgccttcgaatagctctcaggtaatgaacatgcctgaagaaaaaggtgttcaagatgatttccaagctgaggccgaccaagtacttaccaacccaaatacaggtaaaggtgcatatgtcactgtgtctatctgttgtgttatggttgccttcggtggtttcgttttcggttgggatactggtaccatttctggtttcgtcgcccaaactgatttcttgagaagattcggtatgaagcataaagatggtagttattatttgtctaaggttagaactggtttaattgtctccattttcaacattggttgtgccattggtggtattattttggctaaattgggtgatatgtacggtcgtaaaatgggtttgattgtcgttgttgttatctacatcatcggtattattattcaaattgcatccatcaacaaatggtaccaatatttcatcggtagaattatttccggtttgggtgttggtggtattgccgttttatctcctatgttgatttctgaagtcgctcctaaggaaatgagaggtactttagtctcctgttaccaactgatgattaccttgggtattttcttgggttactgtaccaacttcggtactaagaactactccaactctgtgcaatggagagttccattaggtttgtgttttgcctgggctttgtttatgatcggtggtatgactttcgttccagaatccccacgttatttggttgaagctggtcaaattgacgaagcaagagcatctctttccaaagttaacaaggttgccccagaccatccattcattcaacaagagttggaagttattgaagctagtgttgaagaagctagagctgctggttcagcatcatggggtgagttgttcactggtaagccggccatgtttaagcgtactatgatgggtatcatgatccaatctctacaacaattgactggtgataactatttcttctactatggtactaccgtttttaacgctgttggtatgagtgattctttcgaaacttctattgttttcggtgtcgtcaacttcttctctacttgttgttctttgtacactgtcgatcgttttggacgtcgtaactgtttgttatatggtgccattggtatggtctgctgttatgtagtttacgcttctgttggtgtcaccagactatggccaaatggtgaaggtaatggttcatccaagggtgctggtaactgtatgattgtctttgcctgtttctatattttctgttttgctaccacttgggctccaattgcttatgttgttatttctgaaactttcccattgagagtcaagtctaaggctatgtctattgctacagctgctaattggttgtggggtttcttgattggtttcttcactccatttattactggtgctattaacttctactacggttacgttttcatgggctgtatggttttcgcctacttctacgttttcttctttgtgccagaaactaagggtttgactttggaagaagtcaatgatatgtacgctgaaggtgttctaccatggaagtctgcttcatgggttccaacatctcaaagaggtgctaactacgatgctgatgcattgatgcatgatgaccagccattctacaagaaaatgttcggcaagaaataatttcacgctaaaccgtagtgctgaataatagtgtattt

SEQ ID NO: 7791 - protein, 567 aa, Saccharomyces cerevisiae; identical to SEQ ID NO: 196

SEQ ID NO: 7792 - DNA, 1605 bp, Chlorella kessleri
  CDS (1)..(1605)
atggccggcggcgcaatagtagcttcaggaggggcttcccgcagttcagagtatcaaggcggtcttacagcctatgtcttgctggtagccttggttgccgcctgcggtgggatgctgttgggctatgacaatggcgtcaccggaggtgtagcctccatggagcagtttgagaggaagttcttccctgatgtgtatgagaagaagcagcagattgtggagaccagcccatactgcacctacgacaacccgaagctgcagctctttgtgtcctcgctgttcctggcgggtctcatctcctgcatcttctctgcctggatcacccgcaactggggccgcaaggccagcatgggtattggcggtatcttcttcatcgctgctggtggcctggtcaatgcattcgcccaggacattgccatgctcatcgtcggccgcgtcctgctgggttttggcgttggccttggcagccaggtggttccccagtacttgtctgaggttgcccccttctcccaccgcggcatgctcaacatcggctaccagctgtttgtcaccatcggcatcctcatcgcaggactcgtcaactacggcgtgaggaactgggacaatggctggcgcctgtccctgggtctggctgccgtccccggcctcatcctgctgctgggagctattgtcctgcccgagtcccccaacttcctggtggagaagggccgcactgaccagggtcgtcgcatcctggagaagctgcggggcacctcccatgtagaagctgagtttgccgacatcgtggcagcagtcgagattgctcgtcccattaccatgcgtcagagctggaggtcactctttacccgccgctacatgccccagctgttgaccagctttgtcatccagttcttccagcagttcaccggcatcaacgccatcatcttctacgtgcctgtgctcttctcctccctgggaagtgccagctccgcagccctgctcaacactgtcgtggtgggcgctgtcaacgtgggcagcaccatgattgccgtcctcttgtccgacaagtttggccgccgcttcctgctcattgagggcggcattacgtgctgcctggccatgcttgcggccggtattacccttggtgtggagtttggacagtacggcactgaggacctgccccaccccgtctctgctggtgtcctggctgtcatctgtatcttcattgctggatttgcgtggtcctggggccccatgggctggctcatcccctctgagatcttcaccctggagacccgccctgccggcactgccgtggctgtcatgggcaacttcctgttctccttcgtcattggccaggccttcgtgtccatgctttgcgccatgaagtttggcgtcttcctcttcttcgctggctggttggtgattatggttctgtgtgccatcttcctgttgcccgagaccaagggtgtgcccatcgagcgtgtccaggcactctacgcccgccactggttctggaagaaggtaatgggtcctgctgcccaggagatcattgctgaggatgagaagcgtgtggctgcctcccaggctatcatgaaggaggagaggatctctcagaccatgaagtaa

SEQ ID NO: 7793 - protein, 534 aa, Chlorella kessleri
MAGGAIVASGGASRSSEYQGGLTAYVLLVALVAACGGMLLGYDNGVTGGVASMEQFERKFFPDVYEKKQQIVETSPYCTYDNPKLQLFVSSLFLAGLISCIFSAWITRNWGRKASMGIGGIFFIAAGGLVNAFAQDIAMLIVGRVLLGFGVGLGSQVVPQYLSEVAPFSHRGMLNIGYQLFVTIGILIAGLVNYGVRNWDNGWRLSLGLAAVPGLILLLGAIVLPESPNFLVEKGRTDQGRRILEKLRGTSHVEAEFADIVAAVEIARPITMRQSWRSLFTRRYMPQLLTSFVIQFFQQFTGINAIIFYVPVLFSSLGSASSAALLNTVVVGAVNVGSTMIAVLLSDKFGRRFLLIEGGITCCLAMLAAGITLGVEFGQYGTEDLPHPVSAGVLAVICIFIAGFAWSWGPMGWLIPSEIFTLETRPAGTAVAVMGNFLFSFVIGQAFVSMLCAMKFGVFLFFAGWLVIMVLCAIFLLPETKGVPIERVQALYARHWFWKKVMGPAAQEIIAEDEKRVAASQAIMKEERISQTMK

SEQ ID NO: 7794 - DNA, 2160 bp, Saccharomyces cerevisiae; identical to SEQ ID NO: 197
  CDS (216)..(1928)

SEQ ID NO: 7795 - protein, 570 aa, Saccharomyces cerevisiae; identical to SEQ ID NO: 198

SEQ ID NO: 7796 - DNA, 1673 bp, Rattus norvegicus (Norway rat)
  CDS (85)..(1566)
ggcttaaggaaacttgctgcggaggaaagacattggctggacacctctagatctaccttaagacttgagagctaggttgggaccatggggacagcgaaggtgaccccatctctggtgttcgctgttactgttgccacaatcggttctttccagtttggctacaacaccggagtcatcaatgcgcctgagacaatcattaaggactttcttaactacacgttggaagagcggttggaagacctaccaagggaggggctgctgaccacgctctggtcgttatgtgtggccatcttctccgttgggggcatgattggctctttttctgtcggactctttgtcaaccgctttggcagacgcaactccatgcttctagtcaacctgattgccatccttgggggttgccttatgggcttcgccaagatagcggagtcggttgaaatgctgatcctgggccgcctgattattggcatcttctgtggtctgtgcacgggctttgtgccgatgtacattggagaggtgtctcccactgccctacggggtgcatttggcacgctaaaccagctgggcatcgttgttgggatccttgtggctcaggtctttggtttggactttattctgggctctgaggagctgtggcctggactactgggcttaaccatcattccagctatcctacagagcgcagcccttccgttttgccccgagagtccaaggttcttgctcattaacagaaaggaggaagaccaagcaacggagatcctccagcggttgtggggcaccccggatgtgatccaggagatccaggagatgaaagacgagagtatcaggatgtcacaggagaagcaggtcactgtgctggagctcttcaagtctcctagctacttccagccccttctcatctccgttgtcctccagttgtctcagcagttctctgggatcaatgctgtgttctattactcgacgggaatcttccaggatgcgggtgtccaggagcccatctatgccacgattggagcgggtgtggtcaacactatcttcactgtagtctctctgttcctggtggagcgggcaggaaggagaaccctgcacatgataggcctgggaggcatggctgtttgctccgttttcatgacgatttctctgttactgaaggatgaatatgaagccatgagctttgtctgtattgtggctatcttggtctacgtggccttctttgagattggccctggccccattccctggtttattgtggctgaactcttcagccagggcccccgaccagctgccatggctgtggctggctgttctaactggacctccaactttttggtgggaatgttcttcccctcggctgcggcctacttgggagcctacgtttttatcatcttcgctgccttcctcgttttcttcctaatcttcacctccttcaaagtcccagagaccaaaggcaggactttcgaggatattacccgggccttcgaggggcaggcgcactctgggaaaggctctgctggtgtggagttgaacagcatgcagcctgtcaaggagacccctggcaatgcctgagccggacctcctccctcacctccctccactgtggaaagccaacctcccctgaagtggcgagacctcatcaggatgaaccaggactgcttctgagcgctcgtatcaca

SEQ ID NO: 7797 - protein, 493 aa, Rattus norvegicus (Norway rat)
MGTAKVTPSLVFAVTVATIGSFQFGYNTGVINAPETIIKDFLNYTLEERLEDLPREGLLTTLWSLCVAIFSVGGMIGSFSVGLFVNRFGRRNSMLLVNLIAILGGCLMGFAKIAESVEMLILGRLIIGIFCGLCTGFVPMYIGEVSPTALRGAFGTLNQLGIVVGILVAQVFGLDFILGSEELWPGLLGLTIIPAILQSAALPFCPESPRFLLINRKEEDQATEILQRLWGTPDVIQEIQEMKDESIRMSQEKQVTVLELFKSPSYFQPLLISVVLQLSQQFSGINAVFYYSTGIFQDAGVQEPIYATIGAGVVNTIFTVVSLFLVERAGRRTLHMIGLGGMAVCSVFMTISLLLKDEYEAMSFVCIVAILVYVAFFEIGPGPIPWFIVAELFSQGPRPAAMAVAGCSNWTSNFLVGMFFPSAAAYLGAYVFIIFAAFLVFFLIFTSFKVPETKGRTFEDITRAFEGQAHSGKGSAGVELNSMQPVKETPGNA

SEQ ID NO: 7798 - DNA, 2209 bp, Saccharomyces cerevisiae
  CDS (213)..(1925)
aaaaggaggaaaatacaaaatatactagaactgaaaaaaaaaaagtataaatagagacgatatatgccaatacttcacaatgttcgaatctattcttcatttgcagctattgtaaaataataaaacatcaagaacaaacaagctcaacttgtcttttctaagaacaaagaataaacacaaaaacaaaaagtttttttaattttaatcaaaaaatgtcacaagacgctgctattgcagagcaaactcctgtggagcatctctctgctgttgactcagcctcccactcggttttatctacaccatcaaacaaggctgaaagagatgaaataaaagcttatggtgaaggtgaagagcacgaacctgtcgttgaaattccaaagagaccagcttctgcctatgtcactgtctctattatgtgtatcatgatcgcctttggtggtttcgttttcggttgggatactggtaccatttctggtttcatcaatcaaaccgatttcatcagaagatttggtatgaagcataaagatggtactaattatttgtctaaggttagaactggtttgattgtctccattttcaacattggttgtgccattggtggtattattctttccaaattgggtgatatgtacggtcgtaaggtgggtttgattgtcgttgttgtcatctacatcatcggtattattattcaaattgcatctatcaacaaatggtaccaatatttcatcggtagaattatttccggtttgggtgttggtggtattgccgttttatctcctatgttgatttctgaagtatccccaaagcatttaaggggtactttagtctcttgctaccaattgatgattactgccggtattttcttgggttactgtaccaacttcggtactaagaactactccaactctgtgcaatggagagttccattaggtttgtgttttgcctgggctttgtttatgattggtggtatgacatttgttccagagtctccacgttatttggctgaagtcggtaagatcgaagaagccaaacgttctattgccgtttctaacaaggttgctgttgatgatccatctgttttggctgaagtcgaagctgtcttggctggtgtagaggcagagaaattagctggtaatgcatcctggggtgaattgtttagtagcaagacaaaggtccttcagcgtttgatcatgggtgctatgattcaatctctacaacaattgacaggtgataactatttcttctactatggtactactattttcaaggctgttggtttgagtgactctttcgaaacctctattgtcttgggtattgttaactttgcttccacctttgttggtatttacgttgttgagagatatggtcgtcgtacttgtttgctatggggtgctgcatccatgactgcttgtatggttgtctatgcttccgtgggtgtcaccagattatggccaaatggtcaagaccaaccatcttccaagggtgctggtaactgtatgattgtctttgcctgtttctatattttctgttttgctactacatgggctccaattccttatgtcgttgtttctgaaactttcccattgagagtcaagtctaaggctatgtctattgctacagctgctaattggttgtggggtttcttgattggtttcttcactccatttattactggtgctattaacttctactacggttacgttttcatgggctgtttggtcttcatgttcttctatgttttgttagttgttccagaaactaagggtttgactttggaagaagtcaacaccatgtgggaagaaggtgttctaccatggaagtctgcctcatgggttccaccatccagaagaggtgccaactacgacgctgaagaaatgactcacgatgacaagccattgtacaagagaatgttcagcaccaaataatttgcgaacacttttattaattcatgatcacgctctaatttgtgcatttgaaatgtactctaattctaattttatatttttaatgatatcttgaaaagtaaatacgtttttaatatataccaaaataatacagtttaattttcaagtttttgatcatttgttctcagaaagttgagtgggacggagacaaagaaactttaaagagaaatgcaaagtgggaagaagtcagttgtttaccgaccgcactgttattcacaaatattccaattttgcctgcaggtcga

SEQ ID NO: 7799 - protein, 570 aa, Saccharomyces cerevisiae
MSQDAAIAEQTPVEHLSAVDSASHSVLSTPSNKAERDEIKAYGEGEEHEPVVEIPKRPASAYVTVSIMCIMIAFGGFVFGWDTGTISGFINQTDFIRRFGMKHKDGTNYLSKVRTGLIVSIFNIGCAIGGIILSKLGDMYGRKVGLIVVVVIYIIGIIIQIASINKWYQYFIGRIISGLGVGGIAVLSPMLISEVSPKHLRGTLVSCYQLMITAGIFLGYCTNFGTKNYSNSVQWRVPLGLCFAWALFMIGGMTFVPESPRYLAEVGKIEEAKRSIAVSNKVAVDDPSVLAEVEAVLAGVEAEKLAGNASWGELFSSKTKVLQRLIMGAMIQSLQQLTGDNYFFYYGTTIFKAVGLSDSFETSIVLGIVNFASTFVGIYVVERYGRRTCLLWGAASMTACMVVYASVGVTRLWPNGQDQPSSKGAGNCMIVFACFYIFCFATTWAPIPYVVVSETFPLRVKSKAMSIATAANWLWGFLIGFFTPFITGAINFYYGYVFMGCLVFMFFYVLLVVPETKGLTLEEVNTMWEEGVLPWKSASWVPPSRRGANYDAEEMTHDDKPLYKRMFSTK

SEQ ID NO: 7800 - DNA, 3025 bp, Saccharomyces cerevisiae; identical to SEQ ID NO: 201
  CDS (510)..(2288)

SEQ ID NO: 7801 - protein, 592 aa, Saccharomyces cerevisiae; identical to SEQ ID NO: 202

SEQ ID NO: 7802 - DNA, 1683 bp, Saccharomyces cerevisiae
  CDS (1)..(1683)
atgtctgaagaagctgcctatcaagaggatacagcagtccaaaatactccagctgatgctttgtcgccagttgaatccgattctaattccgctttgtctactccatccaacaaagctgaaagagatgacatgaaagatttcgacgagaatcacgaagaatctaataactacgttgaaattccaaagaagcccgcctccgcctacgttacagtttccatctgttgtttaatggttgctttcggtggttttgttttcggttgggatactggtaccatttctggttttgttgctcaaactgattttatcagaagatttggtatgaagcaccacgatggtacttattatttgtctaaggttagaactggtttaattgtctccattttcaacattggttgtgccattggtggtattattttagcaaaattaggtgatatgtatggtcgtaaaatgggtttgattgtcgttgttgtcatctacattatcggtatcattatccaaattgcctcaatcaacaagtggtaccaatatttcattggtagaattatctctggtttaggtgtcggtggtattgccgttttatctcctatgttgatttctgaagtctctccaaagcatattagaggtactttggtttcatgttaccaacttatgattactttgggtattttcttgggttactgtacaaactacggtaccaagacctacaccaattctgtccaatggagagttccattaggtctaggtttcgcttgggctttgtttatgattggtggtatgacattcgttccagaatctccacgttatttagttgaagtcggtaaaattgaagaagctaagcgttctattgctctttcaaataaggtcagcgcagacgatccagctgttatggctgaagtcgaagttgttcaagctacagttgaagctgaaaaattagctggtaatgcctcctggggtgaaatatttagcactaagactaaggttttccaacgtttgatcatgggtgctatgattcaatcattgcaacaattgacaggtgataactatttcttctattacggtactaccgttttcactgctgtcggtttggaagattcttttgaaacttctattgtcttgggtattgtcaactttgcttccacctttgttggtattttcttagtcgaaagatatggtcgtcgtagatgtttattatggggtgctgcttccatgacagcttgtatggttgttttcgcttctgttggtgttacaagattgtggccaaatggtaagaagaacgggtcttctaagggtgctggtaactgtatgattgtcttcacatgtttctacttattctgttttgccactacctgggctccaattccatttgttgttaactctgaaactttcccattgagagttaagtccaagtgtatggctattgctcaagcttgtaactggatctggggtttcttgattggtttctttactccatttatttcaggtgctattgatttctactacggttatgttttcatgggctgtttggtcttttcttacttctacgtcttcttcttcgttccagaaactaaaggtttgactttagaagaagttaacaccttatgggaagaaggtgttttgccatggaaatcaccttcttggttccaccaaacaagagaggtactgactacaacgctgatgatctaa

SEQ ID NO: 7803 - protein, 560 aa, Saccharomyces cerevisiae
MSEEAAYQEDTAVQNTPADALSPVESDSNSALSTPSNKAERDDMKDFDENHEESNNYVEIPKKPASAYVTVSICCLMVAFGGFVFGWDTGTISGFVAQTDFIRRFGMKHHDGTYYLSKVRTGLIVSIFNIGCAIGGIILAKLGDMYGRKMGLIVVVVIYIIGIIIQIASINKWYQYFIGRIISGLGVGGIAVLSPMLISEVSPKHIRGTLVSCYQLMITLGIFLGYCTNYGTKTYTNSVQWRVPLGLGFAWALFMIGGMTFVPESPRYLVEVGKIEEAKRSIALSNKVSADDPAVMAEVEVVQATVEAEKLAGNASWGEIFSTKTKVFQRLIMGAMIQSLQQLTGDNYFFYYGTTVFTAVGLEDSFETSIVLGIVNFASTFVGIFLVERYGRRRCLLWGAASMTACMVVFASVGVTRLWPNGKKNGSSKGAGNCMIVFTCFYLFCFATTWAPIPFVVNSETFPLRVKSKCMAIAQACNWIWGFLIGFFTPFISGAIDFYYGYVFMGCLVFSYFYVFFFVPETKGLTLEEVNTLWEEGVLPWKSPSWFHQTREVLTTTLMI

SEQ ID NO: 7804 - DNA, 1463 bp, Klebsiella oxytoca
  CDS (27)..(1445)
gtcttacttcgtctggcaggaaaaaaatgaccactctcagtcacgactctacaaccatgccgcgtacgcagcgcgatacccggcgcatgaatcagtttgtctccattgccgccgcggtggcagggttgctgtttggcctcgatatcggggtgattgccggggcgctgccctttattaccgaccattttgttttatccagccgcctgcaggagtgggtggtgagcagcatgatgctgggagccgccatcggcgcgttatttaacggctggctctctttccgcctcgggcgcaaatacagcctgatggtgggcgcggtgctgttcgttgccggctccgtgggctccgcgtttgcgaccagcgtcgaaatgctgctggtggcaaggatcgttctcggggtcgccgtggggatcgcctcttataccgcgccgctgtacctgtcggaaatggcgagcgaaaacgtgcgcggcaagatgatcagcatgtatcagctgatggtgacgctgggtatcgtgatggcgtttctctccgacaccgcgttcagctacagcggcaactggcgggcgatgcttggcgtactggcgctgccggcggtggtgctgattattctggtgatcttcctgccgaacagcccgcgctggctggcggaaaaagggcgtcacgtggaagcggaagaggtgctgcggatgctgcgcgacacgtcagaaaaagcccgtgacgagctcaacgagatccgcgaaagcctgaagctgaagcagggcggctgggcgctgtttaaggtcaaccgcaacgtgcggcgggcggtattcctcggcatgctgttgcaggcgatgcagcagtttaccggtatgaatatcatcatgtactacgcgccgcgcatctttaaaatggcgggcttcaccaccaccgaacagcagatggtcgcgaccctggtggttggcctgacctttatgttcgccacctttatcgccgtctttaccgtcgataaggccggacgtaagccggcgctgaaaatcggttttagcgtgatggccatcggcacgctggtgctgggctactgtctgatgcagtttgataacggcaccgcctccagcggtctctcctggctgtcggtggggatgaccatgatgtgtatcgccggctatgcgatgagcgccgcgccggtggtgtggatcctgtgttcggaaattcagccgctgaagtgccgcgatttcggcatcacctgctcaaccaccaccaactgggtgtcgaacatgattatcggcgcgaccttcctgacgctgctggacgcgatcggcgcggcaggaaccttctggctttataccgcgctgaacgtcgcctttatcggcgtgacgttctggctgatcccggaaaccaaaaacgtcaccctggagcatattgaacgcaggctgatgtccggcgagaagctgcgcaatatcggcaattaattacaacgactcgcgcgg

SEQ ID NO: 7805 - protein, 472 aa, Klebsiella oxytoca
MTTLSHDSTTMPRTQRDTRRMNQFVSIAAAVAGLLFGLDIGVIAGALPFITDHFVLSSRLQEWVVSSMMLGAAIGALFNGWLSFRLGRKYSLMVGAVLFVAGSVGSAFATSVEMLLVARIVLGVAVGIASYTAPLYLSEMASENVRGKMISMYQLMVTLGIVMAFLSDTAFSYSGNWRAMLGVLALPAVVLIILVIFLPNSPRWLAEKGRHVEAEEVLRMLRDTSEKARDELNEIRESLKLKQGGWALFKVNRNVRRAVFLGMLLQAMQQFTGMNIIMYYAPRIFKMAGFTTTEQQMVATLVVGLTFMFATFIAVFTVDKAGRKPALKIGFSVMAIGTLVLGYCLMQFDNGTASSGLSWLSVGMTMMCIAGYAMSAAPVVWILCSEIQPLKCRDFGITCSTTTNWVSNMIIGATFLTLLDAIGAAGTFWLYTALNVAFIGVTFWLIPETKNVTLEHIERRLMSGEKLRNIGN

SEQ ID NO: 7806 - DNA, 1641 bp, Saccharomyces cerevisiae; identical to SEQ ID NO: 203
  CDS (1)..(1641)

SEQ ID NO: 7807 - protein, 546 aa, Saccharomyces cerevisiae; identical to SEQ ID NO: 204

SEQ ID NO: 7808 - DNA, 1695 bp, Saccharomyces cerevisiae; identical to SEQ ID NO: 205
  CDS (1)..(1695)

SEQ ID NO: 7809 - protein, 564 aa, Saccharomyces cerevisiae; identical to SEQ ID NO: 206

SEQ ID NO: 7810 - DNA, 3277 bp, Saccharomyces cerevisiae; identical to SEQ ID NO: 207
  CDS (802)..(2505)

SEQ ID NO: 7811 - protein, 567 aa, Saccharomyces cerevisiae; identical to SEQ ID NO: 208

SEQ ID NO: 7812 - DNA, 1710 bp, Saccharomyces cerevisiae; identical to SEQ ID NO: 209
  CDS (1)..(1710)

SEQ ID NO: 7813 - protein, 569 aa, Saccharomyces cerevisiae; identical to SEQ ID NO: 210

SEQ ID NO: 7814 - DNA, 1701 bp, Kluyveromyces marxianus var. lactis, Candida sphaerica; identical to SEQ ID NO: 211
  CDS (1)..(1701)

SEQ ID NO: 7815 - protein, 566 aa, Kluyveromyces marxianus var. lactis, Candida sphaerica; identical to SEQ ID NO: 212

SEQ ID NO: 7816 - DNA, 1704 bp, Saccharomyces cerevisiae
  CDS (1)..(1704)
atggcaagcgaacagtcctcaccagaaattaatgcagataatctaaacagtagtgcagctgacgttcatgtacagccacccggagagaaagaatggtcagacgggttttatgacaaagaagtcattaatggaaatacgccagacgcaccgaagagaggctttttaggttaccttattatctacttactatgctatcctgtatcctttggcggttttttacctggttgggatagtggtattactgcaggcttcatcaatatggataactttaaaatgaattttggttcttacaagcacagtactggtgagtattatttgagcaacgtgcgtatgggtcttctcgtggccatgttcagtgtaggatgttccattggcggtgttgcttttgcgagacttgctgatactttaggtagaaggctagcaattgtaatcgtggttttggtatatatggttggtgcaattattcagatcagttcgaatcacaaatggtaccaatactttgtcggtaagatcatctacggtcttggtgctggtggctgttcggtgttgtgtccaatgcttttatctgaaatagcccccacagatttgagaggtggacttgtctcattgtaccaacttaacatgaccttcggtattttcttgggttattgtagcgtttatggaacaaggaagtatagtaatactgcgcaatggaggattcctgtgggactatgctttctgtgggctctaattatcatcgttggcatgttattagttccagagtccccaagatatctgattgaatgtgagagacatgaagaggcctgtgtctccatcgccaagatcgacaaggtttcaccagaggatccatgggtactcaaacaggctgatgaaatcaacgccggtgtccttgcccaaagagaactaggggaagcctcatggaaagaacttttctccgtcaaaacaaaagtccttcaacgtttgatcacaggtattcttgtgcaaacctttttgcaacttactggtgaaaactacttcttcttctacggaactaccattttcaaatcagttgggcttactgatgggtttgagacttcgatcgtcctaggtacagtgaatttcttctccactattattgctgttatggtcgtagacaaaataggccgtcgtaaatgtctgttattcggagcggcttcaatgatggcttgtatggtcatatttgcaagtatcggggtaaaatgtctttaccctcatggccaggatggtccatcctcgaaaggtgcaggtaatgccatgattgtgttcacatgcttctatatattctgctttgcaacgacatgggcccctgttgcttatattgtggttgccgagtcattcccttcgaaggtcaaatctaaagcaatgtcaatttcgactgcattcaactggttatggcaattcttgattggttttttcacaccattcattactgggtctatccacttctattatggttatgtgttcgtaggttgtttggttgctatgtttttgtacgttttcttctttttaccagaaacaattggtctatctttggaggaaacccagttactatatgaagaaggtataaaaccatggaaatctgcatcttgggtaccaccctcaaggagaggagcttcttccagggaaactgaggctaagaagaaaagctggaaagaagttttgaagttcccaaagagttttaattga

SEQ ID NO: 7817 - protein, 567 aa, Saccharomyces cerevisiae
MASEQSSPEINADNLNSSAADVHVQPPGEKEWSDGFYDKEVINGNTPDAPKRGFLGYLIIYLLCYPVSFGGFLPGWDSGITAGFINMDNFKMNFGSYKHSTGEYYLSNVRMGLLVAMFSVGCSIGGVAFARLADTLGRRLAIVIVVLVYMVGAIIQISSNHKWYQYFVGKIIYGLGAGGCSVLCPMLLSEIAPTDLRGGLVSLYQLNMTFGIFLGYCSVYGTRKYSNTAQWRIPVGLCFLWALIIIVGMLLVPESPRYLIECERHEEACVSIAKIDKVSPEDPWVLKQADEINAGVLAQRELGEASWKELFSVKTKVLQRLITGILVQTFLQLTGENYFFFYGTTIFKSVGLTDGFETSIVLGTVNFFSTIIAVMVVDKIGRRKCLLFGAASMMACMVIFASIGVKCLYPHGQDGPSSKGAGNAMIVFTCFYIFCFATTWAPVAYIVVAESFPSKVKSKAMSISTAFNWLWQFLIGFFTPFITGSIHFYYGYVFVGCLVAMFLYVFFFLPETIGLSLEETQLLYEEGIKPWKSASWVPPSRRGASSRETEAKKKSWKEVLKFPKSFN

SEQ ID NO: 7818 - DNA, 3323 bp, Saccharomyces cerevisiae; identical to SEQ ID NO: 217
  CDS (1189)..(2883)

SEQ ID NO: 7819 - protein, 564 aa, Saccharomyces cerevisiae; identical to SEQ ID NO: 218

SEQ ID NO: 7820 - DNA, 3143 bp, Saccharomyces cerevisiae; identical to SEQ ID NO: 219
  CDS (962)..(2686)

SEQ ID NO: 7821 - protein, 574 aa, Saccharomyces cerevisiae; identical to SEQ ID NO: 220

SEQ ID NO: 7822 - DNA, 4409 bp, Saccharomyces cerevisiae; identical to SEQ ID NO: 221
  CDS (1233)..(3524)

SEQ ID NO: 7823 - protein, 763 aa, Saccharomyces cerevisiae; identical to SEQ ID NO: 222

SEQ ID NO: 7824 - DNA, 1668 bp, Saccharomyces cerevisiae
  CDS (1)..(1668)
atgtctacagatgaaagtgaagacgtttattctgatctgtattccattatctcccaggtaacatccaatactgccaatgacatcgagcaactcccatatgctttaacgttcaaaacgtcgttaatcttcgttggtgctaccattggtgggcttttattcggctatgatactggtgttatatcaggtgttctgctttctttaaagcccgaagatctatctttggtagttttaacggatgttcagaaggagctgataacttccagtacaagcgtcggatcattttttggctctattctggcatttcctttagcagataggtatggaagaagaattactctcgcaatctgctgttcaatttttatcctagctgcaattggaatggctatagcaagaacattgacgtttttgatttgtgggagattgctggttgggatcgctgttggagtgtctgcccagtgcgtccctctatttctgagtgaaatttcaccttccagaatcaggggttttatgttgacattgaacattattgccatcactggaggtcaattggtttcctatgtgattgcgtcccttatgaaagagattgataattcatggagatatttgttcgcactttctgctattccagctattctgttcctttcaatactggattttatccctgaatcgccacgatggtccatttccaagggagacattctatataccagggattctctaagaatgctatatcctactgcatctacatatcatgtgaatagtaaaattaagcagctgataattgaactcgataagttacgactatacgaagatgcaagtgaacctttactagtacagtcccaatcggttattcgatacatggatagttcaacctcaggaactcttagcccacctaacattaaaagactttcctcgaacacagaaagaactagcaacacaatgtcctcctcatcagcatatctatcggcgttgcgaggcccagctccaaacggtgccctggcatctaacaaaaagaaaagacacagaatggagccacgcacaataagagcgttaatagtaggttgcatgttaatgtttttccagcaaatcactggctttaatgcttttatgtactatgcggcaataatattttccaaatttaatataaaaaaccctctactgcctccaattttgattgcctcaacgaacttcatattcacttttttcgccatgtacaccatggactctttgggaagaagagccattcttttgagaacaattttgattatgactgttgggttacttctttgcagtgtaggtttcggtcatgaccaagtcaatttacttttaatttctgttgtaatttatgttgcagcatatgcttctgcgatgggcagcgttccatggacctgtgtggaatttctccccttgaacaggagatcatttggggcatcatgtatagcctgcacaaattggttgaccaatgcatttgtttcaatgacatatctgagcactattaacaccattggtgatgaaaatacaatgctcatttttgcttttttcacagtttgtgcctggtttttcgtatatttttggtatccagaagtcaaaggtttgtcactggaagaggttggaagggtttttgataatggaattgatgttcattatgtctttcgtacctaccattga

SEQ ID NO: 7825 - protein, 555 aa, Saccharomyces cerevisiae
MSTDESEDVYSDLYSIISQVTSNTANDIEQLPYALTFKTSLIFVGATIGGLLFGYDTGVISGVLLSLKPEDLSLVVLTDVQKELITSSTSVGSFFGSILAFPLADRYGRRITLAICCSIFILAAIGMAIARTLTFLICGRLLVGIAVGVSAQCVPLFLSEISPSRIRGFMLTLNIIAITGGQLVSYVIASLMKEIDNSWRYLFALSAIPAILFLSILDFIPESPRWSISKGDILYTRDSLRMLYPTASTYHVNSKIKQLIIELDKLRLYEDASEPLLVQSQSVIRYMDSSTSGTLSPPNIKRLSSNTERTSNTMSSSSAYLSALRGPAPNGALASNKKKRHRMEPRTIRALIVGCMLMFFQQITGFNAFMYYAAIIFSKFNIKNPLLPPILIASTNFIFTFFAMYTMDSLGRRAILLRTILIMTVGLLLCSVGFGHDQVNLLLISVVIYVAAYASAMGSVPWTCVEFLPLNRRSFGASCIACTNWLTNAFVSMTYLSTINTIGDENTMLIFAFFTVCAWFFVYFWYPEVKGLSLEEVGRVFDNGIDVHYVFRTYH

SEQ ID NO: 7826 - DNA, 1542 bp, Arabidopsis thaliana (mouse-ear cress)
  CDS (1)..(1542)
atggcaggagggtcgtttggtccgaccggtgtggctaaggagagagcagaacaataccaagggaaagtcactagttatgttataatcgcttgccttgttgcagctattggtggatccatctttggatatgacattggaatctcaggaggagttacatcgatggatgagtttcttgaggagtttttccacacggtttatgagaagaagaagcaagctcatgaaagtaattactgcaaatatgataatcaaggcttagctgctttcacttcttcactctacttagctggtttggtttcgactctcgtggcttcacccatcactaggaactacggtaggcgtgcgagtattgtttgtggtggaatcagctttcttattggatctggtttgaatgctggagctgtgaacttagctatgcttcttgccggacggatcatgcttggtgttggtattgggtttggaaatcaggcggttcctttgtatttatcagaagtggcaccaactcatctacgaggtggtttaaacatgatgtttcagctagctacaactatcgggatctttacagcgaacatggttaattacggtactcaacagcttaagccttggggatggagactctctcttggtttagctgcttttccagctctgcttatgacgcttggcgggtatttcttacccgagacaccaaacagtttggtcgaaagaggattaacagagagaggtcgacgagtcttagtgaagctaagaggaacagaaaacgtcaacgccgagcttcaagacatggtagatgcgagtgagcttgcgaattccatcaaacatccattcagaaacatcttgcagaaacgacacaggcctcagctagttatggctatttgcatgccaatgtttcagatactcacagggataaactccattctcttctacgcacctgttctgttccagacaatggggtttggaggaaacgcatctctctattcatcagctttaacaggagctgttcttgtcctatcaacatttatttccataggattagtagacagattgggacgaagagctcttctcataactggaggaatacaaatgataatctgtcaagtcatagtagcagtgatcttaggagtgaaatttggagacaaccaagagctatcaaaagggtactcagtgatcgtagtcatcttcatctgcctctttgttgtagcgttcggatggtcatggggtcctctaggttggaccatacctagcgaaatctttccgttagagactcgttcagcggggcagagtatcacagtagctgtaaatctcctcttcactttcatcatagctcaagctttccttggtctcctctgtgcattcaagtttggaatcttcctcttctttgctggttgggtgacagtaatgactatctttgtgtatttcctgttgcctgaaaccaaaggagttccaatagaagagatgacactcttatggagtaaacattggttctggaaaaaagtattacctgatgcaacaaatcttgaagatgagagcaagaatgtatctgtttaa

SEQ ID NO: 7827 - protein, 513 aa, Arabidopsis thaliana (mouse-ear cress)
MAGGSFGPTGVAKERAEQYQGKVTSYVIIACLVAAIGGSIFGYDIGISGGVTSMDEFLEEFFHTVYEKKKQAHESNYCKYDNQGLAAFTSSLYLAGLVSTLVASPITRNYGRRASIVCGGISFLIGSGLNAGAVNLAMLLAGRIMLGVGIGFGNQAVPLYLSEVAPTHLRGGLNMMFQLATTIGIFTANMVNYGTQQLKPWGWRLSLGLAAFPALLMTLGGYFLPETPNSLVERGLTERGRRVLVKLRGTENVNAELQDMVDASELANSIKHPFRNILQKRHRPQLVMAICMPMFQILTGINSILFYAPVLFQTMGFGGNASLYSSALTGAVLVLSTFISIGLVDRLGRRALLITGGIQMIICQVIVAVILGVKFGDNQELSKGYSVIVVIFICLFVVAFGWSWGPLGWTIPSEIFPLETRSAGQSITVAVNLLFTFIIAQAFLGLLCAFKFGIFLFFAGWVTVMTIFVYFLLPETKGVPIEEMTLLWSKHWFWKKVLPDATNLEDESKNVSV

SEQ ID NO: 7828 - DNA, 1524 bp, Arabidopsis thaliana (mouse-ear cress)
  CDS (1)..(1524)
atggctgtggttatatcttctaatggtaattccaagtctttcgacgcgaagatgactgtttatgtcttcatctgtgtcattatcgcggctgtaggcggtttgatcttcggttacgacatcggaatctcgggtggagtaacggcgatggacgatttcttgaaggaatttttcccatctgtgtacgaaaggaagaagcatgcgcatgagaacaactattgcaagtatgacaaccagttcttgcagctcttcacttcctctctatacctagcggctctagtggctagcttctttgcttcggctacatgctctaagctcggacgcagacccacaatgcaactcgcttccatcttcttcttgatcggtgttggccttgccgcgggagctgttaacatatacatgttgatcattggtagaatcttgcttggattcggtgttggctttggtaatcaggcggtaccgcttttcttatcagagattgctcccgcgaggcttcgtggaggtctcaacattgttttccaacttatggttacaattggaatcctaattgctaacatagtcaactacttcacctcctcaattcatccttacggatggagaattgccctcggtggcgcgggaattccggctctcatcctcctctttggatcgcttctcatctgcgaaacacccactagtctcatcgaacggaacaaaaccaaggaaggaaaagaaacactcaagaagatcagaggcgttgaagatgttgatgaggagtatgaatcaatagtccatgcttgcgatatcgcaaggcaggtcaaggacccttacacgaaactgatgaaacccgcgagcaggccgcctttcgtgattggaatgttgctacagtttttccaacagttcactggaatcaacgcgattatgttctacgctccggttttgttccagactgtagggtttggaaatgacgcagctctgctttccgcggttgtcacgggaacgatcaacgttctcagcacgtttgtcgggattttccttgtcgacaaaactggccgaagatttctattgctccaatcttccgttcacatgctcatatgccagttggtcattggaatcatcctagccaaggacctagacgtgacgggtacgctagcacggccacaagccctagtagtggtgatcttcgtgtgtgtttacgtgatgggtttcgcttggtcatggggccctctaggatggctaatccctagtgagaccttccccttggagactcgaacggaagggttcgcattggccgtgtcttgcaacatgttcttcacgttcgtgatcgctcaggccttcctatcgatgctttgcgcgatgaagtcagggatattcttcttcttcagtggttggatcgttgtgatgggacttttcgctttgttcttcgtgccggaaacgaaaggagtctccattgatgacatgagagatagtgtgtggaagctacattggtactggaagaggtttatgctcgaggaagatgagcatgacgttgagaagagaactgattga

SEQ ID NO: 7829 - protein, 507 aa, Arabidopsis thaliana (mouse-ear cress)
MAVVISSNGNSKSFDAKMTVYVFICVIIAAVGGLIFGYDIGISGGVTAMDDFLKEFFPSVYERKKHAHENNYCKYDNQFLQLFTSSLYLAALVASFFASATCSKLGRRPTMQLASIFFLIGVGLAAGAVNIYMLIIGRILLGFGVGFGNQAVPLFLSEIAPARLRGGLNIVFQLMVTIGILIANIVNYFTSSIHPYGWRIALGGAGIPALILLFGSLLICETPTSLIERNKTKEGKETLKKIRGVEDVDEEYESIVHACDIARQVKDPYTKLMKPASRPPFVIGMLLQFFQQFTGINAIMFYAPVLFQTVGFGNDAALLSAVVTGTINVLSTFVGIFLVDKTGRRFLLLQSSVHMLICQLVIGIILAKDLDVTGTLARPQALVVVIFVCVYVMGFAWSWGPLGWLIPSETFPLETRTEGFALAVSCNMFFTFVIAQAFLSMLCAMKSGIFFFFSGWIVVMGLFALFFVPETKGVSIDDMRDSVWKLHWYWKRFMLEEDEHDVEKRTD

SEQ ID NO: 7830 - DNA, 1868 bp, Arabidopsis thaliana (mouse-ear cress)
  CDS (73)..(1653)
aacttaagtgtttctgtttaactccttgagagaaaataacttttaaactttagcttctaagagatattcaggatgaccggaggaggatttgcgacttcggcgaacggagtagagtttgaggcaaagataactccaatagtcatcatatcttgcatcatggctgctaccggcggcctcatgtttggttacgacgtcggtgtctccggcggagtgacatcgatgccggactttctcgaaaagttttttcccgtggtttatcggaaagtagtagctggcgccgacaaagacagcaactactgcaaatacgacaaccaaggactacaacttttcacatcatctttatacttagccggtctaaccgcaacgttctttgcttcatacacgacaagaacgctcggaaggaggctaactatgctcatagccggcgttttcttcatcataggtgtggctctcaacgcgggggctcaagacctagccatgcttattgcaggcaggatattgcttggttgtggagttgggttcgctaatcaagccgttccgttgttcttgtcggagattgcacctactaggatccgtggtggtcttaatattctctttcagcttaacgtcactattggtatcctcttcgccaatcttgtcaactatgggaccgccaagattaaaggaggttggggatggaggttatcgttaggtttggcgggaattcccgcgcttcttctaacggtcggagctttattggtgacagagacaccaaacagtttagtcgaaagaggtcgtctcgatgaaggtaaagctgttcttcgtcgtattcgagggaccgataatgttgaaccagagttcgctgatctccttgaagctagtcgacttgctaaagaagttaaacacccttttagaaaccttcttcaacgtagaaaccgtcctcagctcgtcatcgccgtcgctttacagattttccagcaatgtactggaatcaacgcgattatgttctacgcgcctgttctgttcagcacattagggtttggtagtgacgcttcactttactcagcagtggtgaccggagcagtcaacgtcctctcaactttagtctcaatctactccgttgacaaagtcggtcgccgagttcttctcctagaagctggtgtccaaatgttcttctctcaagtcgtaatcgccattatccttggcgtcaaagtaacagacacttctacaaatctctccaaaggtttcgcaattctagtcgtggtaatgatctgcacatacgtcgctgctttcgcctggtcttggggaccgctcgggtggttaatccctagtgagacattccctctagagacacgttccgcgggacaaagtgtaacggtctgcgttaacttgctcttcacgttcattatcgctcaagctttcctctctatgctttgccatttcaagtttgggatattcatcttcttttctgcatgggttttgattatgtctgtctttgtgatgttcctacttccggagactaagaatattcctatcgaggagatgactgagagagtttggaagaagcattggttctgggctaggttcatggatgatcataatgatcacgagttcgtgaatggtgagaagagtaatggtaaatctaatggctttgatccttcaacacggctttaaagtggtttaagagtccctaaccaaagtagaagcagaagagagtgaacaagaggtggtaaacacaccaaagtagagaagggaaatacagttttcaattctatacagtgtactaaatttcgttactttaagtttgaactgcgtttgtgaataagtgaagttttttttttttgctttgttgtggttcttaatgtcatccctgagttccaattttctac

SEQ ID NO: 7831 - protein, 526 aa, Arabidopsis thaliana (mouse-ear cress)
MTGGGFATSANGVEFEAKITPIVIISCIMAATGGLMFGYDVGVSGGVTSMPDFLEKFFPVVYRKVVAGADKDSNYCKYDNQGLQLFTSSLYLAGLTATFFASYTTRTLGRRLTMLIAGVFFIIGVALNAGAQDLAMLIAGRILLGCGVGFANQAVPLFLSEIAPTRIRGGLNILFQLNVTIGILFANLVNYGTAKIKGGWGWRLSLGLAGIPALLLTVGALLVTETPNSLVERGRLDEGKAVLRRIRGTDNVEPEFADLLEASRLAKEVKHPFRNLLQRRNRPQLVIAVALQIFQQCTGINAIMFYAPVLFSTLGFGSDASLYSAVVTGAVNVLSTLVSIYSVDKVGRRVLLLEAGVQMFFSQVVIAIILGVKVTDTSTNLSKGFAILVVVMICTYVAAFAWSWGPLGWLIPSETFPLETRSAGQSVTVCVNLLFTFIIAQAFLSMLCHFKFGIFIFFSAWVLIMSVFVMFLLPETKNIPIEEMTERVWKKHWFWARFMDDHNDHEFVNGEKSNGKSNGFDPSTRL

SEQ ID NO: 7832 - DNA, 1527 bp, Arabidopsis thaliana (mouse-ear cress)
  CDS (1)..(1527)
atgccttcagtcggaattgtcatcggagatggcaaaaaagaatatcctggtaaactcactctttacgtcaccgtgacatgtattgtcgccgccatgggtggtctcatcttcggttacgacatcggtatctccggtggagtgacgacaatggattcgtttcagcaaaagttcttcccgtcggtttacgagaaacagaagaaggatcatgattcaaaccaatactgcagatttgacagcgtttctctcactctcttcacttcctctctttacctcgccgcactctgctcctccctcgttgcctcttacgttacccgtcagtttggccggaaaatttcgatgcttctcggtggagttctcttctgcgccggagctcttcttaacggtttcgcaactgccgtttggatgctcatcgttggtcgtttgttactcggtttcggtatcggcttcaccaatcagtctgtgccgttgtatctctcggagatggcaccgtataaatacagaggagcattgaacatcggattccagctctcaatcaccattggtatccttgtcgccaacgttttgaacttcttcttctccaaaatcagttggggttggagactcagtctcggcggcgccgtcgttccggcactcatcatcaccgtcggttctcttatcctcccggacacaccaaactccatgatcgagagaggtcaatttaggctagcggaagcgaaactccgtaagattcgtggcgtcgacgacattgatgacgagatcaacgatttgatcatcgccagtgaagcttcgaagctcgttgagcatccatggaggaatctgttgcagaggaagtatagaccacatctaacgatggcgattctgattccggcatttcagcagcttaccggaatcaatgttataatgttctacgcgccggttctgtttcaaacgattggatttggtagcgacgcggctctgatttcggcggttgtgaccggtttggttaacgttggagccaccgtggtgtcaatctatggcgttgataaatggggaagacgatttctattccttgaaggaggattccaaatgctaatttctcaggtagctgttgcggcggcgatcggagctaagttcggtgtcgatggaaccccaggcgttttaccaaaatggtacgccattgttgtggttttgttcatatgcatctacgtggcggcgtttgcttggtcgtggggtccactaggatggttagtgccatcggagatttttccgttggaaatccgatcagcggctcagagcataacggtgtcggtgaacatgatcttcacgttcttgattgcacaagtgtttttgatgatgctttgccacttgaagttcgggttgttcatattcttcgcgtttttcgtggtggtgatgtcgattttcgtctatcttttcttaccggagacaagaggagtgccgatcgaggagatgaatcgggtctggagatcacattggtattggtcgaagttcgttgacgccgagaagaatctaacgaaagttgttatctag

SEQ ID NO: 7833 - protein, 508 aa, Arabidopsis thaliana (mouse-ear cress)
MPSVGIVIGDGKKEYPGKLTLYVTVTCIVAAMGGLIFGYDIGISGGVTTMDSFQQKFFPSVYEKQKKDHDSNQYCRFDSVSLTLFTSSLYLAALCSSLVASYVTRQFGRKISMLLGGVLFCAGALLNGFATAVWMLIVGRLLLGFGIGFTNQSVPLYLSEMAPYKYRGALNIGFQLSITIGILVANVLNFFFSKISWGWRLSLGGAVVPALIITVGSLILPDTPNSMIERGQFRLAEAKLRKIRGVDDIDDEINDLIIASEASKLVEHPWRNLLQRKYRPHLTMAILIPAFQQLTGINVIMFYAPVLFQTIGFGSDAALISAVVTGLVNVGATVVSIYGVDKWGRRFLFLEGGFQMLISQVAVAAAIGAKFGVDGTPGVLPKWYAIVVVLFICIYVAAFAWSWGPLGWLVPSEIFPLEIRSAAQSITVSVNMIFTFLIAQVFLMMLCHLKFGLFIFFAFFVVVMSIFVYLFLPETRGVPIEEMNRVWRSHWYWSKFVDAEKNLTKVVI

SEQ ID NO: 7834 - DNA, 2118 bp, Lycopersicon esculentum (tomato)
  CDS (93)..(1664)
aattcggcacgagttttcttatataaaaaacatatcatcttcttattgttattttaactaccacatttgaagccggaaaacttagtaacacgatggccggtggaggatttacgacctccggtaacggagcacgcatttcgaggctaaaatcacaccaattggttatcatatcttgtattatggctgctaccggaggtctcatgtttggttatgatgttggagtttctggtggtgttacatcaatggatccatttttaaaaaaattctttccaacagtttataagagaacaaaggagccaggattagacagtaattactgtaaatacgataatcaagggttacaattatttacttcatcgttatacctagctggtttaacggcgacgttttttgcttcttacactacaagaaaacttggccggagattaactatgttaatcgccggttgttttttcattattggagttgtactaaatgctgctgctcaagatttagctatgcttattattggaagaattctccttggttgtggcgttggtttcgccaatcaggctgttccattatttttatcagaaatagcacctacaagaattcgtggaggacttaacattttgttccaacttaacgtaactattggtattctttttgccaatctcgtcaactacggaacagccaagattagtggaggatggggatggagattatcattagggttagctggatttccagcagtattgttgactttgggcgcattatttgttgttgaaaccccaaacagtttgattgaaagaggttacttagaagaaggcaaagaagtacttcgaaaaatcagaggtaccgacaacattgaacctgaattcttggaacttgttgaggctagtcgtgttgctaaacaagtcaaacaccctttcagaaatttactccaacgtaaaaatagacctcaattaatcatctctgttgccctccagatattccaacaatttacaggaatcaacgctattatgttctacgcacctgttttattttcaacactagggtttggaaacagcgcagctctttactcagctgtcatcaccggagcagtcaacgttctctccaccgttgtctcagtctactccgttgacaagctcggacgacgagtcctcctcctggaagctggggtccaaatgttactatctcaaataataatcgctataatcctaggtatcaaagttactgatcattcagacaaccttagccatggttggggaatcttcgtagtagttctgatctgtacatatgtatcggctttcgcatggtcatggggcccacttggatggttaattcctagcgagacgttccctttggaaactcgttcagctggtcaaagtgtaacagtgtgtgttaacttgcttttcacgtttgttatggcacaagcatttctctcaatgctttgtcatttcaagtatgggatattcttgttcttctcggggtggatttttgtgatgtcgttgttcgttttcttcttggtgcctgagacgaagaatgttcctattgaggagatgacggagagggtgtggaagcaacattggctgtggaagaggtttatggtgaatgaagatgatgttgatatgattaaaaagaatggacatgctaacggatatgatcccacttctcggttgtaaaataaaaaataaaagaatattagcggtgttttacgttgattttatcatagtaaagatgcgtagaaataaatcaaacatgcaagagagagatcagagtctactgtctagtctagtgatatcgataagtgtttctcacaaaataggtgtgcatttggattttttttactgcttgttttcctcctttatatcgttcaatgtagtagaaattgtttagccaaagtgtaagagatgcaatatggtgataatttatgtaaccatatagcctatgtatattagagatttggtataattcattttgggaaagcactttgatatgtttaatttcttgttatgtatgtatgacaaggtgtctagttataatgataaggcccaatagaggtttgcatgttgagtattgagacacaaaaatgaaaaaaaattacgctcaatgatcttgaaaaaaaaaaaaaaaaaa

SEQ ID NO: 7835 - protein, 523 aa, Lycopersicon esculentum (tomato)
MAGGGFTTSGNGARISRLKSHQLVIISCIMAATGGLMFGYDVGVSGGVTSMDPFLKKFFPTVYKRTKEPGLDSNYCKYDNQGLQLFTSSLYLAGLTATFFASYTTRKLGRRLTMLIAGCFFIIGVVLNAAAQDLAMLIIGRILLGCGVGFANQAVPLFLSEIAPTRIRGGLNILFQLNVTIGILFANLVNYGTAKISGGWGWRLSLGLAGFPAVLLTLGALFVVETPNSLIERGYLEEGKEVLRKIRGTDNIEPEFLELVEASRVAKQVKHPFRNLLQRKNRPQLIISVALQIFQQFTGINAIMFYAPVLFSTLGFGNSAALYSAVITGAVNVLSTVVSVYSVDKLGRRVLLLEAGVQMLLSQIIIAIILGIKVTDHSDNLSHGWGIFVVVLICTYVSAFAWSWGPLGWLIPSETFPLETRSAGQSVTVCVNLLFTFVMAQAFLSMLCHFKYGIFLFFSGWIFVMSLFVFFLVPETKNVPIEEMTERVWKQHWLWKRFMVNEDDVDMIKKNGHANGYDPTSRL

SEQ ID NO: 7836 - DNA, 1779 bp, Ricinus communis (castor bean)
  CDS (86)..(1657)
ctctgtttaagcttcttgttctatttctgtttctctgcaaggaagtgtacgtagcatataactaagagccaaaaaagaaaaaaaaatgcctgcagtaggaggtataccgccctctggtggcaacaggaaagtgtacccgggaaaccttactctttatgttactgtaacatgtgtcgttgcagccatgggtggcttgatctttggttacgatattgggatttctggtggagttacgtccatggattcattcttgaagaagttctttccttcagtttaccggaagaagaaagcggatgaatcgtcaaaccagtactgtcaatatgatagtcagacactgactatgttcacatcttcactgtacttggctgctttaattgcttctcttgtagcatctactattacgagaaaatttggtaggaaactctctatgctttttggcggtgtactcttttgtgctggagctatcatcaatggtgcggctaaagcagtctggatgttgattcttggtagaattttgcttggttttggtattgggtttgccaatcagtctgtgccgctctacctctctgagatggctccatacaaatacagaggagcactgaacattggtttccagttatcaattacaattggtatccttgtagccaatgtattgaattacttctttgccaagattaagggtggttggggttggaggctgagtcttggtggtgctatggtccctgccctcatcattacagttggatcattagtccttccagatacaccaaactccatgattgaacggggccagcacgaagaagccagagcacatctaaagagagttcgcggtgtagaagatgttgatgaggagtttactgaccttgttcatgctagtgaagattcaaagaaagttgaacatccttggaggaatttgttacagaggaaatacaggcctcatctctcaatggccattgcaattccgttctttcagcaactcaccggcattaatgtgatcatgttctatgctcctgttttgttcgatactattggattcggtagtgatgctgcactcatgtctgctgtgatcactggtcttgttaatgtttttgcaacaatggtctcaatttatggtgttgataagtggggaaggaggttccttttccttgagggtggagttcaaatgttgatttgccaggcaattgttgcagcctgcattggtgctaagtttggagtagatggagctcccggtgacttgccacaatggtatgcagtcgttgtggtgcttttcatttgcatttacgtatctggattcgcctggtcttggggtcccctgggatggctggtgccaagtgaaatcttcccactggaaattcggtctgctgcacaaagtgtgaatgtttctgtcaacatgttctttacatttgtagtagctcaagtattcctgataatgctttgtcatttgaagtttgggctattcatcttcttttcattctttgtgttgataatgtccatcttcgtgtactacttcttgcctgagacaaaaggcatcccaattgaagagatgggccaagtatggaagcaacactggtactggtcaagatatgttgtggatgaagattatcctaatggagggcttgaaatgggcaaggaaggccgaattccaaagaatgtgtaactaagcttggtggatttattttagcttatattttgaacccttttcccttttcttcttaccttttgggattagcagcagtacatactaatgatttcaatatcaaaaattatgtggaaattttt

SEQ ID NO: 7837 - protein, 523 aa, Ricinus communis (castor bean)
MPAVGGIPPSGGNRKVYPGNLTLYVTVTCVVAAMGGLIFGYDIGISGGVTSMDSFLKKFFPSVYRKKKADESSNQYCQYDSQTLTMFTSSLYLAALIASLVASTITRKFGRKLSMLFGGVLFCAGAIINGAAKAVWMLILGRILLGFGIGFANQSVPLYLSEMAPYKYRGALNIGFQLSITIGILVANVLNYFFAKIKGGWGWRLSLGGAMVPALIITVGSLVLPDTPNSMIERGQHEEARAHLKRVRGVEDVDEEFTDLVHASEDSKKVEHPWRNLLQRKYRPHLSMAIAIPFFQQLTGINVIMFYAPVLFDTIGFGSDAALMSAVITGLVNVFATMVSIYGVDKWGRRFLFLEGGVQMLICQAIVAACIGAKFGVDGAPGDLPQWYAVVVVLFICIYVSGFAWSWGPLGWLVPSEIFPLEIRSAAQSVNVSVNMFFTFVVAQVFLIMLCHLKFGLFIFFSFFVLIMSIFVYYFLPETKGIPIEEMGQVWKQHWYWSRYVVDEDYPNGGLEMGKEGRIPKNV

SEQ ID NO: 7838 - DNA, 1966 bp, Ricinus communis (castor bean)
  misc_feature (412)..(413): n is a, c, g, or t
  misc_feature (427)..(428): n is a, c, g, or t
  CDS (63)..(1595)
tctggttctccctcttacaagacactggtgtgagtgagcttgcaatcggaaggttcagaaatatggctgcaggattggccattacaagtgaagggggtcagtacaatggcaggatgacctcctttgttgctctatcttgcatgatggctgccatgggaggagtcatttttggctatgatattggagtttcaggtggtgtgacatcaatggatcccttcttgaagaaattctttccggatgtgtacaggaaaatgaaagaagacacagaaattagcaactactgcaagtttgatagtcaacttttaacctccttcacatcctcactatatgttgctggccttgttgcttccttcttcgcctcgtcggtcactagagcttttgggcgcaagccatcaattcttttaggcggtgnngttttccttgccgnngcagcccttggtggtgctgcagttaatgtgtatatgttgatatttggccgcgtcttgcttggagttggtgtcggttttgcaaaccaggcagttccactttatctgtctgaaatggcaccgccaagatatagaggggcaatcaacaacggcttccaatttagtgttggtattggggcattgtctgccaaccttataaactatggaactgaaaagattgaaggtggctggggttggcgaatttccctagcaatggcagcagttccagctgcaatcctgacatttggtgcacttttcctcccagagacacccaatagcctgattcagcgcagcaatgatcatgagagagccaaacttatgttacaacgtgtgcgaggtaccactgatgtccaagcagaacttgacgatctcatcaaagctagcataatctcaagaactattcagcacccatttaagaatataatgcgaagaaagtatcggcctcaactagtaatggcagtagccataccatttttccagcaagtaacagggatcaatgtcattgcattttatgctccaatacttttcaggacaatcggcctggaagaaagtgcatccctcttatcttctattgtgacagggcttgtgggtagtgcgtcaacgttcatatcgatgcttatagtcgataaacttggaagaagagcattgtttatatttgggggtgtacagatgtttgtagcacagataatggttgggagtattatggcagctgagctaggcgatcatggtggtataggtaaagggtatgcttatatagttctgattttgatctgtatttacgtggctggattcgggtggtcatggggtcctcttggatggttggttcctagtgagatattcccattagagattcgatcagcagggcaaagtattgtggtggcagtgagctttttattcactttcgttgttgcacaaacttttctatctatgctttgccacttcaaatctggaattttcttcttttttggaggatgggttgtagtgatgactgcctttgtgcactttttgctgccagagacgaagaaggtgccaattgagaaaatggatatagtgtggagggaccactggttttggaagaaaattataggggaagaagctgctgaggaaaataataaaatggaagcagcatgaaatacaatcaattagtcaaattttattgctctacaaattcattttacaactgaagtaaagaatgacagattttacttatattcccactcactttccctgcgtttgatcaaggaaatgatgaaaggtcgttagcccttgttaggctcagtactaaaactaggtgaagagagtgttatacttgaatgtaatttcgatcattaacataatcaaactaaatgaagctgagttaaaatgaaatttgagcatgtgaaacagtaggtcaagctttccctatctctactaggatgtagaacaaagtcctatcgagaagaagaaaaaagaaattatctattgtaccagctggtttttttttttaaatttaattctttagc

SEQ ID NO: 7839 - protein, 510 aa, Ricinus communis (castor bean)
  misc_feature (117)..(117): Xaa can be any naturally occuring amino acid
  misc_feature (122)..(122): Xaa can be any naturally occuring amino acid
MAAGLAITSEGGQYNGRMTSFVALSCMMAAMGGVIFGYDIGVSGGVTSMDPFLKKFFPDVYRKMKEDTEISNYCKFDSQLLTSFTSSLYVAGLVASFFASSVTRAFGRKPSILLGGXVFLAXAALGGAAVNVYMLIFGRVLLGVGVGFANQAVPLYLSEMAPPRYRGAINNGFQFSVGIGALSANLINYGTEKIEGGWGWRISLAMAAVPAAILTFGALFLPETPNSLIQRSNDHERAKLMLQRVRGTTDVQAELDDLIKASIISRTIQHPFKNIMRRKYRPQLVMAVAIPFFQQVTGINVIAFYAPILFRTIGLEESASLLSSIVTGLVGSASTFISMLIVDKLGRRALFIFGGVQMFVAQIMVGSIMAAELGDHGGIGKGYAYIVLILICIYVAGFGWSWGPLGWLVPSEIFPLEIRSAGQSIVVAVSFLFTFVVAQTFLSMLCHFKSGIFFFFGGWVVVMTAFVHFLLPETKKVPIEKMDIVWRDHWFWKKIIGEEAAEENNKMEAA

SEQ ID NO: 7840 - DNA, 1861 bp, Ricinus communis (castor bean)
  CDS (102)..(1670)
tttagccctcaagacttgaggaatttgtacgtatttctattttgctctgctttttggttgagttttctgaggaacagaagggaacagcaggagctttaaagatggcaggagggtccttggcaccggccggtgtggccaaggaaagagcagaacaatatcaagggaaggtcacctttgctgtgttcgttgcctgtatggttgctgctgttggagggtcgatttttggatacgatattggaatctcaggaggagtgatctcaatggatgcatttcttgaaaaatttttccgtagtgtatatttaaagaagaagcatgcacatgaaaacaactactgcaaatacgacgaccaaaggctggcagcttttacctcttctctctaccttgctggattggctgcatctctagtggcaggtcctattactagaatatatggtcgccgtgcaagtataatttctggaggcattagctttcttattggtgcagccttgaatgccacagctattaatctggcaatgctcctcctaggacggatcatgctaggtgttggcataggatttgggaatcaggctgttccactatatttatcagagatggcgcctactcatcttcgaggaggactgaacattatgtttcagttagcaacaaccagtggaatctttacagcaaatatggtaaattatggtactcataagcttgaatcatggggatggagactctcactgggactagcagcagccccagctctcctaatgacaataggaggattacttctgcccgagacaccaaacagtttaattgaacaaggattgcatgagaaagggagaaatgtcctggagaaaatcagaggaaccaagcatgtagatgcagaatttcaggacatgctagatgcgagtgaattggctaactcaatcaagcatcccttcagaaacattcttgagaaaaggaacagaccgcaattggttatggcaattttcatgccaacgttccagattcttacaggcattaatattatcctcttctatgctcccccactgtttcaaagcatgggatttggaggaaatgccgcactctactcctcagctgtgactggagcagttctttgttcctctaccttcatttccatagcaacagttgacagactaggtagaagatttttacttatcagtggaggaatacaaatgataacatgccaggtaatagtggctataatcttgggagtaaaatttggggacaaccagcaactgtctaaaagcttctcagtgttggtggtaattatgatttgcctctttgttttagcttttggatggtcatggggtccattaggctggacagtaccaagtgagatatttccactcgaaacgcgatcagctggacagagcattacagtagctgtaaaccttttcttcactttcgtcatagcacagtctttcccttcacttctttgtgcattcaagtttgggatattcctcttctttgctggttgggttactgtcatgaccgccttcgtttacatcttcctgcctgaaaccaaaggagttcccattgaagagatgatattcctatggagaaagcactggttctggaagaaaatagtgccaggacaaccagaagttgatgatagtagggaaagcatggaaatgggtgaagctgttgcaagcagaattaagtagccccccttccataagaatttctcacctcaagaagaatttcccattcacagagatgcttttctttcatgccagaaatcagaaatgacttggccagatagccaattgattatgcaaatattttcctgtatgtgaaagggcaaaaccttttatgcaatgatgccctcagcatcctgtctagctttccagactcg

SEQ ID NO: 7841 - protein, 522 aa, Ricinus communis (castor bean)
MAGGSLAPAGVAKERAEQYQGKVTFAVFVACMVAAVGGSIFGYDIGISGGVISMDAFLEKFFRSVYLKKKHAHENNYCKYDDQRLAAFTSSLYLAGLAASLVAGPITRIYGRRASIISGGISFLIGAALNATAINLAMLLLGRIMLGVGIGFGNQAVPLYLSEMAPTHLRGGLNIMFQLATTSGIFTANMVNYGTHKLESWGWRLSLGLAAAPALLMTIGGLLLPETPNSLIEQGLHEKGRNVLEKIRGTKHVDAEFQDMLDASELANSIKHPFRNILEKRNRPQLVMAIFMPTFQILTGINIILFYAPPLFQSMGFGGNAALYSSAVTGAVLCSSTFISIATVDRLGRRFLLISGGIQMITCQVIVAIILGVKFGDNQQLSKSFSVLVVIMICLFVLAFGWSWGPLGWTVPSEIFPLETRSAGQSITVAVNLFFTFVIAQSFPSLLCAFKFGIFLFFAGWVTVMTAFVYIFLPETKGVPIEEMIFLWRKHWFWKKIVPGQPEVDDSRESMEMGEAVASRIK

SEQ ID NO: 7842 - DNA, 1672 bp, Vicia faba (fava bean)
  CDS (18)..(1568)
cttcatcggagaaaaaaatgcctgcagccggaatccccatcggagcggggaacaaggagtaccccggaaacttaactcctttcgtcaccataacatgtgttgttgcagccatgggtggtttgatctttggttacgatataggaatttcaggtggtgttacttcaatgaatccgtttcttgagaaattttttccggcggtgtaccggaagaaaaacgcgcaacattcgaagaatcagtactgtcaatacgacagtgagacactgaccttgttcacatcctcgttgtacctggccgcgcttttgtcgtcggtggttgcttcaacgatcactagaaggtttggtcggaaactctccatgcttttcggaggcttgctttttctggtcggtgctctcattaatggccttgctcaaaacgttgcgatgttgatcgtcggtcggatcttgctcggattcggtatcgggtttgcgaatcagtctgtgccattatacttgtctgagatggctccatacaagtacagaggagcgttgaatattggatttcaattgtcaattacaattggaatacttgtggccaatattttgaactacttttttgccaaaatcaaaggtggatggggatggagattgagtttaggtggtgctatggtccctgcacttataataaccattggttcgctaatcctacccgacacgccaaattccatgatcgagcgtggggatcgagatggtgccaaggcacagcttaagagaattcgcggagttgaagatgttgatgaagagtttaatgatcttgtggctgctagtgaaacgtcgatgcaggttgaaaatccttggaggaatttgttgcagagaaaatatagacctcagcttactatggctgtgttgattccgttcttccaacagtttactggaattaacgttattatgttttacgcgcctgtgttgtttaactcgattgggtttaaggatgatgcttcacttatgtcagctgttatcaccggtgttgttaacgttgttgctacttgtgtctcaatttatggagttgataagtgggggagaagagctctttttctcgaaggtggtgttcaaatgcttatttgtcaggttgcagttgcagtttcaattgcggccaagtttggaacaagtggagaacctggtgatttaccaaagtggtatgctatagtagttgtgcttttcatatgcatttacgttgctggatttgcttggtcatggggtcctcttggttggttggtgcctagtgagatttttccattggagatccgttctgctgcgcagagtgtcaacgtgtcggtcaacatgctcttcaccttcttagttgcacagattttcttgaccatgctttgtcacatgaagtttggattgttcctcttctttgccttctttgtggtggtgatgacaatttatatatacactatgctgcctgaaactaagggaataccaattgaagagatggatagagtatggaaatcacacccatattggtctagatttgttgaacatgatgacaatggtgttgagatggccaagggaggtgttaaaaatgtataatttatcagtcttgcttttatttttatttttgttactaattagttttatttttattttgcttgtgaagcttggtattgaattgtccttaaaaaaaaaaaaaaaaa

SEQ ID NO: 7843 - protein, 516 aa, Vicia faba (fava bean)
MPAAGIPIGAGNKEYPGNLTPFVTITCVVAAMGGLIFGYDIGISGGVTSMNPFLEKFFPAVYRKKNAQHSKNQYCQYDSETLTLFTSSLYLAALLSSVVASTITRRFGRKLSMLFGGLLFLVGALINGLAQNVAMLIVGRILLGFGIGFANQSVPLYLSEMAPYKYRGALNIGFQLSITIGILVANILNYFFAKIKGGWGWRLSLGGAMVPALIITIGSLILPDTPNSMIERGDRDGAKAQLKRIRGVEDVDEEFNDLVAASETSMQVENPWRNLLQRKYRPQLTMAVLIPFFQQFTGINVIMFYAPVLFNSIGFKDDASLMSAVITGVVNVVATCVSIYGVDKWGRRALFLEGGVQMLICQVAVAVSIAAKFGTSGEPGDLPKWYAIVVVLFICIYVAGFAWSWGPLGWLVPSEIFPLEIRSAAQSVNVSVNMLFTFLVAQIFLTMLCHMKFGLFLFFAFFVVVMTIYIYTMLPETKGIPIEEMDRVWKSHPYWSRFVEHDDNGVEMAKGGVKNV

SEQ ID NO: 7844 - DNA, 2020 bp, Beta vulgaris (beet); identical to SEQ ID NO: 229
  CDS (190)..(1662)

SEQ ID NO: 7845 - protein, 490 aa, Beta vulgaris (beet); identical to SEQ ID NO: 230

SEQ ID NO: 7846 - DNA, 1925 bp, Beta vulgaris (beet)
  CDS (40)..(1689)
ctctttttctctctcttattggtgagaaataagtgagccatgagtgaaggaactaataaagccatgtcagacccaccaccaacaactgcaagcaaagtaatagcagattttgatcctttaaagaagcctcctaagagaaacaagtttgcttttgcttgtgctactttggcttctatgacttctgttttacttggttatgacattggagtaatgagtggtgcaataatctacctcaaagaagactggcacattagtgacacacaaataggagttctagtcggaatcttaaacatctactgcctcttcggctctttcgcagctggtagaacatccgattggatcggacgacgttacactatcgtgttagctggtgcaatcttcttcgttggcgcactactcatgggtttcgccacaaactacgcatttcttatggtaggccgttttgtaacaggaataggtgttggttatgcacttatgatcgcacctgtttacactgcagaggtttctcctgcttcttcaagaggatttcttacctcttttcctgaggttttcatcaatgcaggaattttgcttggatatatatctaatctcgcattttcaagcctcccaactcatttgagctggaggtttatgctcggaatcggggcgattccgagcatatttttggctattggagtgcttgctatgcctgagtcaccgaggtggcttgttatgcagggaaggcttggagatgctaagaaggtgcttaatcgaatatctgactcgcctgaggaggctcaacttaggctcagtgagattaagcagacagcaggaatcccagctgagtgtgatgaagacatatataaggttgaaaaaacaaagataaaatcagggaatgcagtttggaaagagctcttcttcaaccctactcccgcagtgaggcgtgcagtgattgcaggtatcggaattcactttttccagcaagcttccggcatcgacgccgtggttttatacagtccaaggatctttcagagtgctggaatcacaaatgcacgtaaacagttacttgcaacagtagctgtaggagttgttaagacacttttcatattagttgctacatttcaattagacaagtatggtagaaggcctttactattaacaagtgttggtggtatgatcatagccatcttaaccttagccatgtctttaactgttattgatcactctcatcacaagattacatgggctatagccttgtgtataaccatggtttgtgctgtcgttgcgtcgttttcgattggtttaggaccaattacatgggtatatagttcagaggttttccccttgaggttaagggctcaaggtactagcatgggtgtggctgttaatagagttgtaagtggtgttatttcaatatttttcttgcctttgtcacataagattacaacaggtggtgccttctttttgttcggagggattgctattattgcttggttcttcttcttgacgtttcttcctgagactagagggcgtacacttgagaatatgcatgagttgtttgaagattttagatggagggagtcatttccaggcaacaagtcaaataatgatgagaatagtacaagaaaacaaagcaatggtaatgacaagagtcaagtacaattgggagaaactactactagtactactgttacaaatgacaatcactgagaaacaattgttagtgtacaagtatagttatgtacggatgttatgtcatgtatagctgttcgacttttaatgataattaatcttaagtcgaacaagcttctaagatgtgtgtgtataacatggcgtgatgtacgcgcttgttatacacatgttgttcttagaatgtgatcctctttattttcgcaaatacattgtagcaaattaaagtaatctaattataggataccaaatggaaa

SEQ ID NO: 7847 - protein, 549 aa, Beta vulgaris (beet)
MSEGTNKAMSDPPPTTASKVIADFDPLKKPPKRNKFAFACATLASMTSVLLGYDIGVMSGAIIYLKEDWHISDTQIGVLVGILNIYCLFGSFAAGRTSDWIGRRYTIVLAGAIFFVGALLMGFATNYAFLMVGRFVTGIGVGYALMIAPVYTAEVSPASSRGFLTSFPEVFINAGILLGYISNLAFSSLPTHLSWRFMLGIGAIPSIFLAIGVLAMPESPRWLVMQGRLGDAKKVLNRISDSPEEAQLRLSEIKQTAGIPAECDEDIYKVEKTKIKSGNAVWKELFFNPTPAVRRAVIAGIGIHFFQQASGIDAVVLYSPRIFQSAGITNARKQLLATVAVGVVKTLFILVATFQLDKYGRRPLLLTSVGGMIIAILTLAMSLTVIDHSHHKITWAIALCITMVCAVVASFSIGLGPITWVYSSEVFPLRLRAQGTSMGVAVNRVVSGVISIFFLPLSHKITTGGAFFLFGGIAIIAWFFFLTFLPETRGRTLENMHELFEDFRWRESFPGNKSNNDENSTRKQSNGNDKSQVQLGETTTSTTVTNDNH

SEQ ID NO: 7848 - DNA, 1820 bp, Picea abies (Norway spruce)
  CDS (33)..(1574)
ggacagagcagcggagattgaaataaggtaaaatggcggggggcatggcggtcagcaggccgaagcaaggcagggctgagctctatgaagggcatattactgcatatgtgatattagcatgcatagttgctgctacaggaggttcgcttttcggctatgatcttggagtttcaggaggagtaacatccatggacgatttcctcaaaaagttttttcgacatgtttatgaacgaaagcagcatcacctccgtgaaacagactactgcaaatacgacaaccagctgctcactctgttcacttcgtcgctttatctttctggcctggttgccacattcggggcctcgtatataacgagaagcaagggacgaagagtaagcattataatcggaggcctcagtttcctcctaggggcgatcttgaacgctgccgcgaaaaatctcggcatgcttatagtcggccgtattcttctcggcgccggcgttggattcagcaaccagtcggtgccgctgtatctctcagaaatggcaccggccaaggtacggggtgggacgaacaatttgttccagctcaagacttgtctcggcatcttcgtcacaaatgtcataaattacttcacaaacaaacttcatccatggggctggcgtttatctttaggcctggccgtcattcccgcccttctgatgtccatcggcggctattttctgccggaaacaccgaacagcctggtggagcaggggcggctacaggaaggccgccagattcttgaaaagatccgaggcacgaagaacgtgcaagctgaattcgatgacctggttgaggccagcgatgttgcgcgggccgtgaagcatcctttccggaatcttctgcagaggagaaacaggccgcagctggtcatggggacgtgcattccagcgttccaacaattgacggggaacaactcgtttctgttctatgcgccggtgatcttccagagcctgggaatggggaacgacgcctcgctctactccgcgatcatgacaggcgcagtcataacgttcggcgctctcgtctcaatgttcacagtcgacagggtcggacggagatttctcttcatggagggtggaacgcaaatgatcgtctgccacgttattattagcatattgcttaaatcaaacttcgggaaaggtgagaaaattccgacgggctacggcgttggaatcgtgctcttgatatgtattttttacttgcttgcgtatgggtggctgtgggggccactctcatggctggtgtgcagcgagattttcccgatggaaagcctggtggtctgcgtcaacctgttcttcaccgcggtaatcgcccagtcgttcctggcacttctctgtcatttgaagtacgggatattcctgctgttcgggggtttggtcttcatcatgagcgtcgtcatttactttttcctgccagagacaaagaacgttcccatcgaagagatgaggtttcaatgggccaagcattggtactggaagagattcatggacgaatacatggacaatgatgacgaaaatgaaaaaggaaacatgacaaaagcagcggcgtagaagaaaaacacaaaatctgtgtgccaggcttgacgctgacctcaatcgggactacgggctgttattttatagatgtaaatgaagggaattttgagcaggacataattcccattccttttttattatgaattttttaatcaatgaatactgggcttctgctctggtttgtttgtgtgaatggctgtaaaaattatttgggaagtttgttagttgagcatgcttcttcgccaaaaaaaaaaaaaaaaa

SEQ ID NO: 7849 - protein, 513 aa, Picea abies (Norway spruce)
MAGGMAVSRPKQGRAELYEGHITAYVILACIVAATGGSLFGYDLGVSGGVTSMDDFLKKFFRHVYERKQHHLRETDYCKYDNQLLTLFTSSLYLSGLVATFGASYITRSKGRRVSIIIGGLSFLLGAILNAAAKNLGMLIVGRILLGAGVGFSNQSVPLYLSEMAPAKVRGGTNNLFQLKTCLGIFVTNVINYFTNKLHPWGWRLSLGLAVIPALLMSIGGYFLPETPNSLVEQGRLQEGRQILEKIRGTKNVQAEFDDLVEASDVARAVKHPFRNLLQRRNRPQLVMGTCIPAFQQLTGNNSFLFYAPVIFQSLGMGNDASLYSAIMTGAVITFGALVSMFTVDRVGRRFLFMEGGTQMIVCHVIISILLKSNFGKGEKIPTGYGVGIVLLICIFYLLAYGWLWGPLSWLVCSEIFPMESLVVCVNLFFTAVIAQSFLALLCHLKYGIFLLFGGLVFIMSVVIYFFLPETKNVPIEEMRFQWAKHWYWKRFMDEYMDNDDENEKGNMTKAAA

SEQ ID NO: 7850 - DNA, 1920 bp, Caenorhabditis elegans
  CDS (1)..(1920)
atggttcaagtggcgccggtggcagctggtgctggaagtggtcagacaaggccttcgtcagatcccaaaacaggatggtttgtgtacatgctcgcgttttctgcagtcataggaggatttctattcggatatgacactggaatcgtgtcagcagctatgctttatgttccaaatgcatctggaattaaacctctagactctgtttggcaggaaattatagttagtattacaccgggagtcgccgcaattggatcactatgttcgggtcctggatcggattttctcggaagaaaaaagataatcattggagcaagtgtaacttttacaattggagcaattatttgtgcagctgcatggactaaaataatccttttaattggcagaattttactcggacttgcgattggattcgcttcaatgattgttccaatctatgtatctgaagcttctccatcacatattcgtggaaaattggtgacaggatttcaactgatgattactgtaggtttggtgattgcaaatattattggaggagcttttagttatgtcgatccggatcaagttgggtggagacaaaaatcagatttttttttggaatttttgcttccaaacagtcagctgatctcaattttctctaaattccacttccaatccttcccaaacccgccgttttccagattaatgttcgccttcgcagccgtcccagccatcatccaattcgtctgcttcctgtttcttccagagtcccctcgttggctctacgagcacgggcggactgttgaagcacgtgaagtactcacaagaatctataatggacatacagaatgggttgattatgagattaatgaaattagtttctcgtatgaagaggagctacgtgccaaagcagaacacgctggaaatgggccaactattattagaattttgaaaactccgcatgtgagaaaagcaatgattattggatctcttcttcaaatgttccagcaattgtccggtattaatacggttatgtactatactggtaatattattcgaagtgccggagttaaggacaatcacacaactatttggatttccgttggaacatcagcaatcaatttcctcggaaccttcattccaatcgcattggtagaacgtgtgggtcgtcgtgtgcttctccttgtctcaatgatcggtgtgattcttttcctgatcgcaatgggtgtctcattccttctaatcaataatgactcattgagaacattcgatcaacaaaactacactttgaactacaatccatctgtgaaacatgctgcaaagtgtctcaaatatagtaattgcgatttctgtgtaactgatgagaactgcggattttgcgagagcaaggttgctaaaaaaggatactgtctaccattcccatcggatgactctagtgactactctgccactggaatttgtgaattctcgaatttgacaaacaatggaacagatttcgagtgggaagacacctattgtcacactaaattcacagtattgccaattattattatggtcttttaccttttatcattctctgcaggttacgccccgctaccatgggttctaaacgccgaattttatccattatgggcgagaagtacagccgtatcggtatcaactgcatgcaattggatatttaatttaatagtctcactgacattcctgtcactttcccaggcagcaacaaaatatggaacattcttcatttattgtggatgcaccatggttgctcttgtattcgttttcttctttgttccagaaacaaaaggatattcaattgatgaagttgagatgttattcatgacaaaagaagagagaaggaaagctcagaaagttctggatgagagtaaagaagggaagcatcggaattctgttgcaatgtcttttgatactaaattctaa

SEQ ID NO: 7851 - protein, 639 aa, Caenorhabditis elegans
MVQVAPVAAGAGSGQTRPSSDPKTGWFVYMLAFSAVIGGFLFGYDTGIVSAAMLYVPNASGIKPLDSVWQEIIVSITPGVAAIGSLCSGPGSDFLGRKKIIIGASVTFTIGAIICAAAWTKIILLIGRILLGLAIGFASMIVPIYVSEASPSHIRGKLVTGFQLMITVGLVIANIIGGAFSYVDPDQVGWRQKSDFFLEFLLPNSQLISIFSKFHFQSFPNPPFSRLMFAFAAVPAIIQFVCFLFLPESPRWLYEHGRTVEAREVLTRIYNGHTEWVDYEINEISFSYEEELRAKAEHAGNGPTIIRILKTPHVRKAMIIGSLLQMFQQLSGINTVMYYTGNIIRSAGVKDNHTTIWISVGTSAINFLGTFIPIALVERVGRRVLLLVSMIGVILFLIAMGVSFLLINNDSLRTFDQQNYTLNYNPSVKHAAKCLKYSNCDFCVTDENCGFCESKVAKKGYCLPFPSDDSSDYSATGICEFSNLTNNGTDFEWEDTYCHTKFTVLPIIIMVFYLLSFSAGYAPLPWVLNAEFYPLWARSTAVSVSTACNWIFNLIVSLTFLSLSQAATKYGTFFIYCGCTMVALVFVFFFVPETKGYSIDEVEMLFMTKEERRKAQKVLDESKEGKHRNSVAMSFDTKF

SEQ ID NO: 7852 - DNA, 1821 bp, Caenorhabditis elegans
  CDS (1)..(1821)
atggtcgctgttgccgcattttccagtagtgggcaggacaagcccgcgcatactcccaaattgggacttttcgtatatattttggctgccgcttcagtaattggcggttttctatttggatatgatacttctgtagtgtcggctgcaatgctttatatgcccgatgctccagggctcaagcctatggatactgtgtggcaggaggtgctggtcagtatttctccaggaatggctgctgtcggttcactgatgtctggtacctcctccgactatattggtcggcggaaagtgatcctcggagcttctgcaattttcacaattggagcattggtctgtgcggcttctgtgaacaaaattatgctcctagttggaagagttttgctgggaattgcaatcggatttgcttctatgattgtacccgtgtatctgggagaaaccgccccaactcacgtcagaggaatgctggtggccgcctttgccctgatgatcagtttcggtcaagtcgtcgcaaatatcacaggcggagcatttagttatattgatccatacaatgttggctggagattgatgttcgcctttgctgcagtaccttcaattatccagttcgtgtgcttcatgtttctcccggagaccccaagatggctctatgagaatggatttgagacggagacacgtgaggttctcgagaaagtgtataacggagataaagaatgggtagagtacgaaatggcggagatcattgctttcaatgaagatcaggctaaggaaaacgagaaagcccatgcctcgggcccagttatctggcggatcctgaagaccccacatgtcttgaaggcctgtttcatcggatccatgcttcaggccttccagcagcttgccggtatcaatacaatcctctactacacggcggatattattcggtcctctggaatttccaataatcacacaacgatttggatttcggtgcttctctcgctgtgcaactttatcgggcctttcgttccgatgagcttaatcgaaaaagtggggcgccgcattattttcctcttctcctgcggcttagtcgtcctgtcgttagtcttcatcggtgtggcgttcctcctggtaaaccatgactcggctgctacattgcctgcaaatcagtatggctctaactttaattcatcttatccagatgctaagggatgcatggcttatagcaactgcgactattgcgtgaccaccgatgcctgtggcttctgccacgacgccaataccaaacaggggtactgtcttccagcaggctttgataatcctgaagtgtactctagtacgggctcatgcacaaatagtaatggatccatcgccaacaacttcaaatgggaaaaatactactgtgacaccaagtacaccctcctgcctatcatcgcctgcggtgtctacctgctcaccttctcgtcgggcttcacctccctgccctgggtgctcaattcggagttctacccgatgtgggcccgatccacgtgtgtcgcaattagtaccacgtcaaattgggtgtttaacctgattattgcgctgacctacctttcattgactcaagttatcgggaaatacggagcattttggctatacgcgggcttaaccgttattgcgttcattttcatcctgtttttggtgcctgagacaaaaggatactccattgaagaggtagaaatgctatttatgaacaaaaaacaacgccgggaggcagagtccagacggcgagagacagtgacagaggtcaggagtcgaatgaacagtacggtttcttttggacaacacaatgaagtacataaatattga

SEQ ID NO: 7853 - protein, 606 aa, Caenorhabditis elegans
MVAVAAFSSSGQDKPAHTPKLGLFVYILAAASVIGGFLFGYDTSVVSAAMLYMPDAPGLKPMDTVWQEVLVSISPGMAAVGSLMSGTSSDYIGRRKVILGASAIFTIGALVCAASVNKIMLLVGRVLLGIAIGFASMIVPVYLGETAPTHVRGMLVAAFALMISFGQVVANITGGAFSYIDPYNVGWRLMFAFAAVPSIIQFVCFMFLPETPRWLYENGFETETREVLEKVYNGDKEWVEYEMAEIIAFNEDQAKENEKAHASGPVIWRILKTPHVLKACFIGSMLQAFQQLAGINTILYYTADIIRSSGISNNHTTIWISVLLSLCNFIGPFVPMSLIEKVGRRIIFLFSCGLVVLSLVFIGVAFLLVNHDSAATLPANQYGSNFNSSYPDAKGCMAYSNCDYCVTTDACGFCHDANTKQGYCLPAGFDNPEVYSSTGSCTNSNGSIANNFKWEKYYCDTKYTLLPIIACGVYLLTFSSGFTSLPWVLNSEFYPMWARSTCVAISTTSNWVFNLIIALTYLSLTQVIGKYGAFWLYAGLTVIAFIFILFLVPETKGYSIEEVEMLFMNKKQRREAESRRRETVTEVRSRMNSTVSFGQHNEVHKY

SEQ ID NO: 7854 - DNA, 1842 bp, Caenorhabditis elegans
  CDS (1)..(1842)
atggttgccgtggaattcaaagtgtctgaatcaggccggcctaggcctgagaaaaacccaaaattaggctttttcgtctacttattgggctctgccgccatcatcggtggcttcctattcgggtatgatacctctgtggtgtcggccgctatgctctacgtgccagaagctcccgggctcaagcctatgggaactgtgtggaaggaagtgattgtcagtattacaccaggtatggcagccgttggcgcctggttttcgggagccggctcggatcgctacggccgtaagccaattatcatcggctcaactctgatttttgtttgtggagccgttatttgtgccgttgcctggacaaaaatcgtaatgcttattggtagaattttcctgggcgttggtattggattcgcgtcaatggtggtgcctgtgtacctcggagaagcttcaccaacacacgtgcgcggaaccctcgtatcagcttttgcaatgatgatcagctttggacaagtcgtcgcgaacatcatgggcggtgtgttcagctactgggaaccctacaccatcggatggcggctcatgttcgcgttcgccggaattccagctctgatccaatttgtctgcttcatcttcttgccagagaccccaagatggctgtacgagaacggacacaccgagcaagccgagcaggttctggagaaaatctacggaggaaatacggaatggatcgagtacgagctggccgagattaagacttacgccgaggaacgccagaaacaaatggaggaagagaaaaaatctggcccggtaatctggagaatcctcaagacgccacacgtcctgaaggcctgcttcatcggatccatgcttcaggctttccagcagcttgccggtatcaacacaatcctctactacaccgccgacatcatcagaagtgctggaattgaaaactatcacactataatctggatttccgtgattttatcgatttgcaacctgatcggcccatttgctccgatgttcttcatcgaaaaactaggccgccgtaagcttttcctcttctcttgtgctggagtcgttgtctcgctggtgctcatcggtgtaagcttcctgctcgtcggcaacgattctgctccaaatttcgaccgctcggcttacctgctcgccggaaattatcagtcaaatggagaagccgagtcctgcctgatgctgagcaactgtgatagctgtgtaacttcggagcactgcggtttctgtgaagattcggagactagaactggcttctgcctgcctgtagatcacaatgacgtcactttatactcgtctactggcttgtgcacgaatggattggacaagagcaactcatcattccctaatgcaacctcgtatgtctggcaaaaacatcactgcaccacatcgtacacaatccttccaattgtcatgatgggtgtctacctgctcactttttcctgtggcttcacctccctgccatgggtcctcaactcggagttctatccgatgtgggcccgatcgacgtgtgtatcgattagtactttgtctaattgggttttcaacctaatcattgcactgacatatctttcactcacacacgctataacaaaatatggtgcattttggctttacgccatatttaccattattgcattcattttcatctacttcttggttcccgagactactggatattctattgacgaggttgaaatgctgttcatgaacaaacgccaacgcaacatcgccatgcaagctcgtcaagcaaaactggacgcagcatccgacaaagataaaaactcgtcaacttccctgtccactgagactataactatgtaa

SEQ ID NO: 7855 - protein, 613 aa, Caenorhabditis elegans
MVAVEFKVSESGRPRPEKNPKLGFFVYLLGSAAIIGGFLFGYDTSVVSAAMLYVPEAPGLKPMGTVWKEVIVSITPGMAAVGAWFSGAGSDRYGRKPIIIGSTLIFVCGAVICAVAWTKIVMLIGRIFLGVGIGFASMVVPVYLGEASPTHVRGTLVSAFAMMISFGQVVANIMGGVFSYWEPYTIGWRLMFAFAGIPALIQFVCFIFLPETPRWLYENGHTEQAEQVLEKIYGGNTEWIEYELAEIKTYAEERQKQMEEEKKSGPVIWRILKTPHVLKACFIGSMLQAFQQLAGINTILYYTADIIRSAGIENYHTIIWISVILSICNLIGPFAPMFFIEKLGRRKLFLFSCAGVVVSLVLIGVSFLLVGNDSAPNFDRSAYLLAGNYQSNGEAESCLMLSNCDSCVTSEHCGFCEDSETRTGFCLPVDHNDVTLYSSTGLCTNGLDKSNSSFPNATSYVWQKHHCTTSYTILPIVMMGVYLLTFSCGFTSLPWVLNSEFYPMWARSTCVSISTLSNWVFNLIIALTYLSLTHAITKYGAFWLYAIFTIIAFIFIYFLVPETTGYSIDEVEMLFMNKRQRNIAMQARQAKLDAASDKDKNSSTSLSTETITM

SEQ ID NO: 7856 - DNA, 1419 bp, Streptomyces coelicolor
  CDS (1)..(1419)
atggccagcacatcgcaggcgcccagtccaggagccgggacggctcatcccgatcatctcgggcacgtcatcttcatcgcggcggcggccgcgatgggcggtttcctgttcggttacgacagttccgtgatcaacggtgcggtcgaggcgatccgggaccgctacgacgtcggttccgcggtgctggcgcaggtcatcgccgtggctctgatcggctgtgccatcggtgccgcgaccgcgggccgtatcgcggaccgtatcggccgtatccgctgcatgcagatcgccgcggtcctgttcacggtgagcgccgtcggctccgcgctgcccttcgcgctgtgggacctggccatgtggcggatcatcggcggcttcgcgatcggcatggcctcggtgatcggccccgcctacatcgccgaggtgtccccgcccgcctaccgcggccggctcggttccttccagcaggccgcgatcgtcatcggcatcgccgtctcccagctggtcaactggggtctgctgaacgccgccggcggtgaccagcgcggcgagctgatgggcctggaggcctggcaggtcatgctcggcgtcatggtgatcccggccgtcctgtacggcctgctgtccttcgccatccccgagtccccccgcttcctgatctcggtgggcaagcgcgagcgcgccaagaagatcctcgaggaggtcgagggcaaggacgtggacttcgacgcccgcgtcaccgagatcgagcacgccatgcaccgcgaggagaagtcctccttcaaggacctcctcggcggcagcttcttcttcaagccgatcgtgtggatcggtatcggcctgtcggtcttccagcagttcgtcggcatcaacgtcgcgttctactactcctcgacgctgtggcagtcggtcggcgtcgaccccgccgactcgttcttctactcgttcacgacgtcgatcatcaacatcgtcggcaccgtgatcgcgatgatcttcgtggaccgcgtcggccgcaagccgctcgccctgatcggctccgtcggcatggtgatcgggctggcgctggaggcctgggccttctccttcgacctggtcgacgggaaactcccggccacccagggctgggtcgccctgatcgccgcccacgtcttcgtcctcttcttcgccctgtcgtggggcgtggtcgtgtgggtcttcctcggcgagatgttccccaaccggatccgcgccgccgcgctgggcgtggccgcctccgcgcagtggatcgccaactgggccatcaccgcgagcttcccgtcactggccgactggaacctctccggcacgtacgtgatctacacgatcttcgcggccctctccatccccttcgtcctgaagttcgtgaaggagaccaagggcaaggccctggaggaaatgggctga

SEQ ID NO: 7857 - protein, 472 aa, Streptomyces coelicolor
MASTSQAPSPGAGTAHPDHLGHVIFIAAAAAMGGFLFGYDSSVINGAVEAIRDRYDVGSAVLAQVIAVALIGCAIGAATAGRIADRIGRIRCMQIAAVLFTVSAVGSALPFALWDLAMWRIIGGFAIGMASVIGPAYIAEVSPPAYRGRLGSFQQAAIVIGIAVSQLVNWGLLNAAGGDQRGELMGLEAWQVMLGVMVIPAVLYGLLSFAIPESPRFLISVGKRERAKKILEEVEGKDVDFDARVTEIEHAMHREEKSSFKDLLGGSFFFKPIVWIGIGLSVFQQFVGINVAFYYSSTLWQSVGVDPADSFFYSFTTSIINIVGTVIAMIFVDRVGRKPLALIGSVGMVIGLALEAWAFSFDLVDGKLPATQGWVALIAAHVFVLFFALSWGVVVWVFLGEMFPNRIRAAALGVAASAQWIANWAITASFPSLADWNLSGTYVIYTIFAALSIPFVLKFVKETKGKALEEMG

SEQ ID NO: 7858 - DNA, 1674 bp, Schizosaccharomyces pombe; identical to SEQ ID NO: 233
  CDS (1)..(1674)

SEQ ID NO: 7859 - protein, 557 aa, Schizosaccharomyces pombe; identical to SEQ ID NO: 234

SEQ ID NO: 7860 - DNA, 2407 bp, Schizosaccharomyces pombe
  CDS (401)..(2128)
aaagattcattggttttattgttaagaagtgtgagacaaccattcttaattgctgacatttcaacactttctacttctctctttcgaaaattccggtcttatccgttgtaactgtttgttaacgtcttttttttcgtttaagaacagagttcctcggatacatcttttatctaagcggtaaatataacaagtttctgggttgtactgattgcatatcatagcaatcctttgaacatatcccttcgaatgctaaaaaattattagctttcgctcattatcgatttttacttcatctttaggtttcctgtcatacttacgatttatttgtttagtttgttaacgttaaaaaccattcctttaattataatcttattaatttacattcaaaagtttcagcaagatgtcaatctcttccaaggattttcaaaatgtaacgtcagcgggtttcgctgatgatactttcgctgccgatacatttgctgctgataaaaaaagtccatttgaatcctcggtttttgaaaacaaaacccaggtgcttcctgtggacagcgtgtctagattatctaacggagctcgaagtcgcagcaattctaacatttctttatctgagccacacgcacttaacgacactgttgaagatcaaccagttagcaaatgggtttgggtgcttgcttttgctgccggtatcggtggtctactgtttggctatgatacaggtgtcatttcaggtgctcttgtagttataggtactagcttgggcggacatgaattaacaaatggtggtaaagaatttatcacctctgcaacatctcttggtgcacttttaggagggataattgctggtgcccttgccgacttttttggtagaaaaccggtaattgcaatagctagtatcatcatcatagttggttccatagtacaggttacggctcaccatctttggcatatgattgtaggtcgctttgttatcggttggggcgttggcattgcatcacttattattcctttgtacctaagtgaaatcgctccgtctaaaatacgcggaaggttggttatcatatatgttttattaattacagctggtcaagtaattgcctatggaattgatacagcttttgaacacgtccataatggttggcgctggatggttggtttagcaatggttcctgcagctttccaattattcattcttatttggctacccgaatctcctcgtttgttagttaaaaaagaaagatctcaggaggcttataacactctggctcgaatctatcctactgctcacccttacgaaataaagactaagctctatttaattcaagaaggagttcgtgatcctttttcaggatctagatggcaaaagattgtgaaaacttttaaagaattatatttcaatccttcaaatttccgtgcattgatactggcttgcggactgcaagcgatgcaacaactttccggatttaattcattaatgtatttttctagtactatttttgaggttgttggctttaacaatcctactgctactggtcttatcattgcagctactaattttgtatttaccattgttgcctttggtgtgattgatttttttggtcgaagaatcttgctcctgttgaccgtatggggaatgattgctgctttaattgtatgcgcggtggcttttcattttttgccgaaagacgagaatggcaattatacttctggtcaatcaaatgcttgggctatcgttgttttaatttcgatgattgtttacgttgcgtcgtatgcctctggacttggaaatctcccttggcaacaatccgagctttttcctatgtccgttagaggtctaggcactggcatgtctactgctgttaactgggctggtaatcttggtataggtgcttcgttcttaacattgatgagtgaaataacacccacaggaacgtttgccctttatggaggcctttgctttttaggatggcttggtgcacttttctgctatcctgatttaaccgattataccatcgaagaaattggggagctgcttaaacatggatttggagttcgtgaaagtatgcgacatctcaaacgcgttcgacaagagcgagcttggtctcgtgaagataaagagcaaaataactagacagtctcttattttcatattattttttcatcacagtcaccattaggtgaaaactcatatatttaattgcgcttatcaaatcgagtaatactgtttcatagattttgtatcttaatatttatattaattgattacatatatacaaatatcttgtgccttgtgtgctatatgaactccagatgttgccgctaaagggttgaaagcagttaagctagacttaaattgtccattcacttcacgccgtaaatctatattttgcttccttactcgtatttattt

SEQ ID NO: 7861 - protein, 575 aa, Schizosaccharomyces pombe
MSISSKDFQNVTSAGFADDTFAADTFAADKKSPFESSVFENKTQVLPVDSVSRLSNGARSRSNSNISLSEPHALNDTVEDQPVSKWVWVLAFAAGIGGLLFGYDTGVISGALVVIGTSLGGHELTNGGKEFITSATSLGALLGGIIAGALADFFGRKPVIAIASIIIIVGSIVQVTAHHLWHMIVGRFVIGWGVGIASLIIPLYLSEIAPSKIRGRLVIIYVLLITAGQVIAYGIDTAFEHVHNGWRWMVGLAMVPAAFQLFILIWLPESPRLLVKKERSQEAYNTLARIYPTAHPYEIKTKLYLIQEGVRDPFSGSRWQKIVKTFKELYFNPSNFRALILACGLQAMQQLSGFNSLMYFSSTIFEVVGFNNPTATGLIIAATNFVFTIVAFGVIDFFGRRILLLLTVWGMIAALIVCAVAFHFLPKDENGNYTSGQSNAWAIVVLISMIVYVASYASGLGNLPWQQSELFPMSVRGLGTGMSTAVNWAGNLGIGASFLTLMSEITPTGTFALYGGLCFLGWLGALFCYPDLTDYTIEEIGELLKHGFGVRESMRHLKRVRQERAWSREDKEQNN

SEQ ID NO: 7862 - DNA, 1998 bp, Neurospora crassa
  CDS (1)..(1998)
atggcgtcgaacccaacgaacaccgcggcccctacgggtggccttaccgagaagaagcatgaccgccgttcaacatcgtccgaatccgtctcgggaaccgggtttgcggaacatgcagaccgcaccggcacttttaaccagaacgctcgactagaggcttcaaaaaagatagcgaatcctttggccggtctaagccctcagcgtctcgaggccatgggagaagaatatgcaatgatggccggtctcaccagcgaggaggacatcagggcctttcgactcggagccagaatcgccggcgatgagagcaactacgacctcatcccggagcttactgaacgggagaaagaggagtgcagcagtatgatgctaaccaccatacttcaagtttgctctctatgcgccgccgtccaaggaatggacgagacggtcgtcaacggcgcccagctcttctacaaggacaagtttggcattggtaccgatagccagagagacacctggcttctgggtctcgtcaactcagcgccctacctttgctgtgccttgatcggctgctggctcactgaaccgatgaacagaatctttggcagacgaggcaccatctttgtttcttgcatcatctcagccgtagcctgcttccaccaggcctttaccaacacgtggtggcacatgttcatcgcccgtttctacctcggccttggcatcggtcccaagtcagccaccacccccatcttcgccgccgaatgctcccctcccaagctccgcggtgcgctggtcatgcaatggcagatgtggaccgccttcggtatcatggtcggctacattgccgatctcgctttctacttcgttcccgatcacggcatcggcctgggtctgaactggcgtctgatgatgggctccgccatgatccccgccgtcatcgtcgtctgcctcgccttcctctgcccggagtcgccccgttggtatctcagcaagggccgacaccaagacgccttcggggcgctctgccgcctgcgtttcgaaaaggtccaagccgcccgcgacctcttctacacccacaccctcctcgaagccgagaagcaagccatgtcgggcgtcaagaagggtaaccgctttaaggagctcttcaccgtgcgtcgtaaccgcaacgcggtcattgcctcgtcgggactcatgttcatgcagcagttctgcggcgtcaacatcatcgcctactactcctcggcagtcttccgagacgccggcttcagcgacgtctcagcactggccgcctcgctcgggtttggcgtcgtcaactggctgtttgccatcccggccatgtacaccatcgacactttcggccggcgcaacctgctgctgaccaccttcccgctcatgtccctcttcctcttctttaccggcttcagcttttggatccccgaggactccaaagcccacatcggctgcatcgcgctaggcatttacttgttcggcatggtctactcccccggtgaagggccggtgccgtttacttactcggccgaagcctacccgctgtacatccggccaatcggcatgtccctcgccacggcgactacctggttcttcaatttcattctttccatcacctggcctaggatggtcacggccttcaagccgcagggcgcgtttggctggtatgcagggtggaatatcattgggtttctctttaccctgttcttggtccccgagaccaagggcaagacgctggaggagctcgatcacgtgtttgacgtgccgttgaagaagttggtcaggtatggggcagatcagagcttgtggttcttccataggggaaagaatggaaatggaatgaggccgacggcgcctagtgcggagatgtatcatggggatgcggagcggatgaacgaggtggttagcgggcagcagcttggggagggtgagagggagaagaggtggaacaaggaacaagagagggaaggggggattatgggacgaggggatgctgctgggaaggtgtag

SEQ ID NO: 7863 - protein, 665 aa, Neurospora crassa
MASNPTNTAAPTGGLTEKKHDRRSTSSESVSGTGFAEHADRTGTFNQNARLEASKKIANPLAGLSPQRLEAMGEEYAMMAGLTSEEDIRAFRLGARIAGDESNYDLIPELTEREKEECSSMMLTTILQVCSLCAAVQGMDETVVNGAQLFYKDKFGIGTDSQRDTWLLGLVNSAPYLCCALIGCWLTEPMNRIFGRRGTIFVSCIISAVACFHQAFTNTWWHMFIARFYLGLGIGPKSATTPIFAAECSPPKLRGALVMQWQMWTAFGIMVGYIADLAFYFVPDHGIGLGLNWRLMMGSAMIPAVIVVCLAFLCPESPRWYLSKGRHQDAFGALCRLRFEKVQAARDLFYTHTLLEAEKQAMSGVKKGNRFKELFTVRRNRNAVIASSGLMFMQQFCGVNIIAYYSSAVFRDAGFSDVSALAASLGFGVVNWLFAIPAMYTIDTFGRRNLLLTTFPLMSLFLFFTGFSFWIPEDSKAHIGCIALGIYLFGMVYSPGEGPVPFTYSAEAYPLYIRPIGMSLATATTWFFNFILSITWPRMVTAFKPQGAFGWYAGWNIIGFLFTLFLVPETKGKTLEELDHVFDVPLKKLVRYGADQSLWFFHRGKNGNGMRPTAPSAEMYHGDAERMNEVVSGQQLGEGEREKRWNKEQEREGGIMGRGDAAGKV

SEQ ID NO: 7864 - DNA, 1678 bp, Arabidopsis thaliana (mouse-ear cress)
  CDS (40)..(1530)
gatccgggatgggaaagaagcaggaggagactttttggaatggagagacaaaagagcatggaaaaagggttactcaggaagagcttaagcatacgtgagagaaagttccctaacgaagacgctttcttagaatccggtttatcgaggaagtctccgcgagaggtcaagaaacctcaaaacgacgatggtgaatgtcgtgttaccgcctctgttttcctcagcacctttgttgccgtatcaggctccttctgtaccggttgtggcgttggtttttcatcgggtgcacaagcagggattaccaaagatttatctctctccgttgcagaatactcaatgttcgggtcgatcttgacattaggaggcttgatcggtgcagtattcagcggtaaagtcgctgatgtcttgggaagaaaacggacgatgttgttttgcgaattcttctgtatcacaggctggctttgtgtagcattggctcagaatgcaatgtggctggactgtggaagattgttacttggaatcggcgttggtatatttagctacgtgattccggtgtatatagccgaaattgcacctaaacatgtccgaggatcgtttgtgttcgccaatcagttgatgcaaaattgcggaatttcactcttcttcatcattggcaattttattccatggagactactaacagtagtcggattggtgccatgtgtgttccacgtcttttgtttatttttcatccccgaatctccaagatggctggcgaagttaggtcgtgataaagaatgccgatcttcgttgcaacgccttaggggatctgacgtcgatatttctcgtgaagcaaacacaattcgagataccattgacatgacagaaaacggtggtgaaactaagatgtctgaattgtttcagagacgatacgcatatccgttaattatcggagttggtttaatgtttttgcaacaattgtgtgggagctccggtgttacctattatgctagtagcctcttcaacaaaggaggatttccaagtgctattggcacatccgtaatagccacaattatggttccaaaagcaatgctggcaacagtcctagtcgataaaatggggaggagaacgctcctaatggcttcttgttctgcaatgggtttgagtgctttgctcttaagtgtttcttacggtttccagtcgtttggcattcttccagaactcactcccatcttcacttgcatcggcgtcttgggtcacattgtgtcatttgccatgggaatgggaggactaccatggattataatggctgagatatttccgatgaatgtgaaagtgtcagctgggaccttagttactgtaaccaattggttatttggttggattatcacatacactttcaattttatgctagaatggaatgcatcaggaatgttcctcatcttctcaatggtctccgccagttcgatcgtatttatatactttttggtacctgagacaaaaggccgatcacttgaagaaatacaagcactgctcaacaactctgtgcaataatatcatttttctttttctttttgggtaaatgatcatatatataagtcgattgttgttatttggtgtgagtttgaatgtgatccgtgtgcgtatcaaattttggatgggaaatttgaaacagtaaaaatttgtatattcctcgtttggg

SEQ ID NO: 7865 - protein, 496 aa, Arabidopsis thaliana (mouse-ear cress)
MERQKSMEKGLLRKSLSIRERKFPNEDAFLESGLSRKSPREVKKPQNDDGECRVTASVFLSTFVAVSGSFCTGCGVGFSSGAQAGITKDLSLSVAEYSMFGSILTLGGLIGAVFSGKVADVLGRKRTMLFCEFFCITGWLCVALAQNAMWLDCGRLLLGIGVGIFSYVIPVYIAEIAPKHVRGSFVFANQLMQNCGISLFFIIGNFIPWRLLTVVGLVPCVFHVFCLFFIPESPRWLAKLGRDKECRSSLQRLRGSDVDISREANTIRDTIDMTENGGETKMSELFQRRYAYPLIIGVGLMFLQQLCGSSGVTYYASSLFNKGGFPSAIGTSVIATIMVPKAMLATVLVDKMGRRTLLMASCSAMGLSALLLSVSYGFQSFGILPELTPIFTCIGVLGHIVSFAMGMGGLPWIIMAEIFPMNVKVSAGTLVTVTNWLFGWIITYTFNFMLEWNASGMFLIFSMVSASSIVFIYFLVPETKGRSLEEIQALLNNSVQ

SEQ ID NO: 7866 - DNA, 2072 bp, Mus sp
  CDS (21)..(1454)
gcgggtcaggtcctgctgacatgtctcccgaggacccccaggagacgcagccgctattgcggccaccggaagccaggactccccgcggccgccgggtcttcctcgcttccttcgccgccgctctgggacccctcaacttcggcttcgcgctcggctacagctcccccgccatccccagcctgcggcgcaccgcacccccggccctgcgcctcggagacaatgcggcctcctggttcggggccgtcgtgaccctgggcgctgctgcagggggcatactgggcggctggctcctggaccgttcagggcgcaagctgagcctcttgctctgcaccgtgcccttcgtgactggctttgctgtcatcaccgcggcccgggatgtgtggatgctgctcggaggccgcctcctcaccggccttgcctgcggagtcgcctcactagtggcaccggtttacatctcggaaatcgcctacccagctgtccgaggactgctcggctcctgtgtgcagctgatggttgtcactggcatcctcctggcctatgtggcaggctgggtcctagagtggcgctggctggccgtgctgggctgtgtgccccccaccctcatgctgctgctcatgtgctacatgcccgagaccccacgttttctcctcactcaacaccagtaccaggaggccatggctgccttgcgcttcctgtggggctctgaggagggctgggaagagccccctgttggggctgagcaccagggcttccagctggccctgctgaggcgccctggcatctacaagcccctcatcatcggcatttccctcatggtcttccagcagctgtcaggggtcaatgctatcatgttctatgccaacagcatcttcgaggaggccaagttcaaggacagcagcctggcctcggtcactgtgggcataatccaggtcctgttcactgctgtggcggccctcatcatggacagagcagggcgaaggctgctcctggccttgtcgggtgtgatcatggtgttcagtatgagtgcctttggtacctacttcaaactgacccagagcctccccagcaactcctcccacgtaggcctggtgcccatcgcggcggagcctgtggatgtccaagtgggactggcctggctggctgtaggcagcatgtgcctcttcattgctggctttgcggtgggctggggacccatcccctggctcctcatgtcagagatcttccctctgcatgtcaagggtgtggctaccggcatctgtgtcctcaccaactggttcatggcctttctagtgaccaaagagttcaacagcgtcatggagatgctcagaccctacggtgccttctggctcaccgctgccttctgcgctctcagtgtcctattcacactgaccgttgtccctgagactaaaggcaggactctggaacaagtcacagcccatttcgagggacgatgacagaccctttctgtgcctgggagccccgagctgagctgcctttgggtttcagaaggagtggagtggcctgtaactaagccacacctcagtttgagcctggaggcccctgactcctcacctcagggccctctttgcccagatctcaacccagattcccaccgtgagcccaccagactctgagtgcggtctctgcagcctgcttcacacacaggacatctgaggagctgtgcatcctcacctgacccaggtgtctccttcttaagactgaggcagctgaagggacctgagggctcctggctcccgtttcctggctggggtgcccggtcctaagcagccgcctgtacctcacttgactgggagatcagaaagggacttagccatatgggctcagaaacaaggtcaggtgagcccaggtagaagagagaatgttcttgccaaccaagccctcctcagagctgcgcagagactctccggggtcaccctggggccagccagcttacccatcacttacaggttctttctggctctttcctgggctccgtgtcctgggtcattagccaccatatcttgttgagtttcaggaaataaaaagcctcttactgttcaaaaaaaaacaaa

SEQ ID NO: 7867 - protein, 477 aa, Mus sp
MSPEDPQETQPLLRPPEARTPRGRRVFLASFAAALGPLNFGFALGYSSPAIPSLRRTAPPALRLGDNAASWFGAVVTLGAAAGGILGGWLLDRSGRKLSLLLCTVPFVTGFAVITAARDVWMLLGGRLLTGLACGVASLVAPVYISEIAYPAVRGLLGSCVQLMVVTGILLAYVAGWVLEWRWLAVLGCVPPTLMLLLMCYMPETPRFLLTQHQYQEAMAALRFLWGSEEGWEEPPVGAEHQGFQLALLRRPGIYKPLIIGISLMVFQQLSGVNAIMFYANSIFEEAKFKDSSLASVTVGIIQVLFTAVAALIMDRAGRRLLLALSGVIMVFSMSAFGTYFKLTQSLPSNSSHVGLVPIAAEPVDVQVGLAWLAVGSMCLFIAGFAVGWGPIPWLLMSEIFPLHVKGVATGICVLTNWFMAFLVTKEFNSVMEMLRPYGAFWLTAAFCALSVLFTLTVVPETKGRTLEQVTAHFEGR

SEQ ID NO: 7868 - DNA, 2177 bp, Homo sapiens
  CDS (288)..(2177)
actatagggcgaattgggtaccgggccccccctcgaggtcgacggtatcgataagcttgatatcgaattccggccgtggcggcggctgctgccgtggcagccggagcggaagccgggaggaagaaagcggcggcagcggcggttgctcccgccggctcgggctgtctagctcgccgagactgccggcccgcggagccgcgtccccccgggcagccccgggcccctgccctatgtcccgcaaggcaagcgagaatgtggagtacacgctgcggagcctgagcagcctgatgggcgagcggcgcaggaagcagccggagccggacgcggcgagcgcggccggggagtgcagcctcctggctgccgccgaatcgagcaccagcctgcagagcgcgggcgcgggcggcggcggcgtcggggacctggagcgcgcggcgcggcggcagttccagcaggacgagacccccgccttcgtgtacgtggtggccgtcttctccgcgctgggcggcttcctgtttggctatgacaccggggtggtgtcaggggccatgctgctgctcaagcggcagctcagtctggacgcgctgtggcaggagctgctggtgtccagcacggtgggggcggctgccgtctcggcgctggccggaggcgccctcaacggcgtcttcggccgccgcgctgccatcctcctggccagtgccctcttcaccgccggctccgcggtgctggctgcggccaacaacaaggagacactgctcgccggccgcctggtcgtgggactcggcatcggcattgcttctatgacagtgccagtgtacattgcggaggtctcaccacccaatttaagaggccgattagtcaccattaataccctcttcatcacaggagggcagttctttgcaagtgttgttgatggagccttcagttatctccagaaggatggatggaggtacatgttgggacttgcagcagttccggcggttatacagttttttggctttctctttttgcctgaaagccctcgatggcttattcagaaaggacagactcagaaggcccgtagaattttatctcagatgcgtggtaaccagaccattgatgaggaatatgatagcatcaaaaacaacattgaagaggaggaaaaagaggttggctcagctggacctgtgatctgcagaatgctgagttatcccccaactcgccgagctttaattgtgggttgtggcctacaaatgttccagcagctctcaggcattaacaccatcatgtactacagtgcaaccattctgcagatgtctggtgttgaagatgatagacttgcaatatggctggcttcagttacagccttcacaaatttcattttcacacttgtgggagtctggcttgttgagaaggtgggccgcagaaagcttacctttggtagtttagcaggtaccaccgtagcactcattattcttgccttgggatttgtgctatcagcccaagtttccccacgcatcacttttaagccaatagctccgtcaggtcagaacgccacttgcacaagatacagttactgtaatgaatgtatgttggatccagactgcggtttctgctacaagatgaacaaatcaactgtcattgactcctcctgtgttccagttaataaagcatctacaaatgaggcagcctggggcaggtgtgaaaatgaaaccaagttcaaaacagaagatatattttgggcttacaatttctgccctactccatactcctggactgcacttctgggccttattttatatcttgtcttctttgcacctggaatgggaccaatgccttggactgtgaattctgaaatatatcccctttgggcaagaagtacaggaaatgcatgttcatctggaataaactggattttcaatgtcctggtttcactaacatttttacacacagcagagtatcttacatactatggagctttcttcctctatgctggatttgctgctgtgggactccttttcatctatggctgtcttcctgagaccaaaggcaaaaaattagaggaaattgaatcactctttgacaacaggctatgtacatgtggcacttcagattctgatgaagggagatatattgaatatatccgcgtgaagggaagtaactaccatctctccgacaacgacgcctcggacgtggagtga

SEQ ID NO: 7869 - protein, 629 aa, Homo sapiens
MGERRRKQPEPDAASAAGECSLLAAAESSTSLQSAGAGGGGVGDLERAARRQFQQDETPAFVYVVAVFSALGGFLFGYDTGVVSGAMLLLKRQLSLDALWQELLVSSTVGAAAVSALAGGALNGVFGRRAAILLASALFTAGSAVLAAANNKETLLAGRLVVGLGIGIASMTVPVYIAEVSPPNLRGRLVTINTLFITGGQFFASVVDGAFSYLQKDGWRYMLGLAAVPAVIQFFGFLFLPESPRWLIQKGQTQKARRILSQMRGNQTIDEEYDSIKNNIEEEEKEVGSAGPVICRMLSYPPTRRALIVGCGLQMFQQLSGINTIMYYSATILQMSGVEDDRLAIWLASVTAFTNFIFTLVGVWLVEKVGRRKLTFGSLAGTTVALIILALGFVLSAQVSPRITFKPIAPSGQNATCTRYSYCNECMLDPDCGFCYKMNKSTVIDSSCVPVNKASTNEAAWGRCENETKFKTEDIFWAYNFCPTPYSWTALLGLILYLVFFAPGMGPMPWTVNSEIYPLWARSTGNACSSGINWIFNVLVSLTFLHTAEYLTYYGAFFLYAGFAAVGLLFIYGCLPETKGKKLEEIESLFDNRLCTCGTSDSDEGRYIEYIRVKGSNYHLSDNDASDVE

SEQ ID NO: 7870 - DNA, 1422 bp, Bacillus megaterium
  CDS (1)..(1422)
atgaaacaaaatcgaaactcattatatattttttctattaccttagttgccgctatcggagggttactgtttggatatgacacagctgtaatatctggagctgaagaatcattaaaggtgtatcttattgacagcttagggttaggatctttagcacacggtgttactgtatcaagtgctttaataggatgtattattggaggattggtatctggttattttgcgacgaaactaggacgcaaacaatcacttatactagcagctattctttttatagtctcagcgttaggagcttcttatcctgagtttttatttttcacaaaaggggaaccgacactctctttgttactagcttttaacttctaccgcattataggtgggattggggttggcttagcatcagccatttgtcccatctatataggagaaattgcaccggcagatattcgcggcagattggtatcgttcaatcaatttatgattatttttggaatgttagtcgtttacttcgtgaattggggtattgcaaatggggaaaccttagaatggattaatgatgtaggttggagatacatgtttgcttcaggagctattccagctttactctttgcagcactcttgtttttagttcctgaaacgcctcgctacttagctatacagaatcaagatcaaaaagctttagccatactaactaaaattaatggatcttcagaagcgaaagcaattttagaagatattaaacaaacaatttctaccaatgtttcgtctgaaaaattattggcatatggaaaattagttatcgttgtaggtatactgctttctgtatttcaacagtttgtaggaatcaatgtagctctatattatgctccgcgtatttttgaaagcatgggagcagctaaaggttcttctatgctgcaaaccattattatgggattagtaaacgttatttttacagtaattgcaattttgacagttgatcggttgggaagaaaacctttattaataacagggtctatcggaatggccattggaatgttcggtgtagcaagcatggctttttcaaacatcattggtatagggacgcttgtatttatcattatttatacagcttcctttatgatgtcatggggaccaatttgttgggtgctcatttcagagatttttcctaataaaattagaggtcgtgctgtagctattgccgtagctgctcagtgggcggctaactattttatttcctctacatatcccgtgatgatggaatatagcggaggattaacatatggtttttacggtttaatgagtgtactttctgctttatttgtctggaaatttgttcctgaaacgaaaggtagaactctcgaacaaatggaaaatatgtggaggaaaaaacaaggggcttcaaagagtaagaaggccatataa

SEQ ID NO: 7871 - protein, 473 aa, Bacillus megaterium
MKQNRNSLYIFSITLVAAIGGLLFGYDTAVISGAEESLKVYLIDSLGLGSLAHGVTVSSALIGCIIGGLVSGYFATKLGRKQSLILAAILFIVSALGASYPEFLFFTKGEPTLSLLLAFNFYRIIGGIGVGLASAICPIYIGEIAPADIRGRLVSFNQFMIIFGMLVVYFVNWGIANGETLEWINDVGWRYMFASGAIPALLFAALLFLVPETPRYLAIQNQDQKALAILTKINGSSEAKAILEDIKQTISTNVSSEKLLAYGKLVIVVGILLSVFQQFVGINVALYYAPRIFESMGAAKGSSMLQTIIMGLVNVIFTVIAILTVDRLGRKPLLITGSIGMAIGMFGVASMAFSNIIGIGTLVFIIIYTASFMMSWGPICWVLISEIFPNKIRGRAVAIAVAAQWAANYFISSTYPVMMEYSGGLTYGFYGLMSVLSALFVWKFVPETKGRTLEQMENMWRKKQGASKSKKAI

SEQ ID NO: 7872 - DNA, 1711 bp, Amanita muscaria; identical to SEQ ID NO: 247
  CDS (38)..(1600)

SEQ ID NO: 7873 - protein, 520 aa, Amanita muscaria; identical to SEQ ID NO: 248

SEQ ID NO: 7874 - DNA, 2700 bp, Kluyveromyces lactis
  CDS (453)..(2603)
tttctttttgttgattatagtcgaagattttacagtccaaaactctctcaaatcccttgagcaattgatatataacattgaccaacatctgagaggaaatcaaaaagatagcccgtctgataataacaaccatcacatatcacttcaatcgcatttaacttgacaaaaagctaagtttaccagtactatttgcaagtacctagagacccaaactattatgactacggctcaacgatcactatgactactgattctgttccacgaaagaatatttctcaagctatcaaactagtgttcttcgacggaaagcacaagagcgtaacgaggcaggctcctctgaagtaccgacgggtggtaaatcgaataatgcttccgctacatcgtcacccgaagaggcacttgagaatagtggagaaaacttcgaactcacaaatttcgcatctttatcagaaatggaatcagaaatctttcttgcacctcccgccaaacaatcgaagaagatctccattcttgttggtatgtttgttgctgtgggtggatttttgtttgggtatgatacaggattaataaataatatcagcgaaatgccttatgttaaccaaaagtttgcacctaacaagaatcatttcacaacaccacaaatctcgatattagtgtcttttttatccttggggacgttcattggagccttactggcacctttaatctccgactcttatggtcgaaagactacaatgatctttagtacgttcgtggtatttatgataggaaactctttacaggtggcagctggttctatgaccatacttgtagttggaagagtcctctctggtatgagtgttggactaatatcggctgcggtgccattatatcaaagtgaagctgcacagaaatctgttcgtggtgcaattatttcctgttaccagtgggccattacatgggggctacttgtagcaagtgcagtttcccaaggaacatataaaagaatggatgcatctagttaccaaataccgatcggattacagtatatttggtcctttctactcggtgtcggcattcttttcctccctgaaagcccaagatactatgttttcaaagataggctagacaaagcggcaaaatctttatcctttttacgtggcgtaccagaggatgactccggattacttgaagagttggttgagatcaaagcaacatatgattacgagatgtcattcggaaaaatctcttacctagattgtttcagatcaacgagatcaagaaccaaacagcgtctacgaatgttgaccggtatcgctcttcaggcttttcagcaagtgagtggtatcaattttatcttttattatggcgtagactttttcaataagagtggtgtcagcgaaagctatttggtttccttcgtcacatatgcagtaaatgttgcgtttaacattccggggttattcttggtcgaatatatcggacgaagaaaattgttattgatgggtggtattcttatgactatctccaatttcattattgctatagtcggattagcgactgactccatggttgcgaacaaagtgatgattgcattcatctgtttattcattgcatcattttcggccacctggggtggtggtgtgtgggtaatttccgctgaattatatccattgggtgttcgcgctaaatgcaccgccatctgtgcagcatcaaactggctaataaatttcatctgtgcattaataacgccttacattatgcacatagatagcagtgtcagacaaacgagtatcggtaccaaaatcttctttgtttgggggtcattgaacgctgttggggttcttgttgtgtacttcaccgtgtacgaaacgaatggattatcattggaagagatcgatgagttgtacaagaaatcttcttctggaataaactccatagaatggaacaagaagatcaaagcctttccagatttgtttcaaaggacaagaccgaacaatgaaggtgacggagaagctgatgataacatacatacagatgaaaattataaccatactatttccagctataatggaacccaaaacaatgaaaaatatcctattcaagtacagatgccacaatttggtgtacggaacatcgaatttttgaacaccacaggctcatctccgcaatcggatatgacagaacccaactttgtcgacttgggtaatggtcttggtataacaacgtatcaaagaggcccaccatccgtccttactgactcgagtgaagaagaggaagagggacaacaacaagagacagatgagactgaggaaggtaaatcattcaaacaccagtacactgacgctcgtaataaaaatcgtggcgagcgcggcagtttcaatagcaatagttcaacctcaggcactactcgatcttcttcccacaaggccagtgttcaaaggatggaagaaattaatctgtacatggcccaattaatgcatcgcggaggaacagaagatctttcgcgtaacactaccgataacactcatcaaccgatatcacatgatatcatgagtcaatggaactcctcatcccaaaataaaggacctagcactcaaaccgatattaatagtaacacttaggaacactaactaatcttataatagtactttaatatataatttattacatgttgaatgacgcttaccggaaggagtatgtaaaatcttacttttatct

SEQ ID NO: 7875 - protein, 716 aa, Kluyveromyces lactis
MESEIFLAPPAKQSKKISILVGMFVAVGGFLFGYDTGLINNISEMPYVNQKFAPNKNHFTTPQISILVSFLSLGTFIGALLAPLISDSYGRKTTMIFSTFVVFMIGNSLQVAAGSMTILVVGRVLSGMSVGLISAAVPLYQSEAAQKSVRGAIISCYQWAITWGLLVASAVSQGTYKRMDASSYQIPIGLQYIWSFLLGVGILFLPESPRYYVFKDRLDKAAKSLSFLRGVPEDDSGLLEELVEIKATYDYEMSFGKISYLDCFRSTRSRTKQRLRMLTGIALQAFQQVSGINFIFYYGVDFFNKSGVSESYLVSFVTYAVNVAFNIPGLFLVEYIGRRKLLLMGGILMTISNFIIAIVGLATDSMVANKVMIAFICLFIASFSATWGGGVWVISAELYPLGVRAKCTAICAASNWLINFICALITPYIMHIDSSVRQTSIGTKIFFVWGSLNAVGVLVVYFTVYETNGLSLEEIDELYKKSSSGINSIEWNKKIKAFPDLFQRTRPNNEGDGEADDNIHTDENYNHTISSYNGTQNNEKYPIQVQMPQFGVRNIEFLNTTGSSPQSDMTEPNFVDLGNGLGITTYQRGPPSVLTDSSEEEEEGQQQETDETEEGKSFKHQYTDARNKNRGERGSFNSNSSTSGTTRSSSHKASVQRMEEINLYMAQLMHRGGTEDLSRNTTDNTHQPISHDIMSQWNSSSQNKGPSTQTDINSNT

SEQ ID NO: 7876 - DNA, 2065 bp, Prunus armeniaca
  CDS (363)..(1790)
cccattttcaactcattttcaacggacttcccaatattctctctctcactaaaaacccaattgcaaatcacagcatcacagactggtcgatcgctttctgggttttgtttctgatattctcgacttcaatttggtacaaaatgcaagcgtcaacttatggtgcactaaaggggagcatacgatttggggtccaaaaccaaacaagggtatcgggttttggtgaattgagaaatacaacaagtacagtatccagaaatctgtgcgtgattgataggagcacttgctgcggtggattgtgcctcagttctgcggctatgggagccaagcttgcacgtctcacaacgggctttgatgggatttccatgtccactttaaaagccagatccgtccaggctcgggcttctgatggcgatcttgagaatcttgttccctccaagcctcaggggaagtcttctggaacagttttcccatttgttggtgttgcttgtcttggagccattttatttggttatcatctgggggtggtaaatggtgctcttgagtacctatccaaggatcttggcattgctgaaaatgctgtattacaagggtgggtggttagtgcccttctagccggtgccacagttggatcatttactggtggagccttggctgataagttcggcagaactaggacttttcaattagatgtcattcctctagcaattggagcatttttatgtgccacatcccagagtgtgcaaacaatgatagttggccgctacttgctggcggttggaattggtatcacatcagctattgtcccactttatatatctgagatctctccaactgaaattcgtggtgcgcttggatctgtaaaccagctttttatatgtattgggattcttggagcgctggtggctggattacctttagcagcaaatccattatggtggaggacaatgtttggtgttgcaatagtaccctctgttctactggcactaggaatggctgcttcacccgaaagtccaagatggcttttccagcaaggaaaaatttctgaagctgaaaaggctataaaaacattatatggaaaagaaagagttagtgaggttatgcatgacttaacatctgcaactcagggttctgtagagcctgaagccggctggtttgatctattcagtagccgctattggaaagttgttagtgttggtgcggcacttttcttgttccaacaattggccgggataaacgctgtggtctattattctacttctgtcttccgcagtgctggcattacatctgatgttgcagcaagtgctcttgttggagcagcaaatgtcttcggaactgctgtcgcatcctcattgatggacagacaaggaagggaaagtcttctactcataagcttcggtggaatggctgcttcaatgttgctgctttctttgtcctttacatggaaagtcctggctccatattctggcccccttgctgttgctgggactgttctctatgtactgtccttttcacttggggctggccctgtgcctgctctccttcttccagagatatttgcttcaagaatcagagcaaaagcagtttctttgtcattgggcatgcactggatttcaaacttcgtcataggcctctatttcttgagctttgtaaccaagttcgggatcagctcagtgtatctcggatttgctggtgtctgtcttcttgctgtcttgtacatatctggtaatgttgttgaaacgaaagggcggtcattggaggaaatagagcgtgctcttagcgtttcaacttgattatgatatgactcaaactacatgtaaaaatctcacaacagctttggattttggccgaagcataggcaccatcactccttttcatgctgtgtggactaggtcatttccacctctcggggtcttgtatttagagattgaacttttgattgtaaccggataaaatggtgtctatggaattccatagctgtgcacaatactaatcggtgatgagtgctttgtgaataaagtatctaccgtgaattttgatactgttcttaaaaaaaaaaaaaaaaaaa

SEQ ID NO: 7877 - protein, 475 aa, Prunus armeniaca
MSTLKARSVQARASDGDLENLVPSKPQGKSSGTVFPFVGVACLGAILFGYHLGVVNGALEYLSKDLGIAENAVLQGWVVSALLAGATVGSFTGGALADKFGRTRTFQLDVIPLAIGAFLCATSQSVQTMIVGRYLLAVGIGITSAIVPLYISEISPTEIRGALGSVNQLFICIGILGALVAGLPLAANPLWWRTMFGVAIVPSVLLALGMAASPESPRWLFQQGKISEAEKAIKTLYGKERVSEVMHDLTSATQGSVEPEAGWFDLFSSRYWKVVSVGAALFLFQQLAGINAVVYYSTSVFRSAGITSDVAASALVGAANVFGTAVASSLMDRQGRESLLLISFGGMAASMLLLSLSFTWKVLAPYSGPLAVAGTVLYVLSFSLGAGPVPALLLPEIFASRIRAKAVSLSLGMHWISNFVIGLYFLSFVTKFGISSVYLGFAGVCLLAVLYISGNVVETKGRSLEEIERALSVST

SEQ ID NO: 7878 - DNA, 1893 bp, Petunia hybrida
  CDS (253)..(1785)
aagggaaaaaatattattacaaagagaaattacaaaagtttcaaaggtcgctctctcaataagagaaaaagcaaacaaatattgaaaacaagaaaagataaagaaaggcctttgcttcttatatatcccttgaaatcttgtgtatccacactatcattagtaaaagactaaaactcgcaaaaaattgtatttacatactatcgtataaataaaaagttagagatttaatttgctatcaacagttcaaacaagatggcaggaggctttgcagctggatctggaggaggtgactatgaaggaaaagtcacaacttttggtatcatgacatgtttggttgctgccacaggtggtctcctctttggttatgatattggtatctcaggaggagttacatctatggatgaattcttgctcaaattttttccaaatgtataccataaggagaaggccttgaaagcagggggcaaccaatattgcaaattcgatgatcatctattgcaactcttcacctcatcactttatttagcagcactagttgcttcatttgcagcttcaataaccaccaaggcctttggccgaaaaatctccatgcttattggaggtcttattttccttgttggtgctgtccttaatggtgctgccatgaatttggctgcactcatcattggtcgtttgttgcttggtgttggcattggctatgccaatcagtcagttccagtttatctctcagaaatggcaccacctaaacttagaggagcactcaatgtttgtttccaaatggctgtcacccttggtatttttgttgcaaatatggtcaactatggtacctcttcaatgaagaaaaatgggtggagagtttcacttgttctagcagctgttcctgcaattatcatgaccgtaggagcagtgttcttacccgatacccctaactccttaattgacagaggccagaaagagaaagccaaggccatgttgcaaaaaatccgtgggacaaataatgtagacaatgaatttgaggatcttataatagccagtgatatgtcaaagctagtgacagatccatgggggaacattatgaaacctaggtacagaccacaattgaccatagctgtcctcattcctttcttccaacaactcacaggtatcaatgtgatcatgttctatgcccctgtcctcttcaagactctgggatttggtgatgaggctgccttaatgaccgctgttatcactggacttgtcaatgtcttcgccacccttatctcaatattcactgttgatagatttggcagaagattcctgttcctcgcaggaggtctccttatgcttatctgccaggctgctgttggtagcgtcataggcagtgtgtttgggacggatggcttaggaacgttcagcaagggactcggaaacgtgacggtggggttgatctgtctgtatgtagcagcatttgcatggtcatgggggccattggggtggttggtgcctagtgaggttttcccaatggaaattcgatcagcagggcaatcaattacagtgtcagtgaacatgttcttcacattcgtgataggccaactcttccttaccatgctttgcgagatgaagtttggtctcttcttcttctttgctggatttgtggtactcatgacactcttcatcttcttcttcttgcctgagaccaaaggtatcccaattgaagaagtcaacagaatctggaagaatcattggttctggaaaagttacgtgccaaatgatgatgatgatcatcactctaaaaatcaagtttagaatgggcattaaaatgaaaaggaagattgtaaataattgtggccctcccggatgttactatgatattttttgttttcaatattaataaatacccactttttgcttgcc

SEQ ID NO: 7879 - protein, 510 aa, Petunia hybrida
MAGGFAAGSGGGDYEGKVTTFGIMTCLVAATGGLLFGYDIGISGGVTSMDEFLLKFFPNVYHKEKALKAGGNQYCKFDDHLLQLFTSSLYLAALVASFAASITTKAFGRKISMLIGGLIFLVGAVLNGAAMNLAALIIGRLLLGVGIGYANQSVPVYLSEMAPPKLRGALNVCFQMAVTLGIFVANMVNYGTSSMKKNGWRVSLVLAAVPAIIMTVGAVFLPDTPNSLIDRGQKEKAKAMLQKIRGTNNVDNEFEDLIIASDMSKLVTDPWGNIMKPRYRPQLTIAVLIPFFQQLTGINVIMFYAPVLFKTLGFGDEAALMTAVITGLVNVFATLISIFTVDRFGRRFLFLAGGLLMLICQAAVGSVIGSVFGTDGLGTFSKGLGNVTVGLICLYVAAFAWSWGPLGWLVPSEVFPMEIRSAGQSITVSVNMFFTFVIGQLFLTMLCEMKFGLFFFFAGFVVLMTLFIFFFLPETKGIPIEEVNRIWKNHWFWKSYVPNDDDDHHSKNQV

SEQ ID NO: 7880 - DNA, 1425 bp, Tetragenococcus halophilus; identical to SEQ ID NO: 249
  CDS (1)..(1425)

SEQ ID NO: 7881 - protein, 474 aa, Tetragenococcus halophilus; identical to SEQ ID NO: 250

SEQ ID NO: 7882 - DNA, 2846 bp, Pichia stipitis; identical to SEQ ID NO: 251
  CDS (175)..(1836)

SEQ ID NO: 7883 - protein, 553 aa, Pichia stipitis; identical to SEQ ID NO: 252

SEQ ID NO: 7884 - DNA, 2054 bp, Beta vulgaris subsp; identical to SEQ ID NO: 253
  CDS (94)..(1731)

SEQ ID NO: 7885 - protein, 545 aa, Beta vulgaris subsp; identical to SEQ ID NO: 254

SEQ ID NO: 7886 - DNA, 1708 bp, Taenia solium
  CDS (46)..(1548)
caattggaaccgtatggaatctgctgtctgatttgtctcacataaatggttaacttccactacgtattcgctacagtggtgattgtatttggctcttcatttcagttcggttttcaaaccggagttattaatagtcctctcccgctaatcgaaaaatacatcctaagcatatgtgaggacagaggcagttcaccttcaccagagttcgttcaggcaatgagcagcctcgtcgttgctggctttccgataggcggcatctttggtgcattgtttggcggatctgtatcaaataaaatggggcgaaagctgtctctttttatctttaacattccgatggccgttggatccctcctaatgatggcttgtcaggcagcggttagttttgaaatgattatcgttggtagagtgcttgttggatttgcctgtggtgccttcactggtatagcaccagtatatctcgcagaaatcgccccagtcaggattcgtggtatgtcggggataatgcaccaattggccattgtctgtgccattctaatttctcaaatccttgggttgaaggaattaatggggtcggcaaaactctggccttatctcctcggcctgacaatcataccctcggtcgtcctattattcctattttggatttgtccagacagcccccgttacattctactgaatagtcaggatctcgagagtgcgaaatctgcccttttttggctccgaggcgataccgaagtcgttgaagaggagatcggggagctcttggctgaacaagagaacgaaagcgaaaatcatactaaattccccctgaaagacctctttcgtgtcaaagctctgcgtttggctctcttcgtcgccgttgtagctcacttggcccaacagttttccggaataaatgctgctctcttctactccacttcgctatttgaaagcattgggctcacctcacaggccgtgtacgcgactttgggtgtgggctcgatgattgtcgtcatcactgtggcttccatcttccttattgaacgagttggtcggcggatccttcttataggcggtctcagtgtcatgcttttcagcgccgtcatcatcaccatcggcttggctcttcgcagccatgcctctggccttgtctaccttgccatcacttttgtctacatcttcgttggtggtttcgctatcggaccgggctcaatcccgtggtttgtggtggctgagatgtttgtgcaggagacacgtgatcctgccattgtgatcacagtcatcgtcaattggctcgctcaaattgttatcagcctgggatatcctccgcttttgaagtacctaaaggactactccttcatgccgttcattggcctgttggtgatcttcattgccctgctctacttcttcctgccagagacgaagggccgagcgccttgtgatgtgcaggatgagtttgtgcgcatgaccggcggcgcagaggacgacgtcaccctcggctcctacactcgctcccttcctagtgagaatggcgaaaatatgacgaaatccgatagggtcaaattctagcgccctttccctcctccctctcacctcatcaaatgtagtttttatcgcgtgacctttgcttctttggagtcatgttctatttcatatatttttttctggacagatttactgactttaataaagtacttgatatgactgccaaaaaaaaaaaaaaaaaaaa

SEQ ID NO: 7887 - protein, 500 aa, Taenia solium
MVNFHYVFATVVIVFGSSFQFGFQTGVINSPLPLIEKYILSICEDRGSSPSPEFVQAMSSLVVAGFPIGGIFGALFGGSVSNKMGRKLSLFIFNIPMAVGSLLMMACQAAVSFEMIIVGRVLVGFACGAFTGIAPVYLAEIAPVRIRGMSGIMHQLAIVCAILISQILGLKELMGSAKLWPYLLGLTIIPSVVLLFLFWICPDSPRYILLNSQDLESAKSALFWLRGDTEVVEEEIGELLAEQENESENHTKFPLKDLFRVKALRLALFVAVVAHLAQQFSGINAALFYSTSLFESIGLTSQAVYATLGVGSMIVVITVASIFLIERVGRRILLIGGLSVMLFSAVIITIGLALRSHASGLVYLAITFVYIFVGGFAIGPGSIPWFVVAEMFVQETRDPAIVITVIVNWLAQIVISLGYPPLLKYLKDYSFMPFIGLLVIFIALLYFFLPETKGRAPCDVQDEFVRMTGGAEDDVTLGSYTRSLPSENGENMTKSDRVKF

SEQ ID NO: 7888 - DNA, 1753 bp, Medicago truncatula
  CDS (29)..(1585)
cttcttcttgctactgaggtcagaaaaaatggctggtggtggaattcccattggagggggtaacaaagagtaccccggaaacctcactccttttgtcaccataacatgcatcgttgctgccatgggtggtttgatctttggctacgatattggaatttcaggtggtgtgacgtccatggatccgtttctgaagaaattttttccggcggtgtaccggaaaaagaacaaggacaaatcgacaaaccagtactgtcaatatgacagtcaaacattgacgatgtttacatcgtcgttgtatctggctgcccttttgtcctcgttggtagcttccaccataactcgtaggtttggtcggaaactttccatgcttttcggaggattacttttccttgtcggtgctcttattaatggctttgctaatcatgtttggatgttgatcgtgggtcggatcttgctcgggtttggtatcgggtttgctaatcagcctgtgccattgtacctctctgagatggctccttacaagtatagaggagcattgaatattgggtttcaattatcaattacaattggtatacttgtggccaatgtgttgaattacttttttgccaaaatcaaaggtggatggggatggagattgagtttaggtggtgctatggtcccagcacttataataacaattggatcattagtccttcccgacacccctaactcaatgatcgaacgtggtgatcgcgatggagctaaagctcaacttaagagaattcgcggcattgaagatgttgatgaagagtttaatgacctcgtagcagctagtgaggcctcaatgcaagttgaaaacccttggagaaatttgttgcagaggaaatatagacctcagcttactatggctgtattgataccattcttccaacaatttacaggcatcaatgttatcatgttttatgcacctgtgctatttaattccattgggtttaaggacgatgcttcacttatgtcggctgtcatcaccggtgttgttaatgttgttgctacttgtgtctcaatttatggagttgataagtggggtaggagagcccttttccttgaaggtggtgctcaaatgctcatatgccaggttgcagtagcagctgcaattggggccaaatttggaacaagtggaaaccctggtaatttaccagaatggtatgctatagtagttgtgctcttcatttgcatttacgtagcaggatttgcttggtcatggggtcctcttggttggttggttcctagtgagattttcccattggagattcgttctgcagctcaaagtgtaaacgtatctgtgaacatgcttttcaccttcttagttgcacaagttttcttgataatgctttgtcacatgaagtttggtttgttcctcttctttgccttcttcgttttggtgatgtcaatctatgtattcttcttattgcctgaaactaaaggaataccaattgaagagatggacagagtttggaaatcacatcccttctggtctagatttgttgaacatggtgatcatggcaatggtgttgagatgggaaagggagctcctaaaaatgtgtaattattattattagtcttcattttattttattttcattattaattagttttattggtgaaacactaactattggtgtcaacctcaagtatcaaatgtaatgaaattgcacttcaaaattacgggattatttttctcaaaaaaaaaaaaaaaaaaaaaaaaaaaaaaaaa

SEQ ID NO: 7889 - protein, 518 aa, Medicago truncatula
MAGGGIPIGGGNKEYPGNLTPFVTITCIVAAMGGLIFGYDIGISGGVTSMDPFLKKFFPAVYRKKNKDKSTNQYCQYDSQTLTMFTSSLYLAALLSSLVASTITRRFGRKLSMLFGGLLFLVGALINGFANHVWMLIVGRILLGFGIGFANQPVPLYLSEMAPYKYRGALNIGFQLSITIGILVANVLNYFFAKIKGGWGWRLSLGGAMVPALIITIGSLVLPDTPNSMIERGDRDGAKAQLKRIRGIEDVDEEFNDLVAASEASMQVENPWRNLLQRKYRPQLTMAVLIPFFQQFTGINVIMFYAPVLFNSIGFKDDASLMSAVITGVVNVVATCVSIYGVDKWGRRALFLEGGAQMLICQVAVAAAIGAKFGTSGNPGNLPEWYAIVVVLFICIYVAGFAWSWGPLGWLVPSEIFPLEIRSAAQSVNVSVNMLFTFLVAQVFLIMLCHMKFGLFLFFAFFVLVMSIYVFFLLPETKGIPIEEMDRVWKSHPFWSRFVEHGDHGNGVEMGKGAPKNV

SEQ ID NO: 7890 - DNA, 1726 bp, Saccharum hybrid
  CDS (73)..(1629)
tgtggctggtagtggctcgtcttggagcagagagagagagagagagagagagagagagggagggagccagcgatggcgggcggcgggatggcggcgctgggcgtgaagacggagcgcgcggcgcagtacaagggccgcatgacgctcgccgtcgccatgacctgcctcgtcgccgccgtcgggggcgccatcttcggctacgacatcggcatctccggaggtgtgacatccatggacccatttctggagaaattcttcccggtggtgttccacaggaagaactccggcgggaagaataactactgcaagtacgacaaccaggggcttgcggcgttcacctcctcgctctacctcgccggcctcgtggcgtccctcgtcgcgtcccccgtgacgaggaactacggccgcaaagccagcatcgtctgcggcggcgtcagcttcctcatcggcgcggcgctcaacgtggccgccgtgaacctggccatgctcatcctcgggcgcatcatgctcggcgtcggcatcggtttcggcaaccaggccgtgccgctgtacctgtcggagatggcgccggcgcacctccgcggcgggctgaacataatgttccagctcgcgacgacgctgggcatcttcacggcgaacctgatcaactacggcacgcagaacatcaagccgtgggggtggcgtctgtcactgggcctcgccgcggcgccggcgctgctgatgacgctggccgggctgttcctcccggagacgcccaacagcctcatcgagcgcgggcgcgtggaggagggccggcgcgtgctggagcgcatccggggcaccgccgacgtggacgcggagttcacggacatggtggaggcgagcgagctggccaacaccatcgagcacccgttccggaacatcctggagccgcgcaaccggccgcagctggtgatggccgtgtgcatgccggcgttccagatcctgacggggatcaactccatcctcttctacgcgccggtcctgttccagagcatgggcttcggcgggaacgcgtccctctactcctccgtgctcaccggcgccgtgctcttctcctcgacgctcatctccatcggcaccgtggaccgcctcggccgccggaagctcctcatcagcggcgggatccagatgatcgtgtgccaggtgatcgtggcggtgatcctgggcgccaagttcggggcggacaagcagctgtcgcggagctactcgatcgcggtggtggtggtgatctgcctgttcgtgctggcgttcgggtggtcgtggggcccgctggggtggacggtgccgagcgagatcttcccgctggagacgcggtcggcggggcagagcatcacggtggccgtgaacctgctcttcaccttcgccatcgcgcaggcgttcctgtcgctgctgtgcgccttcaagttcggcatcttcctcttcttcgccgggtggatcaccgtcatgaccgtcttcgtctgcgtcttcctgccggagaccaagggcgtgcccatcgaggagatggtgctgctctggcggaagcactggttctggaagaaggtcatgccggtggacatgccgctcgaggatggctggggcgccgcacctgccagcaacaatcacaagtgaagactgaggctgtgttcagatccaaaatttggtctaaagttgtcatcacatcgaatgtaatatagataaaaaaataactaatttcacagttaagtag

SEQ ID NO: 7891 - protein, 518 aa, Saccharum hybrid
MAGGGMAALGVKTERAAQYKGRMTLAVAMTCLVAAVGGAIFGYDIGISGGVTSMDPFLEKFFPVVFHRKNSGGKNNYCKYDNQGLAAFTSSLYLAGLVASLVASPVTRNYGRKASIVCGGVSFLIGAALNVAAVNLAMLILGRIMLGVGIGFGNQAVPLYLSEMAPAHLRGGLNIMFQLATTLGIFTANLINYGTQNIKPWGWRLSLGLAAAPALLMTLAGLFLPETPNSLIERGRVEEGRRVLERIRGTADVDAEFTDMVEASELANTIEHPFRNILEPRNRPQLVMAVCMPAFQILTGINSILFYAPVLFQSMGFGGNASLYSSVLTGAVLFSSTLISIGTVDRLGRRKLLISGGIQMIVCQVIVAVILGAKFGADKQLSRSYSIAVVVVICLFVLAFGWSWGPLGWTVPSEIFPLETRSAGQSITVAVNLLFTFAIAQAFLSLLCAFKFGIFLFFAGWITVMTVFVCVFLPETKGVPIEEMVLLWRKHWFWKKVMPVDMPLEDGWGAAPASNNHK

SEQ ID NO: 7892 - DNA, 1638 bp, Debaryomyces hansenii; identical to SEQ ID NO: 265
  CDS (1)..(1638)

SEQ ID NO: 7893 - protein, 545 aa, Debaryomyces hansenii; identical to SEQ ID NO: 266

SEQ ID NO: 7894 - DNA, 1737 bp, Debaryomyces hansenii; identical to SEQ ID NO: 277
  CDS (1)..(1737)

SEQ ID NO: 7895 - protein, 578 aa, Debaryomyces hansenii; identical to SEQ ID NO: 278

SEQ ID NO: 7896 - DNA, 1584 bp, Debaryomyces hansenii; identical to SEQ ID NO: 279
  CDS (1)..(1584)

SEQ ID NO: 7897 - protein, 527 aa, Debaryomyces hansenii; identical to SEQ ID NO: 280

SEQ ID NO: 7898 - DNA, 1674 bp, Debaryomyces hansenii; identical to SEQ ID NO: 281
  CDS (1)..(1674)

SEQ ID NO: 7899 - protein, 557 aa, Debaryomyces hansenii; identical to SEQ ID NO: 282

SEQ ID NO: 7900 - DNA, 1671 bp, Debaryomyces hansenii
  CDS (1)..(1671)
atgagtaattctactaaaaaggatgactgtcatgacgtgacaatagatagcactatatcagatattgaaatagaaaggtcaggctctacaaataatgttatgattgaaccaagtcccaaaagttcttcagaattgttgagctcagaatcagttatttctgattcggacgcaagaccatccaaattgattattttaatcacgttaacatcatctataagtgggtttatgtttgggtatgacaccggttacatatcgtctgcgttggtgaatattggcactgatttgagcaataaattattgtctaacggagagaaagaatttattacgtctgctacttctttgggtgcgttgatcggggctatcattggaggcatattagccaacttgattggaagaaaaatggtgttgttaggatcaaacgttatttttgttataggaactataattcaattagctgcacatactgtttggacgatgattgttggtagatttgttttgggactcggagtgggcattgcgtctttgatttcgcctttgatgttgagtgaattggcaccgtcaaaatataggggccgtttgattgttaccaactgtatgtttataactggaggtcaattggttgcctattttataaactggggattaactggtgtgaataatgggtggagagtatctgttggattatgtatggtaccccctataattcaatttgtgttgttttgtttcttacccgataccccaaggttttatattatggtaggtagagttgaagaagctagaaaagttttgagcaaaactcaccacaatccttccaatgctttcgttaatgcaactattcaagatatgatcgcctccaattcgactgttccaggaaataatccattagttcaagcgtggaactcaattaaaatcattcacacaaatccagcaaattttagggcattaatcttagcttgtggcttacaaggtatacagcaatttacggggtttaattctttaatgtatttcagtgcaacaattttcgaaactattgggttcgataatgcaactgcagtatctattattattgccgctacgaactttgtgtttacagggattgcattatgcattattgataagataggacgtagacgtatcctattaggtgcaattccatgcatgtgtatatcattagttctttgtgctattgccttccactttttaggtgtgaagtttacatcagattctgatgtcattgttgaagcgagaggcattactggctgggggattgttattattctcggtatggtgtggtttgtggcttcttacgctattggtataggtaacagtgcttggactggtgttgaattattctcagatgtaaatgttagagctgtcggctgtatgtatgctgctgctactaattgggctggttccttagttattgcatccactttcttgaccatgttggagaatattacacctcctggcacttttgcatttttcgcaggtttatgttttgttgcattcttttttgtttttttcttattgccagaagtttcaggcttggaactagaagaaactacagaatttttagcaaatggattcaatgttaaggcatctcgtcaaatttctaaggatagaaagaaagtgtcaaaattcgttactcaaaatgacgatcacagtgcataa

SEQ ID NO: 7901 - protein, 556 aa, Debaryomyces hansenii
MSNSTKKDDCHDVTIDSTISDIEIERSGSTNNVMIEPSPKSSSELLSSESVISDSDARPSKLIILITLTSSISGFMFGYDTGYISSALVNIGTDLSNKLLSNGEKEFITSATSLGALIGAIIGGILANLIGRKMVLLGSNVIFVIGTIIQLAAHTVWTMIVGRFVLGLGVGIASLISPLMLSELAPSKYRGRLIVTNCMFITGGQLVAYFINWGLTGVNNGWRVSVGLCMVPPIIQFVLFCFLPDTPRFYIMVGRVEEARKVLSKTHHNPSNAFVNATIQDMIASNSTVPGNNPLVQAWNSIKIIHTNPANFRALILACGLQGIQQFTGFNSLMYFSATIFETIGFDNATAVSIIIAATNFVFTGIALCIIDKIGRRRILLGAIPCMCISLVLCAIAFHFLGVKFTSDSDVIVEARGITGWGIVIILGMVWFVASYAIGIGNSAWTGVELFSDVNVRAVGCMYAAATNWAGSLVIASTFLTMLENITPPGTFAFFAGLCFVAFFFVFFLLPEVSGLELEETTEFLANGFNVKASRQISKDRKKVSKFVTQNDDHSA

SEQ ID NO: 7902 - DNA, 1947 bp, Debaryomyces hansenii
  CDS (1)..(1947)
atgtcttcaagtgcaattactgaaaagccgattatgacggacctggatgaagccaatccagatgttgggttattcgaacctagttccaattcaagtatagtagaagaaaagagaagagtgtcggagttggaaagtgttcactctaaaatcgcagaacctggtcaaggtgaaaagggaaacattttgtcgcagtattccgagaagcaggtgatgcaaatgggtagaaattatgctctcaagtacgatttggatccggatttattttctcgtgctgctgctttggccagaactccaggtgagttcaacgccatgcctttcatcacagaagaagaaaagcaagcgttgcacaaggaaagtaccaagaaatggcacattcctaaaaaattggttcatgtcattgcattaggttctatggctgcggctgtgcaaggtatggatcagtctgttattaacggtgcccttttgttctacccccaatatatgggagttcacaaggactttaacttttttggttatgatactgacatgattgaaggattgatcaacggtgcaccttatttatgtgcttcttgtcttgcttgttggatgtcagatttttggaatagacacttgggtcgtaagggtactattttctggacttgtgttatttctgctgtaacatgtttctggcaagggtttaccaatacatggtatcatctttttattgccagatttattatggggtttggtatcggaattaagtcagctactgtgcctgcgtacgccgctgaatgtacacctaagcaaatcagaggtgctttggttatgttgtggcagttttttacagcatttggtattatgcttggctatgccgcttgtttagcattttattatgtgccggatcggggtattggtggaggtcttaactggagattgatgttaggttccgctggtcttccagctgtattcgtattgttccaaattccatttgtgcctgaatctcctcgttggttgatgggtaaaggaagacacaaggactcgtacgattcattgaatgcaatgcgtcttgacaaaattgctgcagctagagatacgttctaccaatacgtcttattacaagaagaagcttcttacgagggtattccaacatggaagcgtcttgtcgaaatgataacgatcagaagaaatagaaacggtgccttcggtgcttggattgttatgtttatgcaacaattctgtggtatcaatgctattgtctattataattcaacaatttttatcagaggaggttttacccaagttgatgctcttacggcatcttggggtttcggtatggttaacttcctttttgctattccaactttctataccattgataccttcggtagacgtaatttgttgttgttgacattcccgttaatgtctatcttcttattatggaccgggtttggtttcttagcttctaacgaccaaactagaattggtattgtggctagtggtgtttacattttctctgccatttattctgccggtgaaggtccagttccattcacttattctgctgaagctttcccattgtatattcgtgatcttggtatgggttttgctactgccacatgttggtttttcaattttattttagctttgacttggcctaagcttgtgagcgcctttacggagactggtgcatttggctggtatgctggatggaatatagtagggttctttttggttttatggtttttgcctgaaactaaaggtttgaccttggaagaattggatgaagtcttctccgtcagtaccagaaagcatgctatctatcagaccaaaagtatcttaattagcttccaaagagttgtattgcgtcgtcatatcgacccattacctccattatatgagcaccaaaagagattggctgttaccaatcctgattggaacaataaaaccgaaactgctcatattgagtag

SEQ ID NO: 7903 - protein, 648 aa, Debaryomyces hansenii
MSSSAITEKPIMTDLDEANPDVGLFEPSSNSSIVEEKRRVSELESVHSKIAEPGQGEKGNILSQYSEKQVMQMGRNYALKYDLDPDLFSRAAALARTPGEFNAMPFITEEEKQALHKESTKKWHIPKKLVHVIALGSMAAAVQGMDQSVINGALLFYPQYMGVHKDFNFFGYDTDMIEGLINGAPYLCASCLACWMSDFWNRHLGRKGTIFWTCVISAVTCFWQGFTNTWYHLFIARFIMGFGIGIKSATVPAYAAECTPKQIRGALVMLWQFFTAFGIMLGYAACLAFYYVPDRGIGGGLNWRLMLGSAGLPAVFVLFQIPFVPESPRWLMGKGRHKDSYDSLNAMRLDKIAAARDTFYQYVLLQEEASYEGIPTWKRLVEMITIRRNRNGAFGAWIVMFMQQFCGINAIVYYNSTIFIRGGFTQVDALTASWGFGMVNFLFAIPTFYTIDTFGRRNLLLLTFPLMSIFLLWTGFGFLASNDQTRIGIVASGVYIFSAIYSAGEGPVPFTYSAEAFPLYIRDLGMGFATATCWFFNFILALTWPKLVSAFTETGAFGWYAGWNIVGFFLVLWFLPETKGLTLEELDEVFSVSTRKHAIYQTKSILISFQRVVLRRHIDPLPPLYEHQKRLAVTNPDWNNKTETAHIE

SEQ ID NO: 7904 - DNA, 2196 bp, Debaryomyces hansenii; identical to SEQ ID NO: 287
  CDS (1)..(2196)

SEQ ID NO: 7905 - protein, 731 aa, Debaryomyces hansenii; identical to SEQ ID NO: 288

SEQ ID NO: 7906 - DNA, 1659 bp, Debaryomyces hansenii; identical to SEQ ID NO: 291
  CDS (1)..(1659)

SEQ ID NO: 7907 - protein, 552 aa, Debaryomyces hansenii; identical to SEQ ID NO: 292

SEQ ID NO: 7908 - DNA, 1623 bp, Yarrowia lipolytica; identical to SEQ ID NO: 293
  CDS (1)..(1623)

SEQ ID NO: 7909 - protein, 540 aa, Yarrowia lipolytica; identical to SEQ ID NO: 294

SEQ ID NO: 7910 - DNA, 1602 bp, Yarrowia lipolytica; identical to SEQ ID NO: 295
  CDS (1)..(1602)

SEQ ID NO: 7911 - protein, 533 aa, Yarrowia lipolytica; identical to SEQ ID NO: 296

SEQ ID NO: 7912 - DNA, 1980 bp, Yarrowia lipolytica
  CDS (1)..(1980)
atggtttttggacgagaaaaagacgactctgagggtatcgaacatgtgccctccccccaagacaacccgtcagatcagacgtcagacatcatcgctctgaacgagaaggcttctaatgaacatgatgatctccccactatccccaaacccgagggagatgccccagtcaactctgaactggaccccgacaatccgctgattcgatacagtcgcgctgagctcctcgagattgccacccagtttgcggtggataacgaccttgccgacaaagcggaagcattcagaaagggcgccctagtggcccaagacccttccggtttcgagaacatcgacatacttgatgacgacgacagatactggcttaaccgtgagatcaccaataagtgggatcatcccatgaaggtttactaccttgttgtgtgctgctccttggctgctgctgtccagggtatggatgagactgttatcaacggcgccaacatcattttccctgctcagtttggtatcaaggaggattccggtgttgtgtctcgaaagagttggctgcttggtcttgtcaactctgctccttatttgtgttgtgcatgcatctcgtgctggatgactgaccctatcaacaaagtacttggccgaaaatggacagtgttctggacctgtttctgggccggagccacctgtttctggtctggtttcgtcaacacctggtggcatctgtttattgcccggttcttcctgggattcggtattggtcccaagtccgccacagttcccgtgtacgctgccgagtgtgctcctcccaggattcgaggtgccatggttatgatgtggcagatgtggactgcttttggtatcatgatgggctatgttatggatcttgcattctactacgtcaaggatagaggaactattgtcggcctaaattggagactgatgcttggttctgctttgattcctgctcttctggtctgtatttttattgtcaaatgtcctgagtctcccagatggcacctcgctcgaggagagatccgaaagtcgtttgagtgcatgcgagaaattcgacacactgacatacaagccgctcgagataccttctacgcccacgttcttctgatcgaagagaacgagatgaagaaaggaaagaaccgatttgtggagctctttaccgttcctcgaaaccggcgagcagcctgggcttctttcattgtcatgttcatgcagcagttctgtggtatcaatgttattgcctactactcctccaacattttcatggagtctggttttggtgctatccaagctcttctggcttcgtttggttttggtgctatcaactttgtgtttgcgttgccagctgtttacactatcgacacatttggtagacgggcactattactggcgaccttccctctgatggctatattcttgctatttgctggtttctgtttctacattggccagaacgatcccacccactctcatgctcgtgtcggtttaattgctctaggtatctatctcttctcagcagtttactcctgtggagaaggtccagtgcccttcacctactcggctgaagccttccctttgtacgttcgagatttgggtatgtcgtttgccaccgccgtttgctggctctttaattttgttctagccgtcacgtggccctctctcctggcagccttcactccgcagggtgccttcggatggtatgctgcgtggaatgttgtcggattcttcttggtcctgtgtttcttgcccgagaccaagaacctgactctggaagagcttgacaaggtcttcagtgtccccacccgagtccacatgaagtaccagttcaacgccttcaaaatcaacattcagcgaacaatattacgaaaggatgtgcccaagcctcctccgctctatgcccacgaagccggtattggtggtacttctcactggagctccaagcctcagcccaacgcgaacactgccgagttcgtttaa

SEQ ID NO: 7913 - protein, 659 aa, Yarrowia lipolytica
MVFGREKDDSEGIEHVPSPQDNPSDQTSDIIALNEKASNEHDDLPTIPKPEGDAPVNSELDPDNPLIRYSRAELLEIATQFAVDNDLADKAEAFRKGALVAQDPSGFENIDILDDDDRYWLNREITNKWDHPMKVYYLVVCCSLAAAVQGMDETVINGANIIFPAQFGIKEDSGVVSRKSWLLGLVNSAPYLCCACISCWMTDPINKVLGRKWTVFWTCFWAGATCFWSGFVNTWWHLFIARFFLGFGIGPKSATVPVYAAECAPPRIRGAMVMMWQMWTAFGIMMGYVMDLAFYYVKDRGTIVGLNWRLMLGSALIPALLVCIFIVKCPESPRWHLARGEIRKSFECMREIRHTDIQAARDTFYAHVLLIEENEMKKGKNRFVELFTVPRNRRAAWASFIVMFMQQFCGINVIAYYSSNIFMESGFGAIQALLASFGFGAINFVFALPAVYTIDTFGRRALLLATFPLMAIFLLFAGFCFYIGQNDPTHSHARVGLIALGIYLFSAVYSCGEGPVPFTYSAEAFPLYVRDLGMSFATAVCWLFNFVLAVTWPSLLAAFTPQGAFGWYAAWNVVGFFLVLCFLPETKNLTLEELDKVFSVPTRVHMKYQFNAFKINIQRTILRKDVPKPPPLYAHEAGIGGTSHWSSKPQPNANTAEFV

SEQ ID NO: 7914 - DNA, 1548 bp, Yarrowia lipolytica; identical to SEQ ID NO: 305
  CDS (1)..(1548)

SEQ ID NO: 7915 - protein, 515 aa, Yarrowia lipolytica; identical to SEQ ID NO: 306

SEQ ID NO: 7916 - DNA, 1665 bp, Yarrowia lipolytica; identical to SEQ ID NO: 309
  CDS (1)..(1665)

SEQ ID NO: 7917 - protein, 554 aa, Yarrowia lipolytica; identical to SEQ ID NO: 310

SEQ ID NO: 7918 - DNA, 2364 bp, Kluyveromyces lactis; identical to SEQ ID NO: 317
  CDS (1)..(2364)

SEQ ID NO: 7919 - protein, 787 aa, Kluyveromyces lactis; identical to SEQ ID NO: 318

SEQ ID NO: 7920 - DNA, 1710 bp, Kluyveromyces lactis
  CDS (1)..(1710)
atgaacgatacttcagagcattccagtgatgtctctcccatcattttcgatgatatctctcaaagcaaattgaaagactcatctgaaaatgaaaccacggatagaatcattatcaaaccggtcaatgatgaagatgacacttcagtcatgattactttcaaccaaaagatttctccgtttatcttgatcttgacctttacagcatctatctctggtttcatgtttggttatgatactggttatatatcgagtgcattggtctctataggtacggacttggataataaagctctaacatatggtgataaggaaataattacagctgcaacatctttgggtgccttaatctcagcagtgtttgcagggatttctgccgacatttttggtagaaaaccttgtctaatgttctctaatattctttttgtcattggtgctgcgttgcaggttagtgcacattcattttggcaaatggcagtaggtagattaattatggggttcggtgtcggtattgggtcgttactagcgccattattcatttctgaaatcgcaccaaaacatatcagaggtagactaacggtgataaactcactttggctaacaggtggtcaattgatcgcttatgcatgtggtgctgggttgaataaagttcataacggttggagaattttagtcggactttctttgattccaactgtggtgcaatttacatgcttcagcttcttgccagacactccgcgtttctacgtgataaaaggtaactataagaaggctgcagaagttttacaaaagagttacattaacgctccccaggaacttatcgatcaaaaaatccgtgaactatcagatttgaatgaggctatcccaggtaagacccctgtacacaagttcttcaacactgtcaaagaattacatactgtcccatgcaatttcagggcattggtgatcggttgtgctttacaaggtattcaacaattctgtggttggaattctttaatgtatttctctggtactatttttcaaactgttggtttcgaaaattctactgcagtgtctatcatcgttgccggtactaacttcgtattcactttagtcgctttctttgcgattgataaggtcggtcgtagagcaatccttttgattggcttgcctggtatgatggtttccttggttatgtgtgctatcgccttccatttcctagatataaaattcactggcgctggtgaatcggaagtttccaatggtggattcagttcttggggtatagtcgttatcgtattcatcatggtatatgcagcattctatgctctaggtatcggtactgtaccatggcagcaatctgaattatttgcaacatccgttagaggtgtaggtacttcttattgtacagctactaactgggctggttccctaattattgcatctaccttcctaacaatgttacaaaacataacaccgactggtacattttcattatttgctgcactagctgcagtatctaccgtcttctgttatctctgttatccagaactatctggtctagaattggaggaagtacaaactattttaagtgatggattcaacatcaaagcttccaaacaactagccaagaagagaaagcaacaaaatagcgaaatgcaaaggagatttagagaaaaggacatggaagcttatcaaaaggataaaccctccgatgaactacttgaaagttaa

SEQ ID NO: 7921 - protein, 569 aa, Kluyveromyces lactis
MNDTSEHSSDVSPIIFDDISQSKLKDSSENETTDRIIIKPVNDEDDTSVMITFNQKISPFILILTFTASISGFMFGYDTGYISSALVSIGTDLDNKALTYGDKEIITAATSLGALISAVFAGISADIFGRKPCLMFSNILFVIGAALQVSAHSFWQMAVGRLIMGFGVGIGSLLAPLFISEIAPKHIRGRLTVINSLWLTGGQLIAYACGAGLNKVHNGWRILVGLSLIPTVVQFTCFSFLPDTPRFYVIKGNYKKAAEVLQKSYINAPQELIDQKIRELSDLNEAIPGKTPVHKFFNTVKELHTVPCNFRALVIGCALQGIQQFCGWNSLMYFSGTIFQTVGFENSTAVSIIVAGTNFVFTLVAFFAIDKVGRRAILLIGLPGMMVSLVMCAIAFHFLDIKFTGAGESEVSNGGFSSWGIVVIVFIMVYAAFYALGIGTVPWQQSELFATSVRGVGTSYCTATNWAGSLIIASTFLTMLQNITPTGTFSLFAALAAVSTVFCYLCYPELSGLELEEVQTILSDGFNIKASKQLAKKRKQQNSEMQRRFREKDMEAYQKDKPSDELLES

SEQ ID NO: 7922 - DNA, 1530 bp, Equus caballus
  misc_feature (46)..(46): n is a, c, g, or t
  CDS (1)..(1530)
atgccgtcgggttttcaacagatcggctcagaagatggggaaccgnctcagcagcgagtaactgggaccctggtcctcgcagtattttctgctgtgcttggctccctgcagtttggctacaacattggggtcatcaatgccccacagaaggtgattgaacagagctacaatgagacatggctggggaggcaggggcctgaggggcccagctccatcccaccaggcaccctcaccaccctctgggctctctccgtggccatcttttctgtgggcggcatgatctcctccttcctcattggcatcatctctcagtggctgggaaggaaaagggcaatgctggtcaacaatgccctggcagtgctggggggcagcctcatgggcctggctgacactgctgcctcctatgagatgctcattcttggacggttcctcattggcgcctactcagggctgacgtcagggctggtgcccatgtatgtgggggagatcgcccccactcacctgcggggtgccttggggacactcaaccaactggccatcgtcattggcattctgatcgcccaggtgctgggcttggagtctatgctgggcactgccaccctatggccactgctcctgggcatcacagtgctgcctgcccttctgcagttggtcctactgcccttctgcccagaaagccctcgctacctctacatcagccggaacctggaggggcccgccagaaagagtctgaagcgcctgacaggctgggctgacgtgtctggagtgctggctgagctaaaggaagagaagcggaagctggagcgtgagcggccactgtccctgctccagctcctgggcagccgtgtccaccagcagcccctagtcattgcagttgtgctgcagctcagccagcagctatcgggcatcaacgctgttttctattattcaaccagcatcttcgagaaggcaggagtagggcagccagcctatgccaccataggagctggtgtggtcaacacagtcttcaccttggtctcggtgtttttggtagaacgagctgggcgccggacactccatctcctgggcctggcgggaatgtgtggctgtgccatcttgatgactgtggccctgcttctgctggagcgagttccagccatgagctatgtctccatcgtggccatatttggctttgtggcattctttgagattggccctggccccatcccttggttcatcgtggctgagcttttcagccagggaccccgcccggcagccatggctgtggctggcttctccaactggacgtgcaacttcatcattggcatgggcttccagtatgtcgcggatgctatgggtccctacgtcttccttctatttgcggtcctcctgcttggcttcttcatcttcaccttcttaagagtgcctgaaacccgaggccggacgtttgaccagatctcagccgctttccaccggacaccctctcttttagagcaggaggtgaagcccagcacggaacttgagtatttagggccagatgagaacgactga

SEQ ID NO: 7923 - protein, 509 aa, Equus caballus
  misc_feature (16)..(16): Xaa can be any naturally occuring amino acid
MPSGFQQIGSEDGEPXQQRVTGTLVLAVFSAVLGSLQFGYNIGVINAPQKVIEQSYNETWLGRQGPEGPSSIPPGTLTTLWALSVAIFSVGGMISSFLIGIISQWLGRKRAMLVNNALAVLGGSLMGLADTAASYEMLILGRFLIGAYSGLTSGLVPMYVGEIAPTHLRGALGTLNQLAIVIGILIAQVLGLESMLGTATLWPLLLGITVLPALLQLVLLPFCPESPRYLYISRNLEGPARKSLKRLTGWADVSGVLAELKEEKRKLERERPLSLLQLLGSRVHQQPLVIAVVLQLSQQLSGINAVFYYSTSIFEKAGVGQPAYATIGAGVVNTVFTLVSVFLVERAGRRTLHLLGLAGMCGCAILMTVALLLLERVPAMSYVSIVAIFGFVAFFEIGPGPIPWFIVAELFSQGPRPAAMAVAGFSNWTCNFIIGMGFQYVADAMGPYVFLLFAVLLLGFFIFTFLRVPETRGRTFDQISAAFHRTPSLLEQEVKPSTELEYLGPDEND

SEQ ID NO: 7924 - DNA, 1850 bp, Oryza sativa
  CDS (99)..(1634)
gactggttcggtgtgagcgagcgagcgagatagccatatcttcgctgtgcgtcgtcgtcgtcgctgcgtggtgaattcttggggaggaggaggacgagatggcgggaggcggcgtggcggcgctgggggtgaagaaggagcgggcggcggagtacaagggccgcatgacgctcgccgtcggcatggcctgcctcgtcgccgccgtcggcggcgccatcttcggctacgacatcggcatctccgggggagtgacgtccatggatccgttcctcaagaagttcttcccggtggtgttccggaagaagaacgacgacggccagaacaactactgcaagtacgacaaccagggcctctcggcgttcacctcctccctctacctcgccggcctcgtctcctcccttgccgcctcgccggtgacgaggaactacggccgccgcgccagcatcgtctgcggcggcctcagcttcctcgccggcgccacgctcaacgccgccgccgttaacctcgtcatgctcatcctcggccgcatcctgctcggcgtcggcatcggcttcggcaaccaggccgtgccgctgtacctgtcggaaatggcgccggcgcacctccgcggcgcgctgaacatgatgttccagctggcgacgacgctgggcatcttcacggcgaacatgatcaactacgggacgcagcacatcaggccgtgggggtggcggctctcgctggggctcgcggcggcgccggcgctgctgatgaccgtcggcgggctgctcctgccggagacgcccaacagcctgatcgagcgcgggcgcgtcgaggagggccgccgcgtgctggagcgcatccggggcaccgccgacgtggacgccgagttcacggacatggcggaggcgagcgagctcgccaactccatcgagcacccgttccgcaacatcctggagccgcgcaaccggccgcagctggtgatggcggtgtgcatgccggcgttccagatcctgacgggcatcaactccatcctcttctacgcgcccgtgctgttccagagcatgggcttcggcggcagcgcgtcgctctactcctcagtcctcaccggcgccgtcctcttctcctccaccatcatctccatctccaccgtcgaccgcctcggccgccgcaagctcctcatcagcggcggcatccaaatgatcatctgccaggtgatagtggcggtgatcttgggggtgaagttcgggacggacaaggagctgacgaggagctactcgatcgcggtggtggtggtgatctgcctgttcgtgctggcgttcgggtggtcgtgggggccgctggggtggacggtgccgagcgagatcttcccgctggagacgaggtcggcggggcagagcatcacggtggcggtgaacctcttcttcaccttcgtcatcgcgcaggcgttcctgtccctgctctgcgcgctcaagttcggcatcttcctcttcttcgccgggtggatcaccgtcatgaccgtcttcgtccacgtcttcctgccggagaccaagggcgtgcccatcgaggagatggtgctcctatggaggaagcactggttctggaagaaggtcatgcccgacctgccgctcgaggacggcgacagtcatcacaagtgaaagaaatgtactctgagatagtatatgggggttacagtagatgagacatgacatgtaggatgaggagattaagattgatcatgtgcggtaatgcattctgtgtgtatgttaattgaagttcatggatcatgatgtctgtttgtcgtggcagagaagagaaatattggaaacacaaaattttatactactcgattattaattgtctgaatcctcgtg

SEQ ID NO: 7925 - protein, 511 aa, Oryza sativa
MAGGGVAALGVKKERAAEYKGRMTLAVGMACLVAAVGGAIFGYDIGISGGVTSMDPFLKKFFPVVFRKKNDDGQNNYCKYDNQGLSAFTSSLYLAGLVSSLAASPVTRNYGRRASIVCGGLSFLAGATLNAAAVNLVMLILGRILLGVGIGFGNQAVPLYLSEMAPAHLRGALNMMFQLATTLGIFTANMINYGTQHIRPWGWRLSLGLAAAPALLMTVGGLLLPETPNSLIERGRVEEGRRVLERIRGTADVDAEFTDMAEASELANSIEHPFRNILEPRNRPQLVMAVCMPAFQILTGINSILFYAPVLFQSMGFGGSASLYSSVLTGAVLFSSTIISISTVDRLGRRKLLISGGIQMIICQVIVAVILGVKFGTDKELTRSYSIAVVVVICLFVLAFGWSWGPLGWTVPSEIFPLETRSAGQSITVAVNLFFTFVIAQAFLSLLCALKFGIFLFFAGWITVMTVFVHVFLPETKGVPIEEMVLLWRKHWFWKKVMPDLPLEDGDSHHK

SEQ ID NO: 7926 - DNA, 1644 bp, Candida glabrata
  CDS (1)..(1644)
atggttgatgagaatagcaataatgagaatgggctagaccaggaggaagaaatagatgtgtattccgatctgtattcgacgtatacgcaggttacttcgttgactactaatgatgttgataacaccacataccccatgacttggaagacagtcgccctttttggcagctccacagtgggtggattactatttggttacgatacaggtgtcatctcgggggtattgctcagtttaaagccacaggaccttggcagagctaccatttctgattgggataaagagctgatcacctccataacatgccttggttgctttgtgggatccctgctggggtctccgctggctgacaagtatggcaggaggataactctggcgatcttttgcgtattatttatagtcgccgcactgtggatggccttggccagcaacttagtactgctggtattcggtaggtttgttgtggggatcgcagtgggtactgccgcgcaatgtactccggtgtacctctgtgagatatcacctgccaaaattagaggtcaaatattagcactgaattccattgctgttactggtgggcagttcttgtcttacatattcgcttatgagctttacgacgtgaatggctcttggagaattttatttggattgtcagccgtgcctgctataatatttttatccatgttagacttcatacctgaatctcctcgttggttggtatctatgtctaaatatgatagcgctaaagcagccttgcgtatgatctatccgactgcgtctcctggtcagataaacctcaaattcaatgaactagtcatcaatctaagcaagctcaaacattaccaagatgagcaaacttcgctgatggttccattatcggtgcgttcctctcgagttacaatcaattctgctgattacggttcggtagcaaacttgagatcattacactctctaatgaatgaaccttctggaacaaatcattctaataagacagttcatcacagaatggagcctaggacaaagagagcattgttaatcggttgcgttcttatgtttttccagcaaattactggtttcaacgcgtttatgtattacgctccgctaatattttcgaaattaaactctcataacccgctacttccagcaatgtcaattgcatttactaactttttattcacctttttagctgtctatctcgttgaccttgttgggagacgttcgatgcttctaaatacaatttggattatgactgttgggttgttactgtctacaattgggtttcaacatgaaaatgttgttgtattattatttgcagtatctatatttgtggcagcatatgcttctgccatgggcaccataccctggagttcagtagaattcctgccactgaatagaaggtcgttcggagcatcatgtatatcatgtactaactggttaacaaattttgttattacagcatcttacctatctgtgatgaataagatcggtacagaagacacaatgttattctttgcattatttagtgtgatggcatggttttttgtgtatttctggtatcctgaagtcaagggactatcactggaagaaattgggaaagtgtttgaaaatggtattgatgtccattatgtttacaggaactattactga

SEQ ID NO: 7927 - protein, 547 aa, Candida glabrata
MVDENSNNENGLDQEEEIDVYSDLYSTYTQVTSLTTNDVDNTTYPMTWKTVALFGSSTVGGLLFGYDTGVISGVLLSLKPQDLGRATISDWDKELITSITCLGCFVGSLLGSPLADKYGRRITLAIFCVLFIVAALWMALASNLVLLVFGRFVVGIAVGTAAQCTPVYLCEISPAKIRGQILALNSIAVTGGQFLSYIFAYELYDVNGSWRILFGLSAVPAIIFLSMLDFIPESPRWLVSMSKYDSAKAALRMIYPTASPGQINLKFNELVINLSKLKHYQDEQTSLMVPLSVRSSRVTINSADYGSVANLRSLHSLMNEPSGTNHSNKTVHHRMEPRTKRALLIGCVLMFFQQITGFNAFMYYAPLIFSKLNSHNPLLPAMSIAFTNFLFTFLAVYLVDLVGRRSMLLNTIWIMTVGLLLSTIGFQHENVVVLLFAVSIFVAAYASAMGTIPWSSVEFLPLNRRSFGASCISCTNWLTNFVITASYLSVMNKIGTEDTMLFFALFSVMAWFFVYFWYPEVKGLSLEEIGKVFENGIDVHYVYRNYY

SEQ ID NO: 7928 - DNA, 2571 bp, Candida glabrata; identical to SEQ ID NO: 329
  CDS (1)..(2571)

SEQ ID NO: 7929 - protein, 856 aa, Candida glabrata; identical to SEQ ID NO: 330

SEQ ID NO: 7930 - DNA, 1713 bp, Candida glabrata
  CDS (1)..(1713)
atggctggtgagaaggtggagttgagctccatggatagtgctatagagataaggcatgtgaaccagcatgccaaggaaatatcgtctgagaacaagtctgagagctatgacgacaataaggagtttgaagggtccaatcgcgtggtgataaagcctgttaacgacgaggacgatgtgtctgttatgataaattttaaccagggtgtgtcacacttcattattatgctgacttttgtcgcttccttgtccggtttcttgttcggttacgacaccggttacatatcctcggcgttgatttccatagggactgacctggacaacaaagagctgacgtacggtgagaaggaaatcaccaccgctgccacctccttgggtgctttgatctttgctttagtggcagggttctccgtagacatattcggcagaaaaccatgtcttatgttctcgaacattatgtttttgatcggtgctattcttcaagtcaccgcacacaagttctggcagatgactgcgggcagattcattatgggtttcggtgtcggtatcggttccttgatcgcaccattgtacattagtgagattgcaccaaaaatgatcagaggtagactgactgtgatcaactcactgtggctgacaggtggccagttgatcgcatacggttgtggtgctggtttgaatcacgtccacaacggttggagaattctggtcggtctctccttgattccaaccgtgctacagttcgtgttctttatcttcctaccagacacgcctagatactacgttatgaaaggtgactatgagaaggccaagagcgtgctgaagagaagttacaacggtgtctctgacgaactaatagacagaaagattgaagaactattagctttgaaccaatctattccaggtaagaatcatgtagaaagaacttggaacgctgtgaaagagttgcataccaaaccagctaactttagagctctgatcatcgcatgtggtttacaaggtatccaacaattcactggttggaactccttggtctatttctccggtactatttttgaatccgttggtttcaagaattcctctgcagtttccattatcgtttctggtacaaatttcatctttacactggtggctttcttctgcatagataaaatcggtagaagaaacattctgattataggtatcccaggtatgaccgtggctcatgttatgtccgctattgcgttccacttcattggaatcaagtttgtcggtaacaccgccatcgttgaacactcaggtttctcctcatggggtattgtaatcattgtgttcattatcatgtttgctgcattctacgctctaggtattggtaccgtgccatggcaacaatctgaactgttcccacaaaacgttagaggtgtcggtactgcttttgctactgctactaactgggccggttccttagttattgcttcaactttcttgactatgttacaaaacatcactcctacaggtacattcggtttctttgcaggcttatgtgtggtttctttcttcttctgttatttctgctacccagaactttcaggtttggaattggaagaagttcaaactattttgcaagatggtttcaatgtgcaagcatctaaggaactggcaaagaagcgtaagaggcaaattgctgttctaaagaaagcaaaacatcaaccaacagaagaaatcattgaagagtga

SEQ ID NO: 7931 - protein, 570 aa, Candida glabrata
MAGEKVELSSMDSAIEIRHVNQHAKEISSENKSESYDDNKEFEGSNRVVIKPVNDEDDVSVMINFNQGVSHFIIMLTFVASLSGFLFGYDTGYISSALISIGTDLDNKELTYGEKEITTAATSLGALIFALVAGFSVDIFGRKPCLMFSNIMFLIGAILQVTAHKFWQMTAGRFIMGFGVGIGSLIAPLYISEIAPKMIRGRLTVINSLWLTGGQLIAYGCGAGLNHVHNGWRILVGLSLIPTVLQFVFFIFLPDTPRYYVMKGDYEKAKSVLKRSYNGVSDELIDRKIEELLALNQSIPGKNHVERTWNAVKELHTKPANFRALIIACGLQGIQQFTGWNSLVYFSGTIFESVGFKNSSAVSIIVSGTNFIFTLVAFFCIDKIGRRNILIIGIPGMTVAHVMSAIAFHFIGIKFVGNTAIVEHSGFSSWGIVIIVFIIMFAAFYALGIGTVPWQQSELFPQNVRGVGTAFATATNWAGSLVIASTFLTMLQNITPTGTFGFFAGLCVVSFFFCYFCYPELSGLELEEVQTILQDGFNVQASKELAKKRKRQIAVLKKAKHQPTEEIIEE

SEQ ID NO: 7932 - DNA, 2289 bp, Candida glabrata; identical to SEQ ID NO: 331
  CDS (1)..(2289)

SEQ ID NO: 7933 - protein, 762 aa, Candida glabrata; identical to SEQ ID NO: 332

SEQ ID NO: 7934 - DNA, 1695 bp, Candida glabrata; identical to SEQ ID NO: 335
  CDS (1)..(1695)

SEQ ID NO: 7935 - protein, 564 aa, Candida glabrata; identical to SEQ ID NO: 336

SEQ ID NO: 7936 - DNA, 1692 bp, Candida glabrata; identical to SEQ ID NO: 341
  CDS (1)..(1692)

SEQ ID NO: 7937 - protein, 563 aa, Candida glabrata; identical to SEQ ID NO: 342

SEQ ID NO: 7938 - DNA, 1707 bp, Candida glabrata; identical to SEQ ID NO: 343
  CDS (1)..(1707)

SEQ ID NO: 7939 - protein, 568 aa, Candida glabrata; identical to SEQ ID NO: 344

SEQ ID NO: 7940 - DNA, 1671 bp, Candida glabrata; identical to SEQ ID NO: 345
  CDS (1)..(1671)

SEQ ID NO: 7941 - protein, 556 aa, Candida glabrata; identical to SEQ ID NO: 346

SEQ ID NO: 7942 - DNA, 1754 bp, Oryza sativa
  CDS (115)..(1677)
attgattccctcctccgcgcagctcgcggcttcgatcgatcgatcgaccgatctcccacgtcgccgccgttcgatcgatccgccgccgccgccgccgccggccggccgggcaagatgccgggggccgtgatcgtgcaccaccacacgcggtacaagacgtaccccggcgaggtcaccggcttcgtcttcttctgctgcctcatcgcctccgtcggcggctgcatcttcggctacgacatcggcctcaccgccgggttgacgtcgacggagtcgttcttggcgatgttcttcccggtgatcttcgagcagcagcaggagcgggtgatcacgaaccagtactgcaagttcgacagccaggtgctgacgctgttcggctcgtcgctcttcctctccgccatggtcgccggcatcttcgcctccccgatgtcccgcgccttcggccgcaagtggaccctcttcgtcgccgccgtcgcctacctcatcggcgccatcctcggcgccatctccttcaacttcatcgttctcctcaccggccgcctcctcctcggcgtcggcgtcggcgtctgcatccacgcgtcaccgctgtacatatcggagatggcgccggcgcagcagcgggggatgctgaacatactgttccagctgatgatcacggtggggatcctgtcggcgagcctgacaacgtactggacgtcgaagatcgccggcgggtgggggtggcgcgtggggctggcgttcgggacggtgccggcggcggtgatcgcgctggggtcgctggccatcccggacacgccggtgtcgctcatcgcgcgcggcgagggcgaggcggcgcgcgcgacgctggccaagatccgcggcgtcgacgacgtgcgcgccgagttcgaggacctgacgacggcgagcgaggagagcaaggcggtggcgcacccgtggcgggagctcttcttcggcggcaggtacaagccgcagctcgcgttcgcggtgctcatccccttcttccagcagctcaccggcatcaacgtcatcatgttctacgcccccgtcctcttcaagaccgtcggcttccgccaggacgcctccctcgtctcctccgtcatcaccggcctcgtcaacgtcttctccaccttcgtcgccgtcatgaccgccgacaaggtcggccgccgcgccctcttcctccaaggtggcacccaaatgatcatctcccagatcttggtgggaacattcatcggattacagttcggggtgagcgggacgggggcgatgtcggagcagtacgcgatgtgcatcgttctgttcgtgtgcgtgtacgtggccgggttcgcgtggtcgtgggggccgatggggtggctgatcccgagcgaggtgtacccgctggcggtgaggtcggcggcgcagagcgtgacggtggcggtgaacatgttcttcacggcgttcatcagccagatcttcctcaccctcctctgccacctccgcttcggcctcttctacttcttcggcgcctgggtcctcctcatgaccgtcttcatcgccaccctcctcccggagaccaagtgcgtgccgctcgaagaggtggcgcacgtctggaggaagcactggttctggcgcaagttcatcgtcgactcccccgaccgcggcggcgccgagatgaggaagaggatagccctagagatgagctagagttctctactaatatactgacgtgcaaagcttttacgcgttcgcgaaaaagagaagagaataaaagcttagctaac

SEQ ID NO: 7943 - protein, 520 aa, Oryza sativa
MPGAVIVHHHTRYKTYPGEVTGFVFFCCLIASVGGCIFGYDIGLTAGLTSTESFLAMFFPVIFEQQQERVITNQYCKFDSQVLTLFGSSLFLSAMVAGIFASPMSRAFGRKWTLFVAAVAYLIGAILGAISFNFIVLLTGRLLLGVGVGVCIHASPLYISEMAPAQQRGMLNILFQLMITVGILSASLTTYWTSKIAGGWGWRVGLAFGTVPAAVIALGSLAIPDTPVSLIARGEGEAARATLAKIRGVDDVRAEFEDLTTASEESKAVAHPWRELFFGGRYKPQLAFAVLIPFFQQLTGINVIMFYAPVLFKTVGFRQDASLVSSVITGLVNVFSTFVAVMTADKVGRRALFLQGGTQMIISQILVGTFIGLQFGVSGTGAMSEQYAMCIVLFVCVYVAGFAWSWGPMGWLIPSEVYPLAVRSAAQSVTVAVNMFFTAFISQIFLTLLCHLRFGLFYFFGAWVLLMTVFIATLLPETKCVPLEEVAHVWRKHWFWRKFIVDSPDRGGAEMRKRIALEMS

SEQ ID NO: 7944 - DNA, 2196 bp, Oryza sativa
  CDS (301)..(1746)
tgaggaaccaacagaagcaaaggtggcattcgttcgtcgcacgagagcaccacagcctcacgacacgagctcatcccccgccatctccgctccgctcctctcctctcctctccgtgctacgccaccaaacccactccccccgagatagagagagagagagagagagatccacagcctcacagcatcaaatcacctcccctttctcccagatccaagccgccgccaccaccccctcgccgtcgccgtcgccccctccggccgatctgatgcccgcgcacgcggcggtggtggtcagcgccgatgcggtggaagcttaagtcgtcggcgtacaagcgcgtgccgtccagggacgccgccatggatctcgacgtcgagacgccagcgaaaatggcggacggcggggccccgtcgtggcgcatgtcgctgccgcacgtgtgcgtcgccacgctcacctccttcctcttcggctaccactccggggtcgtgaacgagccgctcgagagcatctccaccgacctcggcttcgccgggaacaccctcgccgaaggccttgtggtgagcatctgcctgggtggtgcgtttgttgggtgcctgttcagtggatccatcgctgacggaatcggcaggcgtcgcgcgtttcagctcagtgcgctgcccatgatcatcggcgctgccgtaagcgctctcaccaatagtctggagggtatgcttcttggaagatttttggttggaacagggatgggattaggtccaccagtagcttcactgtacataacagaggtttctcctccttcagtgaggggcacatatgggagctttgttcagattgcaacctgccttggaatcgtagtatctctcctaattggtacacctgtgaaggatattgatagatggtggagggtgtgtttctgggttgcagctgttccagcaactttacaagctcttggaatggagttctgtgctgagagcccccagtggctgtataagtgtggaagaacgactgaagcagagatacaatttgaaaaacttctaggtcctcttcatgttaagtctgctatggcagaactctcccgatctgaaagaggcgatgatggagaaaatgtgaagtattcggaattgttttatggtcgcaactttaatgttgtttttattggcacaacgctctttgctttacaacagttatccggcataaattctgtgttctatttctcatcaactgtgttcagaagtgtgggtgtgccccctaaccttgcgaacatatgcatggggatagcaaatttatcaggctcaattgtagctatgcttctaatggacaaactaggaaggaaagtacttctttcagggagcttccttggcatggcctttgcaatgggacttcaggctgttggagcaaatcgtcaccaccttggttctgcaagcgtatatctttcagttggtggcatgctattgtttgtcttgacattttcgttaggagcaggtccagtgccaggacttcttttgcctgagattttcccaaacaaaatacgggccaaggctatggctctgtgcatgtccgtgcattgggtggtaaatttttttgtcagtttgttgttcttgcggcttctggagcaacttggtccacaagttctgtacacaatgttttcctcagcttgtgtggtagcagcaatatttgtgcggcgccatgtggttgaaacaaagggaaagactttgcaagagatagaagtttcgcttctacaaacacaataaagatttcatcagcgagtttgaggcaacaacaacctacatgattagcatctgacactatacttgttgctgaatacctgctgggaaagtctaccgtgaaagttgatcactgaaccaagccaacataccacggacaggcagcgccctacactggaccagggaagtacccagacatgcacctgtgaccagtaagggcgacctagctcgtgcataaaccatccatgtagtgaggttgcatctgtatagttggtcttctgctagatgtatctggtaatctgtgttgtcttcatcatttgtcatttgtacactgtcagtatggagaaaaaaagacgggaagtgtggttactgatggccatagtttgaaccgtggatacgttttttttactgtttaaagaggaataacagcactggctctgccagctacatgaaaataaagtgcgttctgcctgagcc

SEQ ID NO: 7945 - protein, 481 aa, Oryza sativa
MRWKLKSSAYKRVPSRDAAMDLDVETPAKMADGGAPSWRMSLPHVCVATLTSFLFGYHSGVVNEPLESISTDLGFAGNTLAEGLVVSICLGGAFVGCLFSGSIADGIGRRRAFQLSALPMIIGAAVSALTNSLEGMLLGRFLVGTGMGLGPPVASLYITEVSPPSVRGTYGSFVQIATCLGIVVSLLIGTPVKDIDRWWRVCFWVAAVPATLQALGMEFCAESPQWLYKCGRTTEAEIQFEKLLGPLHVKSAMAELSRSERGDDGENVKYSELFYGRNFNVVFIGTTLFALQQLSGINSVFYFSSTVFRSVGVPPNLANICMGIANLSGSIVAMLLMDKLGRKVLLSGSFLGMAFAMGLQAVGANRHHLGSASVYLSVGGMLLFVLTFSLGAGPVPGLLLPEIFPNKIRAKAMALCMSVHWVVNFFVSLLFLRLLEQLGPQVLYTMFSSACVVAAIFVRRHVVETKGKTLQEIEVSLLQTQ

SEQ ID NO: 7946 - DNA, 2048 bp, Equus caballus; identical to SEQ ID NO: 355
  misc_feature (1853)..(1853): n is a, c, g, or t
  CDS (178)..(1752)

SEQ ID NO: 7947 - protein, 524 aa, Equus caballus; identical to SEQ ID NO: 356

SEQ ID NO: 7948 - DNA, 1443 bp, Photobacterium profundum
  CDS (1)..(1443)
atgtcatcaagtgtcgagacatcatcaaaaaaacataacctgagttacatcattcgaatttgttgtatcgctgcattaggggggatcttattaggatatgataccgctgttatttcaggagctatcggaccgataagagaatacttcaacttaacggcggcacaaaccggatgggctgtttccagtgttgtattaggcagtattattggtgcaatcagttctggctggtgtgcgcttaaatatggccgtagaaaagcattattcttagctgctcttttattcatcatttccgcgataggctctgcccttgccgctacctttaccatctatgtgttattcagaattgtagggggtattgcggttggtttagcatgtgttgtctctcctatgtatatgtctgaagtcgccccgaaagatttcagggggcgtgcagtcagcatgttccaacaatctgccgttattggtcaaacgggtgtgttctacgttaactatctgattgcaaaaggcatgtctgaagcgtggcttgttgatataggctggcgttggatgctagcatcagaagttctacctgccttattatttggtagcctgttaattatcattcctgaatcacctcgttggttagtcttaaaaggacaccttgatcaagcaaaagaaaccctttcacgtatttctaaccctgaacatgccgaccgcgttattcttgaaatacaaaaatcattagtacccactaatgcatcaaaaaataataaggtcagcttacgttcaccattactattctccattctggttattggtacttttgttgctgcagcacagcagttaaccggtattaatgtcattatgtactacacaccagaaattctaaatccgattgcgggtggtactgaaaacgcactattacaaaccactttcgtgggtgtcgtctttatttttggtaatgctttaggtatgtacctgattgataaagtgggtcgtttaccactgatgaaatacggtacattcggttgtgcgctaggtatgactattgtgggttatgtgctgtatacgggcactgaaggctatgcggctttattcgcactctgtctatatgttgtcgcatatgctgcatcttggggctgtgcctgctggacaatgatttcagaaatattcccgaatagcatccgttctcgtgcaatggccattgctgttggtgcacaatggtttacgggtttcattgttacccagtctttcccgatgttaaatgaaaatgcttacctaaaagagcactttaatggtgcattcagcttctgggtgttcgcggttctttctatcatgtgtatgtatgttgttgttaagtatgtacctgaaacgaaaggcgttagcttggaagacatggaaaaagtcatggctgaaaaactaggtaaaaataagaaacgtcaagttgcagaagcaagcgcttaa

SEQ ID NO: 7949 - protein, 480 aa, Photobacterium profundum
MSSSVETSSKKHNLSYIIRICCIAALGGILLGYDTAVISGAIGPIREYFNLTAAQTGWAVSSVVLGSIIGAISSGWCALKYGRRKALFLAALLFIISAIGSALAATFTIYVLFRIVGGIAVGLACVVSPMYMSEVAPKDFRGRAVSMFQQSAVIGQTGVFYVNYLIAKGMSEAWLVDIGWRWMLASEVLPALLFGSLLIIIPESPRWLVLKGHLDQAKETLSRISNPEHADRVILEIQKSLVPTNASKNNKVSLRSPLLFSILVIGTFVAAAQQLTGINVIMYYTPEILNPIAGGTENALLQTTFVGVVFIFGNALGMYLIDKVGRLPLMKYGTFGCALGMTIVGYVLYTGTEGYAALFALCLYVVAYAASWGCACWTMISEIFPNSIRSRAMAIAVGAQWFTGFIVTQSFPMLNENAYLKEHFNGAFSFWVFAVLSIMCMYVVVKYVPETKGVSLEDMEKVMAEKLGKNKKRQVAEASA

SEQ ID NO: 7950 - DNA, 2181 bp, Drosophila melanogaster
  CDS (549)..(2015)
tcatttccaacttccatgcggcgtgtttcgggtttatttttcgtctaggtgtaaacatttctaattagtgttgtgtttggtgcagtagttcttccttccaatctttgttatcagtcgcgtagtgctaatcgactctatctcaagtgcgctggtaccgtaaaaggtctccgttctttttttggccaatcacttgtatcaataaataattaggggctatcgctccgtgtttatttcgagacataatttaattccagaaagcagtgaggcggcacataagagctctccggtgctcggcaaacgacaaaactaatttatggcattaaaaatgcatattttctagcagtgcgtcgacagtttttatcatttgccagaaaggcaaaaggcgctatccaccagcagctgtgccagaaaaggaagctaggaagacacgtcggtcgagaattggatttgactgcggaggattttgaatccgagtccgaaagttctttagtcagcaaccgaagaagcgtaggataattcacatttttctcacggcaactggcaacgaaatggctttcctatgtgcaccgggtctcaccttcttcctcacctactcgattttctcggcggtgctgggcatgctgcaattcggctacaacaccggcgtcatcaacgcgcccgaaaagaatatcgagaacttcatgaaggacgtctacaaggaccgctacggcgaggacatcagcgaggagttcatccagcagctctactcggtggcggtatccattttcgccatcggcggcatgctgggcggtttcagcggaggctggatggccaaccgctttggcagaaaaggcggcctactgttgaacaatgtgctcggaattgccggcgcctgtttgatgggatttaccaaagttagtcattcctatgaaatgttattccttggccgatttataattggtgttaattgcggcctcaacacttcgctggtgcccatgtacatctcggagatagcgccactgaatctgcgcggtggcttaggaactgttaatcaattggctgtgactgtaggtttactattatcccaagtgctgggcatcgagcaaatcctcggcaccaacgagggctggcccatcctcctgggcctggccatctgcccggcgatcctgcagctgatcctgctgcccgtctgcccggaatcgcccagatatctgctcattaccaagcagtgggaggaggaggcgcgaaaagccctgcgccgactgcgagcctctgggtccgtggaggaggacatcgaggagatgcgggccgaggagcgcgcccagcagtccgagagccacatatcgaccatggagctgatatgctcgcccaccctgcgccctccgctgatcatcggcatcgtgatgcagctgagccagcaattcagcggcatcaacgccgtcttctactattccacgtcgctgttcatgagctcgggattgactgaggagagcgccaagttcgctacgataggcatcggcgccataatggttgttatgacgctcgtgtccattccgctaatggatcgcacgggtcgccggaccctgcatctctatggtctgggcggaatgttcatcttctcaatcttcatcaccatttcgttcctgatcaaggagttctttggttatgtgcaggaaatgatcgactggatgtcctacctctctgtggtggccactctcggattcgtcgtcttctttgcggtgggacccggttcgataccctggatgattaccgcggagctcttctcccagggaccccggcccagtgccatggctattgcggtgctggtcaactggatggccaactttgtggtcggcattggtttccccagcatgaagactgccctggagaactacacgttcttgccgttcagcgtattcctggccatcttctggatattcacgtacaagaaggtgcccgagacgaagaacaagacgttcgaggagatcctggccctcttccggcacaacaatggcaggtatgtgtccttgcactagctcattctacgctcaaattctgcacacaaatcatggcaatatgtcgaatagttatccagctcataacttaaactcaactttcttaactgacacaagaaatgcgaactataaatactataaaatacaatacagaatctttgtaaaaaaaaaaaaaaaaaaaaaaaaa

SEQ ID NO: 7951 - protein, 488 aa, Drosophila melanogaster
MAFLCAPGLTFFLTYSIFSAVLGMLQFGYNTGVINAPEKNIENFMKDVYKDRYGEDISEEFIQQLYSVAVSIFAIGGMLGGFSGGWMANRFGRKGGLLLNNVLGIAGACLMGFTKVSHSYEMLFLGRFIIGVNCGLNTSLVPMYISEIAPLNLRGGLGTVNQLAVTVGLLLSQVLGIEQILGTNEGWPILLGLAICPAILQLILLPVCPESPRYLLITKQWEEEARKALRRLRASGSVEEDIEEMRAEERAQQSESHISTMELICSPTLRPPLIIGIVMQLSQQFSGINAVFYYSTSLFMSSGLTEESAKFATIGIGAIMVVMTLVSIPLMDRTGRRTLHLYGLGGMFIFSIFITISFLIKEFFGYVQEMIDWMSYLSVVATLGFVVFFAVGPGSIPWMITAELFSQGPRPSAMAIAVLVNWMANFVVGIGFPSMKTALENYTFLPFSVFLAIFWIFTYKKVPETKNKTFEEILALFRHNNGRYVSLH

SEQ ID NO: 7952 - DNA, 2536 bp, Pichia angusta
  CDS (578)..(2203)
gatctctcgtgaaaactctgcgtgatggtgggacgtgtattgtttggaaattcatattcagccattattaatgggcaaacggagtaaatcctgacgtggactacctcaagtggaaattccaaaaatttttgcattgttctatttgctgcacaagcaccccatgatgtagcgtgcacaatagaccacgggctgtttttagaacaacaacaatacggtcactctcgcgactggggaaatgtggggccggccgtgcacggcgttgaaagggtctttatccgagaaatagtcttccaggcgagaaagaagagtgtagtaagacctgttgcaaacttggccatgatgaacagtacgacccacacaggaccgtaagtgaggactatcctgatgtttttacccttcccgttccaaatatttttccattgccttgctgcatgcagcacaacaaaagtccagatttttctccccaccttttctcaaaaaaacctggggggctattggacatccattgtttacccttggtataaatacgtgttgtatccccagcaatttctcccgtatccaatcaactattacaaacatggctggcgacagtattactggtgtggcaggaactgctgacgttaacagagtcgaggctcccttgactgtgagagcttatcttatgtgcgcctttggtgcgtttggaggtatccttttcggatacgactccggttacatttccggtgtcatgggtatggactactttatccatgaattcactggaaaggtgaaacacggcgacgatgactcctcttttgtcgttggatcgtctcaaaaatctcttattacttctattctttctgcaggtaccttttttggtgctgtgtgtgccggagacttggccgacatgtttggaagaagaaccattattgtgaccggctgcagtatctactcggtcggtgttgcgctccaggttgcctccaccacggtggctctgctttccgtaggaagagttatagcaggtgttggtgttggttttgtttcgtccgtggtggttttgtatctgtctgaaatttctccaaagaaaatcagaggtgccatcgtttccggttaccagttcttcgtcaccatcggattgctgctcgcgtcctgtgttgactacggcaccgagcacagaaacgactccggctcctacagaatccctattgctctgcaactcatctgggccatcattcttgctgtcggactcatcttgctcccagaatctcctagatactacgtcctcaagggcaagtttgacagggctgcaaaggtgctctccagacttaggggccagcctatcgattccgactacattcaagaagaactcgccgagatcgtggccaaccacgagtacgagaggagcgtcattccaactacgagctactggcaatcctgggcagcttgtttcaccggaggactcagaagaccatcctcgaacctcagaaagaccatcctcggaacctccatgcagatgatgcagcaatggaccggtgtcaacttcatcttctacttcggtaccaccttcttccagcagcttggcaccatccacaatgagttcctgatctcgatgatcactacgatcgtcaatgtggcctcaactcctctgtccttctacacgatcgagaaattcggtcgtcgtgcgctcatgatctacggtgcagcaggtatggttgtgtgtcagtttatcgtggccattggtggtaccgttgatggcgacaatcagaaaaccgtcagcgccatgatcgccttcatctgcatctacattttcttctttgcttcgacctggggtccgggagcttgggttattatcggagagatcttcccattgccaatcagatcgagaggtgttggtctgtcgaccgcctccaactggttgtggaactgtatcattgccgttatcactccttacatggttgacggcgataagggcaatttgggtgctaaggtgttcttcatctggggctcgctatgtggttgctgtcttctttatgccattatgctgatcccagaaaccaagggcctgactttggagcaagtcgacaagatgcttgaggagaccaccccatggacctctgccaaatggaaacctcactccaccttcgctgccgagatgggtcttgccaaggacgacaagggcgtcacccacgagctcaaggagcacgccagcgttgagagtgtataggcgtttagtatgtatactacggctaatatgacattatgagcgatccgaagagggcggggcacgagagtgccagatacactgtattgcggactctcgggaatggtgccgaatcgatggtgtatttttgtgctctgcaacggtgaattttcggtgagtagttgacctttttttacggccaaatacagattgatcttctcatctcgacatttgcatggtgttcaagcagtcgtagctgatttcaagctgcagcatgtgaggtctaaaacagttttgccaggccgtcgctgttggcctccctgtataatgtccggtcatccaaacgttaaaggttgc

SEQ ID NO: 7953 - protein, 541 aa, Pichia angusta
MAGDSITGVAGTADVNRVEAPLTVRAYLMCAFGAFGGILFGYDSGYISGVMGMDYFIHEFTGKVKHGDDDSSFVVGSSQKSLITSILSAGTFFGAVCAGDLADMFGRRTIIVTGCSIYSVGVALQVASTTVALLSVGRVIAGVGVGFVSSVVVLYLSEISPKKIRGAIVSGYQFFVTIGLLLASCVDYGTEHRNDSGSYRIPIALQLIWAIILAVGLILLPESPRYYVLKGKFDRAAKVLSRLRGQPIDSDYIQEELAEIVANHEYERSVIPTTSYWQSWAACFTGGLRRPSSNLRKTILGTSMQMMQQWTGVNFIFYFGTTFFQQLGTIHNEFLISMITTIVNVASTPLSFYTIEKFGRRALMIYGAAGMVVCQFIVAIGGTVDGDNQKTVSAMIAFICIYIFFFASTWGPGAWVIIGEIFPLPIRSRGVGLSTASNWLWNCIIAVITPYMVDGDKGNLGAKVFFIWGSLCGCCLLYAIMLIPETKGLTLEQVDKMLEETTPWTSAKWKPHSTFAAEMGLAKDDKGVTHELKEHASVESV

SEQ ID NO: 7954 - DNA, 1544 bp, Bos taurus
  CDS (12)..(1541)
cctaagacaagatgccgtcgggcttccaacagatcggctctgaagatggggagccccctcggcagcgagtcactgggaccttggtccttgccgtattctccgctgttcttggctccctgcagtttggctacaacattggggtcatcaatgccccccagaaggtgattgaacagagctacaatgagacctggctggggaggcaggggcctgagggacccggctccatcccaccaggcacactcaccacactctgggctctctccgtggccatcttctctgtgggtggcatgatctcatccttcctgattggcatcatctctcagtggctgggaaggaagagggccatgctgttcaacaacgccctggcagtgctggggggcaccctcatgggcctggccaaggcagctgcctcctatgagatgctcattcttggacggttcttcattggcgcctactcagggctgacgtcggggctggtacccatgtacgtgggggagattgcccctactcacctgcggggcgccctggggacactcaatcaactagccatcgtcactggcatcctaatcgcccaggtgctaggtttggagtccatgctgggcacagccaccttatggccactcctcctgggcatcaccgtgctgcctgccctcctgcagatggtcctgctgcccctctgcccggaaagcccccgctacctctacatcatccggaacctggaggggcccgccagaaagagtctgaagcgcctgacgggctgggccgacgtgtctgaggtgttggctgagctgaaggaggagaagcggaagctggagcgtgagcggcccctgtccttgctccagctcctgggcagccacacccatcggcagcccctcgtcatcgccattatgctgcagctgagccagcagctctcaggcatcaatgcggttttctattattccaccagcatctttgagtcagcgggggtagagaaaccagcctatgccaccattggagccggcgtggtcaacacagtcttcaccttagtctcggtgttcttggtggaacgggctgggcgccggaccctccatctcctgggcctggcaggcatgtgtggctgcgccatcttgatgactgtggctctgcttctgctggagcgggttccagccatgagctatgtctccattgtggccatctttggcttcgtggccttctttgaaattggccctggccccatcccctggttcatcgtggccgagctcttcagccagggaccccgcccagcggccatggcagtggctgggttctccaactggacatgcaacttcatcatcggcatgggtttccagtatgtggcggatgctatgggtccctacgtctttcttctattcgcggtcctcctgcttggcttcttcatcttcaccttcttaaaagtgcctgaaacccgtggcaggacgtttgaccagatctcagccgttttccaccggacaccttctcttctggagcaggaagtgaaacccagcacagaactggagtacttagggccagatgagcatgactgaggg

SEQ ID NO: 7955 - protein, 509 aa, Bos taurus
MPSGFQQIGSEDGEPPRQRVTGTLVLAVFSAVLGSLQFGYNIGVINAPQKVIEQSYNETWLGRQGPEGPGSIPPGTLTTLWALSVAIFSVGGMISSFLIGIISQWLGRKRAMLFNNALAVLGGTLMGLAKAAASYEMLILGRFFIGAYSGLTSGLVPMYVGEIAPTHLRGALGTLNQLAIVTGILIAQVLGLESMLGTATLWPLLLGITVLPALLQMVLLPLCPESPRYLYIIRNLEGPARKSLKRLTGWADVSEVLAELKEEKRKLERERPLSLLQLLGSHTHRQPLVIAIMLQLSQQLSGINAVFYYSTSIFESAGVEKPAYATIGAGVVNTVFTLVSVFLVERAGRRTLHLLGLAGMCGCAILMTVALLLLERVPAMSYVSIVAIFGFVAFFEIGPGPIPWFIVAELFSQGPRPAAMAVAGFSNWTCNFIIGMGFQYVADAMGPYVFLLFAVLLLGFFIFTFLKVPETRGRTFDQISAVFHRTPSLLEQEVKPSTELEYLGPDEHD

SEQ ID NO: 7956 - DNA, 1590 bp, Oryza sativa
  CDS (1)..(1590)
atggccggcggcgtggtggtgaacaacggaggggggaaggactaccccgggaagctcaccatgttcgtcctcttcgcctgcatcgtcgcagccaccggcggcctcatcttcggatatgacatcggcatctccgggggtgtgacgtcgatgaacccgttcctgatcaagttcttcccgtcggtgtaccggaaggagcaggcggcggagaagaaccagagcaaccagtactgcaagttcgacagcccgctgctgaccatgttcacctcgtcgctctacctcgccgcgctcgtcgcctccttcttcgcgtccaccgtcacccgcgtcgcggggcgcaagtggtccatgttcggcggcggcgtcaccttcctcgtcggcgccgcgctcaacggcgccgccaagaacgtgctcatgctcatcctcggccgcgtcctcctcggtgtcggcgtcggcttcgccaaccagtctgtgccgctgtacctgtcggagatggcgccggcgaggctgcgcgggatgctcaacatcgggttccagctgatgatcaccattggcatcctgtgcgccaacctgatcaactacgggactgccaagatcaagggcgggtgggggtggcgcgtgagcctggcgctggcggcggtgccggcggcgatcatcgccgtgggcgcgctcttcctccctgacacgcccaactccctcatcgaccgcggccacaccgacgccgccaagcgcatgctccggcgcgtgcgcggcaccgacgacatcgaggaggagtacaacgacctggtggccgccagcgaggagtccaagctcgtggcgcacccgtggcggaacatcctccagcgccggtacaggccgcagctgaccatggccatcgccatcccgctgttccagcagctgacggggatcaacgtcatcatgttctacgcgccggtgctgttcaagacgctgggattcgccgacgacgcgtccctcatgtccgccgtgatcaccggcctcgtgaacgtcttcgccaccttcgtgtccatcgtgaccgtcgaccgcctcggccgccggaagctgttcctccagggcgggacgcagatgctggcgtgccagatcgtcgtcggaggcctcatcggcgccgagttcgggttctccggcgtggccgacatccccaaggcatacgcggcgttcgtggtgctcttcatctgcgcctacgtcgccgggttcgcgtggtcgtgggggcccctgggctggctcgtccccagcgagatcttcccgctggagatcaggtcggcggggcagagcatcaacgtgtcggtgaacatgctcttcaccttcatcatcgcgcaggcgttcctccccatgctctgccgcttcaagttcatcctcttcttcttcggcgcgtgggtggtgatcatgacgctgttcgtcgccttcttcctgccggagaccaagaacgtgcccatcgaggagatggtgctcgtctggaagtcgcactggtactggggcaggttcatccgcgacgaggacgtgcacgtcggcgccgatgtcgagatgcccgccgccggcaaccgcaacggcaaggtcgacccggccaagctcgccaactga

SEQ ID NO: 7957 - protein, 529 aa, Oryza sativa
MAGGVVVNNGGGKDYPGKLTMFVLFACIVAATGGLIFGYDIGISGGVTSMNPFLIKFFPSVYRKEQAAEKNQSNQYCKFDSPLLTMFTSSLYLAALVASFFASTVTRVAGRKWSMFGGGVTFLVGAALNGAAKNVLMLILGRVLLGVGVGFANQSVPLYLSEMAPARLRGMLNIGFQLMITIGILCANLINYGTAKIKGGWGWRVSLALAAVPAAIIAVGALFLPDTPNSLIDRGHTDAAKRMLRRVRGTDDIEEEYNDLVAASEESKLVAHPWRNILQRRYRPQLTMAIAIPLFQQLTGINVIMFYAPVLFKTLGFADDASLMSAVITGLVNVFATFVSIVTVDRLGRRKLFLQGGTQMLACQIVVGGLIGAEFGFSGVADIPKAYAAFVVLFICAYVAGFAWSWGPLGWLVPSEIFPLEIRSAGQSINVSVNMLFTFIIAQAFLPMLCRFKFILFFFGAWVVIMTLFVAFFLPETKNVPIEEMVLVWKSHWYWGRFIRDEDVHVGADVEMPAAGNRNGKVDPAKLAN

SEQ ID NO: 7958 - DNA, 1548 bp, Oryza sativa
  CDS (1)..(1548)
atggcgggagggttctctgtgtcggggtccggggtggagttcgaggcgaagatcacgccgatcgtcatcatctcctgcatcatggcggccaccggcggcctcatgttcggctacgacgtcggtatctcaggcggagtgacatcgatggatgacttcctgcgcgagttcttcccgacggtgctgaagaagaagcacgaggacaaggagagcaactactgcaagtatgacaaccagggcctgcagctgttcacctcgtcgctgtacctcgccggcctcacggccaccttcttcgcctcctacaccactcgccggctcggccgccgcctcaccatgctcatcgccggcgtcttcttcatcgtcggcgtcatcttcaacggcgccgcccagaacctcgccatgctcatagtcggcaggatcctgctcggctgtggcgtcggctttgccaaccaggccgttccattgttcctgtcggagatcgcgccgacgaggatccgcggcgggctcaacatcctcttccagctcaacgtcaccatcggcatcctcttcgccaacctcgtcaactacggcaccgccaagatccacccgtggggatggcggctgtcgctgtcgctggccggcatcccggcggcgctgctgacgctgggcgcgctgttcgtggtggacacgcccaacagcctgatcgagcgcgggaggctggaggaagggaaggcggtgctgaggaagatccgggggacggacaacgtggagccggagttcaacgagatcgtggaggcgagccgcgtggcgcaggaggtgaagcacccgttccgcaacctgctccagcgccggaaccggccgcagctggtgatcgccgtgctgctgcaaatattccagcagttcacgggcatcaacgccatcatgttctacgcgcccgtgctgttcaacacgctcgggttcaagaccgacgcgtcgctctactccgcggtgatcacgggggccgtgaacgtgctgtccacgctggtgtccgtctactcggcggacagggtggggaggcggatgctgctgctggaggccggcgtgcagatgttcctgtcgcaggtggccatcgccgtcgtgctggggatcaaggtgacggaccggtcggacaacctcggccacgggtgggcgatcatggtggtggtgatggtgtgcacgttcgtgtcctccttcgcgtggtcgtggggcccgctcgggtggctcatccccagcgagacgttcccgctggagacgcggtcggcggggcagagcgtcaccgtgtgcgtcaacctgctcttcaccttcgtcatcgcgcaggcgttcctctccatgctctgccacctcaagtacgccatcttcgccttcttctccgcgtgggtcgtcgtcatgtcgctcttcgtgctcttcttcctgcccgagaccaagaacatccccatcgaggagatgaccgagagggtgtggaagcagcactggttctggaagcgcttcatggacgacgccgacaaacaccacgtcgtccccaatggcgggaagagcaacggcgccaccgtttaa

SEQ ID NO: 7959 - protein, 515 aa, Oryza sativa
MAGGFSVSGSGVEFEAKITPIVIISCIMAATGGLMFGYDVGISGGVTSMDDFLREFFPTVLKKKHEDKESNYCKYDNQGLQLFTSSLYLAGLTATFFASYTTRRLGRRLTMLIAGVFFIVGVIFNGAAQNLAMLIVGRILLGCGVGFANQAVPLFLSEIAPTRIRGGLNILFQLNVTIGILFANLVNYGTAKIHPWGWRLSLSLAGIPAALLTLGALFVVDTPNSLIERGRLEEGKAVLRKIRGTDNVEPEFNEIVEASRVAQEVKHPFRNLLQRRNRPQLVIAVLLQIFQQFTGINAIMFYAPVLFNTLGFKTDASLYSAVITGAVNVLSTLVSVYSADRVGRRMLLLEAGVQMFLSQVAIAVVLGIKVTDRSDNLGHGWAIMVVVMVCTFVSSFAWSWGPLGWLIPSETFPLETRSAGQSVTVCVNLLFTFVIAQAFLSMLCHLKYAIFAFFSAWVVVMSLFVLFFLPETKNIPIEEMTERVWKQHWFWKRFMDDADKHHVVPNGGKSNGATV

SEQ ID NO: 7960 - DNA, 2355 bp, Oryctolagus cuniculus
  CDS (1)..(1530)
atgccgtcgggcttccaacagatcggctccgaagatggggaacccccccagcagcgggtcaccggaaccctggtcctcgccgtgttctcagccgtgcttgggtccctgcagtttggctacaacattggggtcatcaatgccccgcagaaggtgatcgagcagagctacaatgagacctggctcgggaggcaggggcccgagggacccggctccatcccgcccggcaccctcaccacactctgggccctctctgtggccatcttctccgtgggcggcatgatttcctccttcctcatcggcatcatctcccagtggctgggaaggaagagggcgatgctggccaacaacgtcctggccgtgctggggggcaccctcatgggcctggccaacgctgctgcctcctatgagatgctcatccttggacggttcctcattggcgcctactcagggctgacatcagggcttgtgcccatgtacgtgggggagattgcccccactcacctgcgaggtgccttggggacgctcaaccagctggccatcgtcattggcattctgatcgcccaggtgctgggcttggaatccatgctgggcaccgccaccctgtggccgctgctcctgggcatcacggtgctccctgccctcctgcagctgatcctgctgcccttctgccccgagagcccccgctatctctacatcatccggaacctggaggggccggccagaaagagtctgaagcgcctgacaggctgggccgacgtgtctggagccctggcagagctgaaagatgagaagcggaagctggagcgtgagcggccactgtccctgccccaactcctgggcagccgcacccaccggcagcccctcatcattgccgtggtgctgcagctgagccagcagctctcaggcatcaatgctgttttctattattcgaccagcatcttcgagacagcaggggtagggcagcccgcctatgccaccataggagctggagtggtcaacacagtgttcaccctggtctcggtgttcttggtggaacgggctgggcgccggacactccacctcctgggcctggcgggcatgtgtggctgtgccatcttgatgaacgtggctctgcttctgctggagcgggttccagccatgagctacgtttccatcgtggccatcttcggctttgtggcgttctttgagatcggccctggccccatcccctggttcatcgtggccgagctcttcagccaggggccccgccctgcagccatggctgtggctgggttctccaactggacgtgcaacttcatcatcggcatgggattccagtacgttgcggatgcaatggggccctacgtcttcctcctctttgccgtcctcctgctgggcttcttcatcttcaccttcttaagagtacctgaaacccgaggccggaccttcgaccagatctcagctgccttccgccggacgccgtctctcttagagcaggaggtgaagcccagcacggaacttgagtacttggggccagatgagaatgactgagccaggcaggggtggggggaacccgccctccccgcccaccgggaccctcctttcctccgcagcactttaaccccctcctcccggttcctgccagggcggacagacttcccctgcagcctggtggacctgggaggcaggagggaaggggcagtctgagcgcccctcattcccctcgcgtgactcttgggttatttatgtgtgtggttaggctgtggccagcagcgtggcccactctcccctcctgtcttcctccctagcccagccccttcctgcccaccccctacccctccccgaccctgccttctggctagagaagagggattggagggagtgggacaaactgaggcggagagcagctggggagcagaagtcacgttccccaccggccgccagcgggcactttcactggattcttgccacatggactccgggtgaagggagttctgtctcagccctccagggcaaaggatgcacccttgcttctcactgcaggctcagcctcgcggggcgagagggaatgcgaaagcacatgcccatatgtggcgagaggaaggggccctaccccggttgctcgccaaggctgccaagtgggggctccggcgctgtcctctgctcccctcctggaagggtgctgcacccacaggctcttgaccaactagggaaaggggttggaaaggctgcccgtgaacactgggctaggaggagccgtcagatatttttgtatatatttgaagaaggggtagggaggagcagccaaggtctgctgtactaaatgtgtctatagagctgcttctataaagtgactgtataaaaaaaaaaaaaaaa

SEQ ID NO: 7961 - protein, 509 aa, Oryctolagus cuniculus
MPSGFQQIGSEDGEPPQQRVTGTLVLAVFSAVLGSLQFGYNIGVINAPQKVIEQSYNETWLGRQGPEGPGSIPPGTLTTLWALSVAIFSVGGMISSFLIGIISQWLGRKRAMLANNVLAVLGGTLMGLANAAASYEMLILGRFLIGAYSGLTSGLVPMYVGEIAPTHLRGALGTLNQLAIVIGILIAQVLGLESMLGTATLWPLLLGITVLPALLQLILLPFCPESPRYLYIIRNLEGPARKSLKRLTGWADVSGALAELKDEKRKLERERPLSLPQLLGSRTHRQPLIIAVVLQLSQQLSGINAVFYYSTSIFETAGVGQPAYATIGAGVVNTVFTLVSVFLVERAGRRTLHLLGLAGMCGCAILMNVALLLLERVPAMSYVSIVAIFGFVAFFEIGPGPIPWFIVAELFSQGPRPAAMAVAGFSNWTCNFIIGMGFQYVADAMGPYVFLLFAVLLLGFFIFTFLRVPETRGRTFDQISAAFRRTPSLLEQEVKPSTELEYLGPDEND

SEQ ID NO: 7962 - DNA, 2073 bp, Bos taurus
  CDS (96)..(1532)
ggttgccctggctgaaacgccggtgctggccgcactcgcgggacccgtggcagttcaaggcgtcagagccctaaaagcaagcgttgatcgcggacatgacgcctgaggaccaagaggagacccagccgctcctacggccgcccggcggcagcgctccccgcggccgccgcgtcttcctcgctgccttcgccgctgccctgggaccgctcagcttcggcttcgccctcggctacagctccccggccatcccgagcctgaggcgcgccgcgcccccggccccgcacctcgacgaagacgcagcctcctggttcggggccatcgtgaccctgggcgccgcggccgggggcgtgctgggcggctggctcctggaccgcgcggggcgcaagctgagcctagtcctctgcgccttgcccttcgtggccggcttcgccgtcatcaccgcggctcagaacctgtggatgctgctcggaggccgcctgctcaccggcctggcctgcggcattgcctcgctcgtggccccggtctatatctctgaaattgcctaccctgaggtgcgagggctgctcggctcctgtgtgcagctgatggtagtcacaggcatcctcctagcctacctggcaggctgggtgctcgagtggcgctggctggccgtgctgggctgtgtgcccccctccttcatgctgctgctcatgtgtttcatgcctgagacccctcgcttcctgctgtctcagcacaagcaccaggaggccatggccgccatgcagttcctgtggggctatgcccagggttgggaggagcctccccttggggctcagcaccaggacttccacgtggcccagctgcggcgtcctggtgtctacaagcccttcatcatcggcatctccctgatggccttccagcagctgtcaggcgtcaatgccgtcatgttctacgcggagaccatctttgaggaggctaagttcaaggacagcagcctggcctcagtcgtcgtgggcgtcatccaggtgctgttcactgccacggcggccctgatcatggacagagctgggcgaaggctgctcttgaccttgtcaggtgtggtcatggtgttcagcaccagcgcctttggtacctacttcaagctgaccgagggcggccccagcaactcctcccacgtggacctcccggcgctcgtctccatggaggccgccgataccaacgtggggctggcctggctggcggtgggcagcatgtgcctcttcatcgccggcttcgctgtgggctgggggcccatcccgtggctcctcatgtctgagatcttccctctgcatgtcaagggcgtggccaccggcgtctgcgtcctcaccaactggttcatggcctttctggtgaccaaagagttcagcagtctcatggaggtgctcaggccctacggtgccttctggctggcctctgccttctgcatcttcggtgtccttttcactctggcctgtgtccctgagaccaaagggaagactttggagcaaatcacagcccattttgaggggcgatgacagcttcttcctgtgagtgactgcccgtccttgctggaccagctttcagccttggaggggatggagcctacctgtgactccaaactgagcctcagctgggagcctggaacccctggctgtccccagggagtcaggagccaggacagcagcccctcggagccttgtcctctggggtccctccctcctgcccagtgaagcgtggggacaaggttcccagctgctgggtccagtttctactgctgccctgtgatttgggagaaggaacatctcggagacgcttcactgtcctgtggtcagtcctccacatgccggctccatcatgacatgaacgtgacagcggaggaggggggctcttgggtcctgggtttcggacacgctttggcaactgggtgatggcctgtgggttctcctgtcatgtggctgcagtatcagggaggaactttgccaaataaatatttgactctgaaaaaaaaaaaaaaaaaaaaaaaaaagcctttgggggaaacccctttttgccctttaggggggtttttaaaagggg

SEQ ID NO: 7963 - protein, 478 aa, Bos taurus
MTPEDQEETQPLLRPPGGSAPRGRRVFLAAFAAALGPLSFGFALGYSSPAIPSLRRAAPPAPHLDEDAASWFGAIVTLGAAAGGVLGGWLLDRAGRKLSLVLCALPFVAGFAVITAAQNLWMLLGGRLLTGLACGIASLVAPVYISEIAYPEVRGLLGSCVQLMVVTGILLAYLAGWVLEWRWLAVLGCVPPSFMLLLMCFMPETPRFLLSQHKHQEAMAAMQFLWGYAQGWEEPPLGAQHQDFHVAQLRRPGVYKPFIIGISLMAFQQLSGVNAVMFYAETIFEEAKFKDSSLASVVVGVIQVLFTATAALIMDRAGRRLLLTLSGVVMVFSTSAFGTYFKLTEGGPSNSSHVDLPALVSMEAADTNVGLAWLAVGSMCLFIAGFAVGWGPIPWLLMSEIFPLHVKGVATGVCVLTNWFMAFLVTKEFSSLMEVLRPYGAFWLASAFCIFGVLFTLACVPETKGKTLEQITAHFEGR

SEQ ID NO: 7964 - DNA, 1560 bp, Oryza sativa
  CDS (1)..(1560)
atggcgggcggcgcgatggtccagacggtgggtggcaagacgtacccggggaagatgaccgcgttcgtgttcttcacctgcctcgtcgcctcctccggcggcctcatcttcggctacgacatcggcatctccggcggcgtcacctccatggactccttcctcagcgagttcttcccgtcggtgtacgcgcaggcgaaggcgagcaaggacaccaaccagtactgcaagttcgacagccagctgctgacgctcttcacctcgtcgctgtacctggcggcgctggcgacgtcgttcgtggcggcgtgggtcacccgggtgttcggccggaagtggtccatgttctgcggcggcgtcaccttcctcgccggctcggcgctcaacggcgccgccaccgacgtcatgatgctcatcctcggccgcatcctcctcggcatcggcgtcggcttcgccaaccagtccgtgccgctctacctgtcggagatggcgccggcgaacctccgcgggatgctcaacatcggcttccagctcatgaccaccatcggcatcctctccgccaacctcatcaactacgcgacgtcgagcatcgagggcgggtgggggtggcgcatcggcctcggcctcgccggcgtgcccgcgctcatcatcacgctcggcgcgctcgtcctcccggacaccccaaactccctcatcgcccgcggctacgccggcgacgccaagcgcgtcctcgtcaagatccgcggcacggacgacgtccacgacgagtacgacgacatggtagcggcaagcgaagaagccgcctcgatcgagcacccatggcggaacatcctccatcgcaagtaccgcccgcagctcaccatcgccatcctcatcccgtgcttccaacagctcaccggcatcaacgtgatcatgttctacgcgccggtgctcttcctcaccatcggcttcgccggcgacgcgtcgctcatgtccgccgtgatcacgggcctcgtcaacatgttcgccaccgtcgtctcgatcatctccgtggaccgcctcggccgccgcgtgctgttcctccagggcggcacgcagatgttcatctcccaggtggtggtcgggacgctgatcgcgctccagttcggcgtcgcgggcgtcggcgagatgtcgcggtcgtacgccatcttgctcgtgctgttcatctgcatgtacgtggccgggttcgcgtggtcgtgggggcccctggggtggctggtgccgagcgaggtgttcgcgctggagatcaggtcggcggggcagagcatcgcggtgtgcgtcaacatgatgctgacgttcgtcatcgggcaggcgttcctcaccatgctgtgccacctcaagttcggcctcttctacttcttcgccgggtggatgctggtcatgaccaccttcgtcgcgctcttcctgccggagacgaagggggtgcccatcgaggagatgaaccacgtctggagccggcactggttctggggcagctacgtcaccgcccacgacgtcgccggcgccggcgccggaggaggaggaaaccgcagaagccacaacgtctag

SEQ ID NO: 7965 - protein, 519 aa, Oryza sativa
MAGGAMVQTVGGKTYPGKMTAFVFFTCLVASSGGLIFGYDIGISGGVTSMDSFLSEFFPSVYAQAKASKDTNQYCKFDSQLLTLFTSSLYLAALATSFVAAWVTRVFGRKWSMFCGGVTFLAGSALNGAATDVMMLILGRILLGIGVGFANQSVPLYLSEMAPANLRGMLNIGFQLMTTIGILSANLINYATSSIEGGWGWRIGLGLAGVPALIITLGALVLPDTPNSLIARGYAGDAKRVLVKIRGTDDVHDEYDDMVAASEEAASIEHPWRNILHRKYRPQLTIAILIPCFQQLTGINVIMFYAPVLFLTIGFAGDASLMSAVITGLVNMFATVVSIISVDRLGRRVLFLQGGTQMFISQVVVGTLIALQFGVAGVGEMSRSYAILLVLFICMYVAGFAWSWGPLGWLVPSEVFALEIRSAGQSIAVCVNMMLTFVIGQAFLTMLCHLKFGLFYFFAGWMLVMTTFVALFLPETKGVPIEEMNHVWSRHWFWGSYVTAHDVAGAGAGGGGNRRSHNV

SEQ ID NO: 7966 - DNA, 1891 bp, Plantago major; identical to SEQ ID NO: 369
  CDS (146)..(1738)

SEQ ID NO: 7967 - protein, 530 aa, Plantago major; identical to SEQ ID NO: 370

SEQ ID NO: 7968 - DNA, 1987 bp, Plantago major; identical to SEQ ID NO: 371
  CDS (116)..(1705)

SEQ ID NO: 7969 - protein, 529 aa, Plantago major; identical to SEQ ID NO: 372

SEQ ID NO: 7970 - DNA, 1407 bp, Bacillus cereus
  CDS (1)..(1407)
atgaagcaaaaacgaaactcactgtatattttttctattacattagtagctgcaattggaggtttattgtttggttatgatacagctgtaatatctggagcggaagaatcattgaaagtttacttcattgacagccttggattaggttccttagcacatggagttactgtatcaagtgcattaataggatgtattattggaggggtaatatccggctactgtgcttcaaaattcggtcgtaaaagatcacttataattgcagcaatactctttatcgtatcggcgctaggtgcatcttatcctgaatttttattttttacaaagggtgaaccaacaatcgttttgttactagcttttaacctttatcgaatcataggtggaattggcgttggattggcttcagctatttgtccgatatatataggggaaattgctccagctgatattcgtggtaggttagtgtcatttaatcaatttatgattatttttggtatgttagtggtttattttgttaactggggtattgcgaatggagaaacactagaatggataaatgatgtgggctggaggtacatgtttgcgtcaggggtaattccagctataatattcgctatacttttgttatttgtacctgaaacacctcgatatctagcgatacagcatcaggacaaaaaggctctggctatacttacaaagattaatggtcctttagaagctaaagctattttagatgatattaaacaaactatggctataaatgtttcctcagaaaagttattctcttatggaaaattagttattattgtcggagtgttactttctgtatttcaacagtttgtaggcataaatgttgccttatattatgctccccgcatttttgaaagtatgggagcagctaaagattcctctatgatgcaaaccattattatgggattagtaaacgttatatttacagttatcgctattttaacagttgatagatggggaagaaaaccattattaatagtgggttctattggtatggcaattggaatgtttggtgtagcaagcatggcttttgctaatatcattggaattggtactctcatatttattattgtctatacagcttcatttatgatgtcatgggggccgatttgttgggtattaatttcagaaattttccctaataaaatccgtgggcaagctgtagccattgcagtagctgctcaatgggcggctaactatttcatttcatctacatacccaatgatgatggaatatagcgggggactaacatatagtttttatggtttaatgagtgtactttctgccttatttgtctggaagttagttcctgaaacgaaaggtaaaactcttgaacagatggagaatacgtggaaaaaacaaactgaatatataagttaa

SEQ ID NO: 7971 - protein, 468 aa, Bacillus cereus
MKQKRNSLYIFSITLVAAIGGLLFGYDTAVISGAEESLKVYFIDSLGLGSLAHGVTVSSALIGCIIGGVISGYCASKFGRKRSLIIAAILFIVSALGASYPEFLFFTKGEPTIVLLLAFNLYRIIGGIGVGLASAICPIYIGEIAPADIRGRLVSFNQFMIIFGMLVVYFVNWGIANGETLEWINDVGWRYMFASGVIPAIIFAILLLFVPETPRYLAIQHQDKKALAILTKINGPLEAKAILDDIKQTMAINVSSEKLFSYGKLVIIVGVLLSVFQQFVGINVALYYAPRIFESMGAAKDSSMMQTIIMGLVNVIFTVIAILTVDRWGRKPLLIVGSIGMAIGMFGVASMAFANIIGIGTLIFIIVYTASFMMSWGPICWVLISEIFPNKIRGQAVAIAVAAQWAANYFISSTYPMMMEYSGGLTYSFYGLMSVLSALFVWKLVPETKGKTLEQMENTWKKQTEYIS

SEQ ID NO: 7972 - DNA, 1431 bp, Mycobacterium paratuberculosis
  CDS (1)..(1431)
atgcgcgacgacgactcggcaaaccggtggtcaggggtccgcgaggctccgaccgcgccgagtcggcaactgacgggtgccgtggtgatcatcgcgctggtcgccgcgatctcgggcatgctttacggctacgacaccggcgtcatctcctgggccctgctgcagctcacgcaggacttcaacatcaccgagggctggcagcaggtgatcgccgccagcatcctgctcggcgccgtcgccggggcgctgacgtgcagctggctctccgacctgcgcggccggcgcggcacgctgttgatgctggcggtggtgttcatcgtcggcgcgttgtggtgcgccgacgccgcagattccgtgatgctgtcgctgggccggctggtgctggggttcgcggtcgggggcgcgacgcagacggcaccgatgtatgtcgccgagctggcgccgccggcctaccggggacggttggtgctgtgcttccagatcgccattggggtgggcatcctcaccgccaccctggtcggggccggcggctcgatctcttggcgggggccgatcggcctcgcctgcgtgcccgcggcgatcatgctgtggctgctgctgcgcctcccggaaagtccgcgctggctggtcaaaaaggacaaccgagacgccgcccgcgccgtgctggaacacgtccggcccgagggctacgacgtggccgccgagctggatgaggccaccgaactcgcccgcgtagaacgcacggccgccacccgcgggtggcgcgggctgcgcgacgcctgggttcgcccggccctggtcctcggttgcggcatcgcggtgttcacccagctcagcggcatcgagatgatcatctactactcgccgaccatcctgaccgacgacggcgtgtaccggtccgtggcgctgcaggtgtcggtgtgtctgggcgcggcgtacctgatcgcccaactggtcgggctggccatcatcgaccgggtcggccggcgccggctcaccctcatcatggtgccgggcgcggcggtcagcctgttcgcgctgggcctgctgttcatcaccagcgacagcggtcgcgacgtgatcccctacatcatgatctgcctgatcgccttcatgctgttcaacggtggcggcctgcagttgatgggctggctgaccggctcggagacctatccgctggcggtgcgaccggcggccaccgccctgcagtcggccaccctgtgggggaccaacctggtgatcaccttgacgatgctgtcgctgatcaaggcgatcggggtcggccccttgatgtggctctacgcgttgttcaacgtggcggcctggatcttcgtgttcttccgcatgcccgacctcaccggcaaaacccttgaggagatcgaataccagctgtccgaggggaaattccggccgtcggacttcggccgctga

SEQ ID NO: 7973 - protein, 476 aa, Mycobacterium paratuberculosis
MRDDDSANRWSGVREAPTAPSRQLTGAVVIIALVAAISGMLYGYDTGVISWALLQLTQDFNITEGWQQVIAASILLGAVAGALTCSWLSDLRGRRGTLLMLAVVFIVGALWCADAADSVMLSLGRLVLGFAVGGATQTAPMYVAELAPPAYRGRLVLCFQIAIGVGILTATLVGAGGSISWRGPIGLACVPAAIMLWLLLRLPESPRWLVKKDNRDAARAVLEHVRPEGYDVAAELDEATELARVERTAATRGWRGLRDAWVRPALVLGCGIAVFTQLSGIEMIIYYSPTILTDDGVYRSVALQVSVCLGAAYLIAQLVGLAIIDRVGRRRLTLIMVPGAAVSLFALGLLFITSDSGRDVIPYIMICLIAFMLFNGGGLQLMGWLTGSETYPLAVRPAATALQSATLWGTNLVITLTMLSLIKAIGVGPLMWLYALFNVAAWIFVFFRMPDLTGKTLEEIEYQLSEGKFRPSDFGR

SEQ ID NO: 7974 - DNA, 1716 bp, Ashbya gossypii
  CDS (1)..(1716)
atggcacagctaaagtggggcgcggggcgcgcagacgacgggcaagacggccgggaagtggatattgaagagagatggcacgggggcgccaagccggacagcgcggacggcagccggcgcatccagatccaggcggtcaacgacgaggacgacacgtcggagctcatcacgttcaaccaggacgtgtcgtggttcatcgtgatgttgacttttgtggcatcgctctctgggtttttgttcgggtacgacaccgggtacatctccagtgcgttgcagtctgtgggcacagacctcggccaccagctcacgtaccgggacaaggagtacatcacgtcggcgacgtcgctcggcgcgctcatcgcagcgttgggtgcgggcatctgtgcggacctgttcggcaggcgaaagtgcatcatgttctccaacatcctctttgtggttggtaccgtcctccaggtggcggcgttcaacttctggcagatggtggttggccggctagtcatgggctttggtattggcttcggctcgctcatctcgcctttgttcatcagcgagattgcgcccaagatgattcgtgggcgcctcacggtgatcaactcgctttggttgactggcgggcagcttatcgcatacgcatgcggagcaggctttcagcatgtgaagcatggttggcggatacttgttggcatctcgatgttgcccgcggtgctgcagttcgtttccttcatctttttgcccgacaccccgcggttctacgtcatgaaaggcaggctggaggatgcagcaaatgtgctagaacgcacttacgtaggtgctgagcgtgccttgattgaccgcaagatagaggagttggtgctgctaaacaagacgatcccagggcgcacggttttccacagagtctggaacacgattgttgctatccacacggtgcccgccaacctccgcgcgctcattattgcctgtggtttgcagggcatccagcagttctgtggttggaactcgttgatgtacttttcgggcgatatattcagtctggtggggttcaaggaccccgtcgccgtatcgattgtggtcgcagccacaaacttcatctttacgttggtcgcattctttgccatcgacaaaatcggccgccgcatcatacttttgatcgggctacccggcatgacgactgccatgactgtttgcgccatagcattccactacatcaaaaccgaggtggacggcgaaaagttgaagccagtgggtgagagcaacgcttggggtattgtggtggtcatcttcatcattgtctatgccgccttctacgcgctgggcatcggaaccgtgccctggcagcagtcggagttgttcccccagcccgtccgtggcgtaggcacctctttcgccaccgccacaaactgggctggctcgatggtcatcgcatctacgttcctaacgatgttcaagaatatcacgccgacagctacatttggcttctttgccggcatctcggtcatctccttggttgctgtctatctctgctatccagaattgtccggtctcgaactcgaggaggtccaattcgtattgaaggatggcttcaacattaaggcctcgaaagcattagctaagaaacgcaaattccagatggccgagtcgcgtaaacaagccagagagctcgaccttgagtccctccacaaagccaagccatccgacgagtttaccgagtcgtga

SEQ ID NO: 7975 - protein, 571 aa, Ashbya gossypii
MAQLKWGAGRADDGQDGREVDIEERWHGGAKPDSADGSRRIQIQAVNDEDDTSELITFNQDVSWFIVMLTFVASLSGFLFGYDTGYISSALQSVGTDLGHQLTYRDKEYITSATSLGALIAALGAGICADLFGRRKCIMFSNILFVVGTVLQVAAFNFWQMVVGRLVMGFGIGFGSLISPLFISEIAPKMIRGRLTVINSLWLTGGQLIAYACGAGFQHVKHGWRILVGISMLPAVLQFVSFIFLPDTPRFYVMKGRLEDAANVLERTYVGAERALIDRKIEELVLLNKTIPGRTVFHRVWNTIVAIHTVPANLRALIIACGLQGIQQFCGWNSLMYFSGDIFSLVGFKDPVAVSIVVAATNFIFTLVAFFAIDKIGRRIILLIGLPGMTTAMTVCAIAFHYIKTEVDGEKLKPVGESNAWGIVVVIFIIVYAAFYALGIGTVPWQQSELFPQPVRGVGTSFATATNWAGSMVIASTFLTMFKNITPTATFGFFAGISVISLVAVYLCYPELSGLELEEVQFVLKDGFNIKASKALAKKRKFQMAESRKQARELDLESLHKAKPSDEFTES

SEQ ID NO: 7976 - DNA, 1608 bp, Ashbya gossypii; identical to SEQ ID NO: 375
  CDS (1)..(1608)

SEQ ID NO: 7977 - protein, 535 aa, Ashbya gossypii; identical to SEQ ID NO: 376

SEQ ID NO: 7978 - DNA, 1641 bp, Ashbya gossypii; identical to SEQ ID NO: 377
  CDS (1)..(1641)

SEQ ID NO: 7979 - protein, 546 aa, Ashbya gossypii; identical to SEQ ID NO: 378

SEQ ID NO: 7980 - DNA, 1620 bp, Ashbya gossypii; identical to SEQ ID NO: 379
  CDS (1)..(1620)

SEQ ID NO: 7981 - protein, 539 aa, Ashbya gossypii; identical to SEQ ID NO: 380

SEQ ID NO: 7982 - DNA, 1644 bp, Ashbya gossypii; identical to SEQ ID NO: 381
  CDS (1)..(1644)

SEQ ID NO: 7983 - protein, 547 aa, Ashbya gossypii; identical to SEQ ID NO: 382

SEQ ID NO: 7984 - DNA, 1995 bp, Ashbya gossypii; identical to SEQ ID NO: 383
  CDS (1)..(1995)

SEQ ID NO: 7985 - protein, 664 aa, Ashbya gossypii; identical to SEQ ID NO: 384

SEQ ID NO: 7986 - DNA, 1476 bp, Shigella flexneri
  CDS (1)..(1476)
atgaatacccagtataattccagttatatattttcgattaccttagtcgctacattaggtggtttattatttggctacgacaccgccgttatttccggtactgttgagtcactcaataccgtctttgttgctccacaaaacttaagtgaatccgctgccaactccctgttaggattttgcgtagccagcgctctgattggttgcatcatcggcggtgccctcggtggttattgcagtaaccgcttcggccgtcgtgattcacttaagatttctgctgtcctgttttttatttctggtgtaggttctgcctggccagaacttggttttacctctataaacccggacaacacagtacctatttatctggcaggttatgtcccggaatttgttatttatcgtattattggcggtattggcgttggtttagcctcaatgctttcaccaatgtatattgcggaactggctccagctcatattcgcggaaaactggtttcatttaaccagtttgcgattattttcgggcaacttttagtttactgcgtaaactattttattgcccgttccggtgatgccagctggctgaatactgacggcaggcgttatatgtttgcctcggaatgtatccctgcactgctgttcttaatgctgctgtataccgtgccagaaagtcctcgctggctgatgtcacgcggcaagcaagaacagacggaaagtatcctgcgcaaaattatgggcaacacgcttgcaactcaggcagtacaggaaattaaacactccctggatcatggccgcaaaaccggtggtcgtctgctgatgtttggcgtgggcgtgattgtaatcggcgttatgctctccatcttccagcaatttgtcggcatcaatgtggtgctgtactacgcgccggaagtgttcaaaacgctgggggccagcacggatatcgcgctgttgcagaccattattgtcggagttatcaacctcacctttaccgtactggcaattatgactgtggataaatttggtcgtaagccactgcaaattatcggcgcactcggaatggcaatcggtatgtttagcctcggtaccgcgttttacactcaggcatcgggtattgtggcgctactgtcgatgctgttctatgttgccgcctttgccatgtcctggggtccggtatgctgggtactgctgtcggaaatcttcccgaatgctattcgtggtaaagcgctggcaatcgcggtggcggcccagtggctggcgaactacttcgtctcctggaccttcccgatgatggacaaaaactcctggctggtggcccatttccacaacggtttctcctactggatttacggttgtatgggcgttctggcagcactgtttatgtggaaatttgtcccggaaaccaaaggtaaaacccttgaggagctggaagcgctctgggaaccggaaacgaagaaaacacaacaaactgctacgctgtaa

SEQ ID NO: 7987 - protein, 491 aa, Shigella flexneri
MNTQYNSSYIFSITLVATLGGLLFGYDTAVISGTVESLNTVFVAPQNLSESAANSLLGFCVASALIGCIIGGALGGYCSNRFGRRDSLKISAVLFFISGVGSAWPELGFTSINPDNTVPIYLAGYVPEFVIYRIIGGIGVGLASMLSPMYIAELAPAHIRGKLVSFNQFAIIFGQLLVYCVNYFIARSGDASWLNTDGRRYMFASECIPALLFLMLLYTVPESPRWLMSRGKQEQTESILRKIMGNTLATQAVQEIKHSLDHGRKTGGRLLMFGVGVIVIGVMLSIFQQFVGINVVLYYAPEVFKTLGASTDIALLQTIIVGVINLTFTVLAIMTVDKFGRKPLQIIGALGMAIGMFSLGTAFYTQASGIVALLSMLFYVAAFAMSWGPVCWVLLSEIFPNAIRGKALAIAVAAQWLANYFVSWTFPMMDKNSWLVAHFHNGFSYWIYGCMGVLAALFMWKFVPETKGKTLEELEALWEPETKKTQQTATL

SEQ ID NO: 7988 - DNA, 1557 bp, Oryza sativa
  CDS (1)..(1557)
atggccggcggcgcggtggtgagcacgggggcaggcaaggactaccctggcaagctcaccctcttcgtcttcttcacatgcgtcgtcgccgccaccggtggtctcatcttcggatatgacatcggtatatcaggtggtgtgacgtccatggacccgttcctgaggaagttcttcccggaggtgtatcggaagaagcagatggcggacaagaacaaccagtactgcaagtacgacaaccagctgctgcagaccttcacctcgtcgctctacctcgccgccctcgtctcctccttcttcgccgccaccgtcacccgcgtcctcggccgcaagtggtccatgttcgccggcggcctcaccttcctcatcggcgccgccctcaacggcgccgccgagaacgtcgccatgctcatcgtcggtcgtatcctcctcggtgtcggcgtcggcttcgccaatcagtcggtgccggtgtacttgtcggagatggcgccggctcggctgcgggggatgctgaacatcgggttccagctgatgatcaccatcggcatcctggcggcggagctgataaactacgggacggcgaagatcaaggccgggtggggatggcgggtgagcctggcgctggccgccgtccccgccgccatcatcaccctcggctccctcttcctcccggacacccccaactcgctcatcgacaggggccacccggaggcggcggagcgcatgctccggcgcatccgcggctccgacgtggacgtgtcggaggagtacgcggacctggtggcggcgagcgaggagtcgaagctggtgcagcacccgtggcgcaacatcctccgccgcaagtaccgcgcccagctcaccatggccatctgcatccccttcttccagcagctcaccgggatcaacgtcatcatgttctacgcccccgtgctgttcgacaccctgggcttcaagagcgacgcgtcgctcatgtccgccgtcatcacgggcctcgtcaacgtcttcgccacgctggtgtccatcttcaccgtggaccgcctcggccgccgcaagctgttcctgcagggcggggcgcagatggtggtgtgccaggtggtggtggggacgctgatcgccgtcaagttcgggacgagcggcatcggcgacatccccaaggggtacgcggcggtggtggtgctcttcatctgcatgtacgtggcagggttcgcgtggtcgtggggcccactggggtggctcgtccccagcgagatcttcccgctggagatccggccggcggggcagagcatcaacgtgtcggtgaacatgctcttcaccttcgtcatcgcgcaggccttcctcaccatgctctgccacatgaagttcggcctcttctacttcttcgccggatgggtcgtcatcatgaccgtcttcatcgccctcttcctccccgagaccaagaacgtccccatcgaggagatggtgctcgtctggaagtcccactggttctggcgccgattcatcggagaccacgacgtccacgtcggcgccaaccacgtctccaacaataagctccaaccataa

SEQ ID NO: 7989 - protein, 518 aa, Oryza sativa
MAGGAVVSTGAGKDYPGKLTLFVFFTCVVAATGGLIFGYDIGISGGVTSMDPFLRKFFPEVYRKKQMADKNNQYCKYDNQLLQTFTSSLYLAALVSSFFAATVTRVLGRKWSMFAGGLTFLIGAALNGAAENVAMLIVGRILLGVGVGFANQSVPVYLSEMAPARLRGMLNIGFQLMITIGILAAELINYGTAKIKAGWGWRVSLALAAVPAAIITLGSLFLPDTPNSLIDRGHPEAAERMLRRIRGSDVDVSEEYADLVAASEESKLVQHPWRNILRRKYRAQLTMAICIPFFQQLTGINVIMFYAPVLFDTLGFKSDASLMSAVITGLVNVFATLVSIFTVDRLGRRKLFLQGGAQMVVCQVVVGTLIAVKFGTSGIGDIPKGYAAVVVLFICMYVAGFAWSWGPLGWLVPSEIFPLEIRPAGQSINVSVNMLFTFVIAQAFLTMLCHMKFGLFYFFAGWVVIMTVFIALFLPETKNVPIEEMVLVWKSHWFWRRFIGDHDVHVGANHVSNNKLQP

SEQ ID NO: 7990 - DNA, 1774 bp, Anopheles gambiae str
  CDS (94)..(1542)
cgtcggcataccatcgggatatagctggagaagatagaggaaatagagcgcaccgagcatgtcgttctatggttcagtgggcatcagtgttaaatgaatcctgctgaactcaatcagtaccaacctgtcgctacctttgagaagctcgaaacctcacacttctgcaagatggagaagggtagtccatcacgccagtttatggctggcattatcgttaatctggcctcagttatggtcggcacgtcgctaggctggacctcaccggttggacccaagtttgcctcgaaagataccacaccgctcgatacgattccaacggcatcggaaagctcatggatcgcatcactagtagcaatgggtgcattgattgcacccttcattgctggcccattggcggaacgaattggccgtaagttcacactgctggggagctccatctttttcctcgtatcgtttatattgctgctgacgacagaaacggtagtgcaggtgctgattgcccggttcatccaagggctgggcgttggctttgtgatgaccgtccaaaccatgtacattggtgagatcgcgagcaacgagtaccgcggtgcactcggatcacttatgcagttgtgcatcgttactggcatcctgtacgtgtacagcattggcccgtacgtttcgtaccatgcgctgcagtgggcctgcatcgtcctgccgatcgcattcgatgcaacgtttttcttcatgcccgaaacacccgcctactacatctcgaagggtgataaggaaaaggccgtggagtcgttgtgttttttgcgcggcaaaaccgtggacggtgtacaggaggagctgcacgaaatttccaccacggtcgaggagtcgctcaggaacaaaggctccgtaatggatctgttccggaacgcgggcaacgtaaaggcgctgatcatctgtgccggtctgattagcttccagcagctgtccggcatcaacgtgatactgttctacagtcaaaacatcttcgaaagcaccggcagtagcctgtcgccggccgtctcgaccatcctggtcggtgcggtgcaggtgctggcgagcggtgccaccccactgattgtcgatcggctgggacggaagcccatcctgctgacgtccgccggcggtatgtgcatttcgctcggcacgatggggctgtactttttcctcaagcacacggaatcaccgtcggtggacagtctcggctggctgccgatcatgtcgctgatcgtgtttgtgaccgtgtactgcatcgggtttgggccgctgccgtgggccgtgctgggtgagatgttcccggcgaacgtgaaatcgatcgcttcgtcgatcgttgcctccacctgctgggtgttgggctttattattttgcagtttttcgccgacctggataaggcggtcgggtcgcactggtcgttctggatctttggcatcctgtgcgcggttgcgttcgtgtttaccttcaccacgttgatggaaaccaagggcctcagtctgcaggagattcaggatcgactgaatggtaaggtgtaaggtgcggttcgggcctgtagcgaatgactcatgggtttgttttatctactaacaccactattgcgatggtggtagtgtagtgctcaagaaacagatgctattagagtttactgtttgttttcttccttccgcttcgtcagtgtagttagctttcacccgcaccaaagtgatacgttcgttagggacatacgagggaacgaacgactgtgttgaatgtattgtgttaatttac

SEQ ID NO: 7991 - protein, 482 aa, Anopheles gambiae str
MNPAELNQYQPVATFEKLETSHFCKMEKGSPSRQFMAGIIVNLASVMVGTSLGWTSPVGPKFASKDTTPLDTIPTASESSWIASLVAMGALIAPFIAGPLAERIGRKFTLLGSSIFFLVSFILLLTTETVVQVLIARFIQGLGVGFVMTVQTMYIGEIASNEYRGALGSLMQLCIVTGILYVYSIGPYVSYHALQWACIVLPIAFDATFFFMPETPAYYISKGDKEKAVESLCFLRGKTVDGVQEELHEISTTVEESLRNKGSVMDLFRNAGNVKALIICAGLISFQQLSGINVILFYSQNIFESTGSSLSPAVSTILVGAVQVLASGATPLIVDRLGRKPILLTSAGGMCISLGTMGLYFFLKHTESPSVDSLGWLPIMSLIVFVTVYCIGFGPLPWAVLGEMFPANVKSIASSIVASTCWVLGFIILQFFADLDKAVGSHWSFWIFGILCAVAFVFTFTTLMETKGLSLQEIQDRLNGKV

SEQ ID NO: 7992 - DNA, 1785 bp, Neurospora crassa
  CDS (1)..(1785)
atggcgatcttcgccatgggctggcagaagcccgacaatgtcgctggctcatctgccccagcgattatggtcggcctgtttgtcgccacaggcggcttactccttggctatgacactggaaccatcaacggcattcttgccatgaaatcgttcaaagaccacttttcaaccggctacatcgacggcaacggacagcctggcatatacccaaaggagagtgcgttaatcgttgccatgctcagcgccggaaccgccatcggagccttactcgctgcgcctctcggagatcactatggacgtcgccggtcccttattggcgccatcggaattttcgtaataggcgccatcctgcaggtttgtgcatataacatcgatctgttggtggcaggaaggacggttgccggtgttggtatcggcattgtctcagtgcttgtccccttatatcagtctgagatggcacccaagtggattcgaggaacactggtgtgcacctaccaactctccatcaccatggggcttcttgccgctgccgtggtcaacatcctcacatacaaattgaagacagctgctgcctaccgggtaccaataggacttcagctaacctgggcctgcgtcttggccctgggcttgaccgtgttacccgaaactcctcgttacctcatcaaacgtggagacaagaacgccgctgcgctttctctcagtcggctgcgtcgactggacattactcaccctgccttggtcgaggagcttgccgaaatcgaagcaaaccatcaatacgagatggcactgggtcccgactcttacaaggacattctctttggcgaacctcaccttggccgtcgcacgtttacaggttgctgtctgcagatgctacaacagcttaccggcgtgaactttatcatgtactatggaaccaccttttttaataacgctggcgttggaaaccccttcaagatctctctcatcatgcaagtcatcaacacagcatcgaccatacccggattgttcgtagtcgaatcatggggccggcgtcggctcttgatggtgggcgccataggcatggccatctgtcagctgctgatcgctgccttcgcgacggccagcggctccaacaacctatcagcacagaacaaggtcctcattacctttgttgcgatatacatcttcttctttgctgcatcatggggcccagttgtatgggtcgtcacctccgagatttatccgctcaaggttagagccaaatccatgtcgataactacggcttcaaattggttcctcaattttggcatcgcctacggcaccccgtatatgcaaacgaacagtgcagcgagcgacgaaagctcgatagatctcggctctaaagtgtttttcgtatggggcgcgttttgcatagtagcggtcggctttgtatggtgtatggtttacgagactagcaagatcagtctcgaacaaattgatgagatgtacgagagagttgaccatgcgtggcacagcaggcgcttcgaacctagttggagtttccaggagatgcgagaccttggcttctccgatggcggcataccgccaacgcagcagctgcagcagcagccgcagcagccgcagcagcaacaacaacaacaccaccaacaacaacaacaccaactacaagttgacctacagcaatcgcagtcacgcactagcaactccagcacgtctcaaaccgacacgggcgggagcaataacaccggggcgtcacaagacgataaacttgtggcatccttgggcaacatcgatctcagctattga

SEQ ID NO: 7993 - protein, 594 aa, Neurospora crassa
MAIFAMGWQKPDNVAGSSAPAIMVGLFVATGGLLLGYDTGTINGILAMKSFKDHFSTGYIDGNGQPGIYPKESALIVAMLSAGTAIGALLAAPLGDHYGRRRSLIGAIGIFVIGAILQVCAYNIDLLVAGRTVAGVGIGIVSVLVPLYQSEMAPKWIRGTLVCTYQLSITMGLLAAAVVNILTYKLKTAAAYRVPIGLQLTWACVLALGLTVLPETPRYLIKRGDKNAAALSLSRLRRLDITHPALVEELAEIEANHQYEMALGPDSYKDILFGEPHLGRRTFTGCCLQMLQQLTGVNFIMYYGTTFFNNAGVGNPFKISLIMQVINTASTIPGLFVVESWGRRRLLMVGAIGMAICQLLIAAFATASGSNNLSAQNKVLITFVAIYIFFFAASWGPVVWVVTSEIYPLKVRAKSMSITTASNWFLNFGIAYGTPYMQTNSAASDESSIDLGSKVFFVWGAFCIVAVGFVWCMVYETSKISLEQIDEMYERVDHAWHSRRFEPSWSFQEMRDLGFSDGGIPPTQQLQQQPQQPQQQQQQHHQQQQHQLQVDLQQSQSRTSNSSTSQTDTGGSNNTGASQDDKLVASLGNIDLSY

SEQ ID NO: 7994 - DNA, 1620 bp, Neurospora crassa; identical to SEQ ID NO: 387
  CDS (1)..(1620)

SEQ ID NO: 7995 - protein, 539 aa, Neurospora crassa; identical to SEQ ID NO: 388

SEQ ID NO: 7996 - DNA, 1752 bp, Neurospora crassa; identical to SEQ ID NO: 401
  CDS (1)..(1752)

SEQ ID NO: 7997 - protein, 583 aa, Neurospora crassa; identical to SEQ ID NO: 402

SEQ ID NO: 7998 - DNA, 1464 bp, Neurospora crassa
  CDS (1)..(1464)
atgacagacaacccagaagagcccttgatcgccaacactcaatcgacggagagggaccaagatgatggcagccatgatgtcgaacatgcgcatgattcccggggagggaaacagcacatatcaccgcccggcctgttcatctggctactcaccttttccgccggaataagcggtctactcttcggctacgacacaggcgtaataagcgccacccttgtctctatcggtacctccctctcgcaccggcccctgacctcgctcgacaaatccgtcatcacctcatgcacctccctcttcgccctgctcgcgctacccttcgcctccgcgctcgccgacgaccggggccgcaagcgcgttgtcctcttcgccgacaccctcttcatcatcggcgccctctgccaggccgccagccggaccgtcgaggtcatggtaattgggcggtcggttgtcggcatagccatcggcgccgccagcttcgtgacgccgctgtacattgccgagctggcgcctgcgacgcaccgcggccggttggtgacgatgaacattgtgtttatcacgcttgggcaggtggttgcgtacgtggtaggctggatctttgggacgtatggtagtccggagacgacggggtggagatggatggtcgggttgggcgcggtgccggcggtttgtcaggtggtcatcttgttgtggatgccggagagcccgaggtggttggtgaaggacggaaggtcgcaagaggcaagagcggtgattgctaagattgccgcgggggatgatgcgcaggatccgtcgacgaggagggaagtggatgctgtgttgaagagcatcgagattgagggtcttcagcagctgtgcggatttaactcgctcatgtacttctcggccacgatattcacgatggtggggttttcagagccgactttgacctcgctagtcgttgcagtcaccaactttgccttcaccttagttgccctggtgttgatcgaccgggtgggaaggagacgcattctactctggtctcttccctttatgattgcaggtctggtgcttgccggctatggcttttcgttcatcgagctcccgaattcagagaccagctcgccctcgacaacgggaggtcagggcggggccgtcattattttggcgagcatcatgatttatgtggctggctatgccatcggactgggcaatgtgccctggatgcagagcgagctcttctcactgagtgttcggtcagtgggcagtggtgttgcaacagcgaccaactggagcgccaactttgtgattggactgacgttccttccgctgatggaggccttgtcgccgtcttggacgtttgtcctgtacgcagtgatctgcgcggttgggtatggcctgatttggacggtataccctgaaaccgcagggctgagcttggaagatgcggcgacccttctagaagcggatgactggggggtgcggtaa

SEQ ID NO: 7999 - protein, 487 aa, Neurospora crassa
MTDNPEEPLIANTQSTERDQDDGSHDVEHAHDSRGGKQHISPPGLFIWLLTFSAGISGLLFGYDTGVISATLVSIGTSLSHRPLTSLDKSVITSCTSLFALLALPFASALADDRGRKRVVLFADTLFIIGALCQAASRTVEVMVIGRSVVGIAIGAASFVTPLYIAELAPATHRGRLVTMNIVFITLGQVVAYVVGWIFGTYGSPETTGWRWMVGLGAVPAVCQVVILLWMPESPRWLVKDGRSQEARAVIAKIAAGDDAQDPSTRREVDAVLKSIEIEGLQQLCGFNSLMYFSATIFTMVGFSEPTLTSLVVAVTNFAFTLVALVLIDRVGRRRILLWSLPFMIAGLVLAGYGFSFIELPNSETSSPSTTGGQGGAVIILASIMIYVAGYAIGLGNVPWMQSELFSLSVRSVGSGVATATNWSANFVIGLTFLPLMEALSPSWTFVLYAVICAVGYGLIWTVYPETAGLSLEDAATLLEADDWGVR

SEQ ID NO: 8000 - DNA, 1509 bp, Mycobacterium bovis; identical to SEQ ID NO: 425
  CDS (1)..(1509)

SEQ ID NO: 8001 - protein, 502 aa, Mycobacterium bovis; identical to SEQ ID NO: 426

SEQ ID NO: 8002 - DNA, 1455 bp, Rhodopirellula baltica
  CDS (1)..(1455)
atgctagactttggaacggcgggcacgcaaacgctcggtcggcgcgaaatcattggcacggcggttgagcagcgtgcctccgacgagcaacgttccaacatcgggcaatcaaaattgaatcagcgtgttttcctgtggagtttgacgtcgtccttggcggggtttttgttcggctttgacacagtcgttatttccggagctgaaaaagccatccagggtctgtgggcgctgggtgatttccaacacggtcttgctctgagcgccgcgttgtgggggaccgtcatcggatccttggtcggcggttggccaactgacaaatttggacgcaaaaagacgttgctctggatcggaattctgtacttggtttcggcgatctggtcaggtttcgcgaccgacgttttctcgttcatgatcgctcgcttcatcggcggcttaggcgttggaatttctaccgtcgcggctccgctatacatctctgaaatctcgccaccgaaacatcgcgggactttgactggattgtttcaattcaacatcgtctttggaatcatggtcgcgttcgcgtccaattatctgattggcacctggggtaacgagaatgcttggcgatggatgttggcggtggaagcgatccccgctttgatcttcaccgtcatgtgcatttcgttgccatccagccctcgatggttgatcgcggtcaagaaagaccaagcggccggcatgtcggttctgaaacaactacggccagatgcgtccgatgaagaggtgcaaaggacggtcgatgaaattgtcgcctctctccgtgccgagtcggacctgactcccgcggaaccgttttggagccgtcgactattcactcccatatccattgcattcctcgtcgcgtttttcaatcagctttctggaatcaatgccgttctatacttctcaccgcgaatttttgaattggccggtatgggcgaacaagccgctcttttgcaatcgatcggcattggtatcaccaacctgatcttcacctttgtgggcttgtatttgatcgaccgactgggtcgtcgcacgttgctactgattggttcggcgggctacatcctgtcgctggggacgtgcgcctacgcctttcaatccgaaacatttagcattgttcccgcatgcattttcgccttcatcgcatcgcacgcgatggggcagggtgcggtcatttgggtgctgatctcagaagtctttcccaacgagcatcgtgccgcgggtcaatcgctgggaagcttcacgcactggatctttgcggcattgctgacgcttgtttttccggccgtggtggagacgtttcatcccgctgccatcttcggctttttctgcttcatgatggtcctgcaaggactttgggtcatcacgatgttgcctgaaaccaagggcatctcgctggagcaaatggaagcaaaactcggaatccgcgtttaa

SEQ ID NO: 8003 - protein, 484 aa, Rhodopirellula baltica
MLDFGTAGTQTLGRREIIGTAVEQRASDEQRSNIGQSKLNQRVFLWSLTSSLAGFLFGFDTVVISGAEKAIQGLWALGDFQHGLALSAALWGTVIGSLVGGWPTDKFGRKKTLLWIGILYLVSAIWSGFATDVFSFMIARFIGGLGVGISTVAAPLYISEISPPKHRGTLTGLFQFNIVFGIMVAFASNYLIGTWGNENAWRWMLAVEAIPALIFTVMCISLPSSPRWLIAVKKDQAAGMSVLKQLRPDASDEEVQRTVDEIVASLRAESDLTPAEPFWSRRLFTPISIAFLVAFFNQLSGINAVLYFSPRIFELAGMGEQAALLQSIGIGITNLIFTFVGLYLIDRLGRRTLLLIGSAGYILSLGTCAYAFQSETFSIVPACIFAFIASHAMGQGAVIWVLISEVFPNEHRAAGQSLGSFTHWIFAALLTLVFPAVVETFHPAAIFGFFCFMMVLQGLWVITMLPETKGISLEQMEAKLGIRV

SEQ ID NO: 8004 - DNA, 1847 bp, Oryza sativa
  CDS (94)..(1647)
ggctcttgtagtagctagctaccagtccaaccaacaccaacaactgcgcgagtgagcgcgcggctattgcgtgccacggcgtgccgttgagcgatggctggaggtgggttccccgtggccggcggcgccccgccgggcgactatggcggcggcataaccttctccgtcgtcgtcacctgcctcatggccgcctccggcggcctcatcttcggctacgacatcggcatctccgggggagtgacggcgatggagtcgttcctggcggccttcttcccgggggtgctccggcggatggcggcggcgcggcgggacgagtactgcgtctacgacagccacgtgctgacggcgttcacgtcgtcgctgtacctggccgggctggccgcgtcgctggcggccggccgcgtcaccagggcggtcgggaggcaggccgtcatgctcgcgggcggggcgctcttcttcgccggcgccgccgtcaacgccgccgcggtcaacatcgccatgctcatcgtcggccgcatgctgctcggcttcggcattggcttcaccaaccaggcggcgccggtgtacctggcggagacggcgccggcgaagtggcggggtgcattcacgacggggttccagctcttcctcggcatcggcaacctgacggccaacctgacaaactacggcgcggcgcgcatcccgcggtgggggtggcgtctctccctcggcctggcggcggcgccggcgtccgtcatcctcgtcggcacgctgctcatctcggacacccccagcagcctcctcgtgcgcgggcgggtggagcaggcgcgcgccgcgctccggcgcgtgcgcggcgccaaggcggacgtggacgccgagctggagggcgtggcgcgcgcggtcgaggcggcgcgcgccaacgaggagggcgcgtaccgcaggatcctctggaggcagcaccgcccccacctggtgatggccgtcgccgtgccgctgctccagcagctcaccggcgtcatcgtcatcgccttcttctcgccggtgctcttccagacggccgggttcggcagcaacgcgtcgctgatgggggccgtcatcctcggcgccgtcaacctcggctccaccctcgtctccatcgccacggtggaccggtacggccgccgggtgctgttcctgaccggcggcctcgtgatgatcgcctgccaggtcgcggtggcgtggatcatggggtcgcagatcgggcgggacggcgagtcggcgatggcgaggcgctactccgtggcggtgttggcgctgacgtgcgtcttctcggcggcgttcgggtggtcgtggggcccgctgacgtgggtgatccccggcgagatattcccggtggagatccggtcggcggggcaggggatcagcgtggccgtcaacctcggcgccaccttcgtgctcacgcagacgttcctcgccatgctgtgcagcttcaagtacgccacgttcctctactacgcggcgtgggtcgccgtcatgaccgccttcgtgtgggcgttcctgccggagaccaagggggtgccgctcgaggccatgggcgccgtctgggcgcggcactggtactggcggcgcttcgtgcagccgccaccggcggccaaggacgccatgctgccggaggtcctcgtgaactgacaacgtatactgtacgtgttctctgccttgaccgtgtggcggcgctgcattaattcgtgggaagttgtgtaaaattaaatctggtttctggtttaacggttcctacatggttgaataccatcccgtgtttgtcctcttgcgaaaaatttgtattgtttacatatgaacaaatccaaagtccgtgttctattttagtttct

SEQ ID NO: 8005 - protein, 517 aa, Oryza sativa
MAGGGFPVAGGAPPGDYGGGITFSVVVTCLMAASGGLIFGYDIGISGGVTAMESFLAAFFPGVLRRMAAARRDEYCVYDSHVLTAFTSSLYLAGLAASLAAGRVTRAVGRQAVMLAGGALFFAGAAVNAAAVNIAMLIVGRMLLGFGIGFTNQAAPVYLAETAPAKWRGAFTTGFQLFLGIGNLTANLTNYGAARIPRWGWRLSLGLAAAPASVILVGTLLISDTPSSLLVRGRVEQARAALRRVRGAKADVDAELEGVARAVEAARANEEGAYRRILWRQHRPHLVMAVAVPLLQQLTGVIVIAFFSPVLFQTAGFGSNASLMGAVILGAVNLGSTLVSIATVDRYGRRVLFLTGGLVMIACQVAVAWIMGSQIGRDGESAMARRYSVAVLALTCVFSAAFGWSWGPLTWVIPGEIFPVEIRSAGQGISVAVNLGATFVLTQTFLAMLCSFKYATFLYYAAWVAVMTAFVWAFLPETKGVPLEAMGAVWARHWYWRRFVQPPPAAKDAMLPEVLVN

SEQ ID NO: 8006 - DNA, 2251 bp, Oryza sativa; identical to SEQ ID NO: 427
  CDS (152)..(1723)

SEQ ID NO: 8007 - protein, 523 aa, Oryza sativa; identical to SEQ ID NO: 428

SEQ ID NO: 8008 - DNA, 1894 bp, Glycine max
  CDS (163)..(1734)
ctaagtgtctcgcttcacatatcatcatacttagatagtcagatacatcagccaataattaaattaaatacatgctagcactttaacagtactcctttctctaatatctctctcatattttcctttctgcggatattcagctaattaaactaagtcactaagatgactgagggaaagctagttgaagctgcagaagctcataagacacttcaggatttcgatcctccaaagaagcgcaaaaggaacaagtatgcttttgcttgtgctatgctggcctccatgacttccatcttgcttggttatgatattggagtgatgagtggagcagccatatacataaaaagggacctgaaagtctcggacgagcaaatcgagatcctgctcggaatcatcaacctatactctctgataggctcatgtctcgccggcagaacctccgactggataggtcgccgctacacgattggtttgggcggcgccatctttcttgtcgggagcactctcatgggtttctacccccattattcctttctcatgtgtgggcggttcgtcgctggcattggcatcggctacgccctcatgatagcccctgtctacaccgccgaggtctccccggcctcctctcgtggcttcctcacatccttccccgaggtttttattaatggagggatattacttggatacatatcaaactatggattttcgaagctgacactgaaggtgggatggcgaatgatgcttggagtgggtgcaattccttcggtagtcctaacggagggagtgttagcgatgcctgagtccccaaggtggctagtgatgaggggtcgtttgggagaggcaagaaaagtgcttaacaaaacctcagacagcaaggaagaggcccaactaaggctagcggaaatcaaacaagccgcagggatccccgagagttgcaacgacgacgtcgttcaggtaaataaacaaagcaacggtgaaggtgtatggaaagagctcttcctctatccaacgcccgcaattcgtcacatcgtaatcgctgcccttggtattcacttcttccaacaagcgtcgggcgtagacgccgtcgttttgtacagccccaggatcttcgaaaaggctgggattacaaacgacacgcataagcttcttgcaaccgtggccgttggattcgttaagaccgtgttcatcttggcggctacgtttacgttggaccgcgtgggtcgtcgtccgttgttattgtctagtgtcggcggcatggtgctctcgcttctcacgcttgcgatcagcctcactgttattgatcattcggagaggaaattaatgtgggccgttggatcgagcatagccatggtgttggcttacgtggccacgttctccatcggtgcgggtcccatcacgtgggtctatagttctgagatcttcccgttgaggctgcgggcgcagggtgcggccgcgggagttgcggtgaataggaccactagcgcggttgtctcaatgacttttctgtccctcactagagccatcactattggtggagctttcttcctttattgtggcattgctactgttgggtggatattcttttacaccgtcttgcctgagacccggggaaaaacgctcgaagacatggaagggtcttttggtacttttaggtccaaatccaacgccagcaaggctgtagaaaatgagaatgggcaagtagcacaagtccagctaggaactaatgtccaaacttgaaaaatgagtattgggacatccagtaatagtgaagtaatttcgtgattttttttttgttttttactttttagactagttcttcaaatcaaaacgagaagttaaagtgacaagacttgtgtatgaaaaaaaaaaaaaaaaaaaaaaaaaaaaaaaaaaaaaa

SEQ ID NO: 8009 - protein, 523 aa, Glycine max
MTEGKLVEAAEAHKTLQDFDPPKKRKRNKYAFACAMLASMTSILLGYDIGVMSGAAIYIKRDLKVSDEQIEILLGIINLYSLIGSCLAGRTSDWIGRRYTIGLGGAIFLVGSTLMGFYPHYSFLMCGRFVAGIGIGYALMIAPVYTAEVSPASSRGFLTSFPEVFINGGILLGYISNYGFSKLTLKVGWRMMLGVGAIPSVVLTEGVLAMPESPRWLVMRGRLGEARKVLNKTSDSKEEAQLRLAEIKQAAGIPESCNDDVVQVNKQSNGEGVWKELFLYPTPAIRHIVIAALGIHFFQQASGVDAVVLYSPRIFEKAGITNDTHKLLATVAVGFVKTVFILAATFTLDRVGRRPLLLSSVGGMVLSLLTLAISLTVIDHSERKLMWAVGSSIAMVLAYVATFSIGAGPITWVYSSEIFPLRLRAQGAAAGVAVNRTTSAVVSMTFLSLTRAITIGGAFFLYCGIATVGWIFFYTVLPETRGKTLEDMEGSFGTFRSKSNASKAVENENGQVAQVQLGTNVQT

SEQ ID NO: 8010 - DNA, 1648 bp, Orobanche ramosa; identical to SEQ ID NO: 429
  CDS (46)..(1605)

SEQ ID NO: 8011 - protein, 519 aa, Orobanche ramosa; identical to SEQ ID NO: 430

SEQ ID NO: 8012 - DNA, 1975 bp, Oryza sativa
  CDS (96)..(1604)
ggggggcaactaggaagttcctcttcctcctccgagaacgagaacccacacctccataacttcaatttccaagttatatatatataaaaaaggcaatggcggacgatcctctctccaactccaccaccaacaacaagagggcagaggggatccagctccagcacggcgactgcgagagcgagagcactgcgcccttgctgctcgcgccacacgagtcctaccgcctctccgccgcaatcctccccttcctatttccagctttgggcggccttctctatggctacgacatcggagcaacgtctggtgctaccatatcgctcaagtcatccaccttcagtggcaccacatggtacaacttgtcatcgctgcaaaccggccttgtcgtcagtggctcactctatggtgctctcatcggttccatcttggcattcaacattgccgattttctaggacggcgcagagagcttattctttcttctgtctcatatttgattggagctcttctcacagcagcagcacctaacttccctatcatggtggttggccgctttttctatggcataggaataggattggctatgcatgctgctccaatgtacattgcagagactgctccaagtcagataagaggcatgctcatttctctcaaggaattctttattgttcttgggatgcttcttggctacattgcaggcagtctctttgtcgaagtggtttctggttggcgctacatgtatgccaccagtacaccattatgtctcatcatgggaattgggatgtgctggttacctgcttcacctaggtggcttctgttatgtgccatacaagggaagaggaatattatggagtcaaaagaaaatgctacccgttgcttatgtcgattgaggggtcaagcttctcctgatttggtttcggaacaagttgatttgattctggatgaactgtcatacgttgatcaagagaggcaagcaggcttcagtgagatctttcagggaaaatgcctcaaagcaatgataatcggatgtggcttggtgttctttcagcaggttactggtcaaccaagtgtgctatattatgctgcgacaatccttcagagtgctggattctctggtgcatctgatgctactcgtgtatcagttcttcttggcttactgaagttgattatgactggtgtggcagttcttgtggttgacagacttgggagaagaccattactgattggaggtgttagtgggattgctgtttccttgtttttgttatcttcgtactacaccttattgaaggatgctccttatgtggctgtaatagcacttctactctatgttggctgctaccagctgtcattcggtccaattggctggcttatgatttcggaagttttcccattaaggctgcgagggcgtgggttgagtattgctgttcttgtgaattttgcctccaatgcactagtcacttttgctttctccccattggaggatttgattggaactgggatcctcttctctgcgtttggggtgattgcagtggcgtctcttgttttcatattcttcatcgtgcccgagacgaaagggctcaccttggaagaaattgaagccagcctgtagatccagctgccctgcggctgctggcacgtaggagaactgcttattattcagagatgttgcaagctgttggactgactgactgactatctttgtggtgtggtaaggtaacacagtgagatccattgagagtgagttatgttgctttcggtcgttgctttggttggagaaagagtatagttcaaacatatatgtccatactgggttgttgttcataatacatgagcacatcattttttttccttgagaacgatatatgtgtgattaatgctgtacagcaggagcagttggcttatgccatgttattgggcacctgctgaatatttggcatgatctaaaaataataatgtcttcgtcccagaataattacattt

SEQ ID NO: 8013 - protein, 502 aa, Oryza sativa
MADDPLSNSTTNNKRAEGIQLQHGDCESESTAPLLLAPHESYRLSAAILPFLFPALGGLLYGYDIGATSGATISLKSSTFSGTTWYNLSSLQTGLVVSGSLYGALIGSILAFNIADFLGRRRELILSSVSYLIGALLTAAAPNFPIMVVGRFFYGIGIGLAMHAAPMYIAETAPSQIRGMLISLKEFFIVLGMLLGYIAGSLFVEVVSGWRYMYATSTPLCLIMGIGMCWLPASPRWLLLCAIQGKRNIMESKENATRCLCRLRGQASPDLVSEQVDLILDELSYVDQERQAGFSEIFQGKCLKAMIIGCGLVFFQQVTGQPSVLYYAATILQSAGFSGASDATRVSVLLGLLKLIMTGVAVLVVDRLGRRPLLIGGVSGIAVSLFLLSSYYTLLKDAPYVAVIALLLYVGCYQLSFGPIGWLMISEVFPLRLRGRGLSIAVLVNFASNALVTFAFSPLEDLIGTGILFSAFGVIAVASLVFIFFIVPETKGLTLEEIEASL

SEQ ID NO: 8014 - DNA, 2458 bp, Oryza sativa
  CDS (510)..(2255)
gtcccgggctcccggcagcctggggtttctctccccgtttctgtttctcggtgaggtgaagttttccgtctcagcacactgccagttcttcttcttgttcttcctactcgtggcgccgcggcgtcctcacggatcgcaaggtcgggaattatctggggttctcggggtttgtggctcctttccggtgaaaggattcttttttagcgggagatcggttgagtcggtttcttctgtagatcttatcgttgagatttcgttgtttatgttaggcgagtcggggtgagacttatccgcgttcctccctgcgatgaaacacgcgattttggattgtcgttacgtttagggattgtggttttaaggctgttcttccgttgtaaatgttggttgcgccatcctataaaagaaagggactcctgtcgagaaacacaccatgcttcttctgtcctgaaggtttggaaaggcacattctgaggagatttttctgtcctacatcgtagcccttgaatgcaatggaagggggtgcaactctagctgataaggctgaatttaaggaatgtctgcggctgacctggagccagccttacattcttcagcttgttttctctgccggcatcggtggtcttcttttcggatatgatacaggtgtcatatctggagcacttctgtatattcgagatgattttactgcggtcgaaaagagcactgtacttagggaaacgatagtgagtatggctgtagctggagccatagttggagcaggatttggtggctggatgaacgacaagtttggaaggaagccttccatcttgatcgccgattccctgttcctcgcaggtgccttgatcatggcccttgccccaacaccgtttgtcatcattattgggaggatctttgttggtcttggggttggaatggcttccatgacagcacctttgtacatttctgaagcctctccagctagaatcagaggtgcacttgtgagcacaaatggacttcttattaccggagggcagttcatggcatacctcattaatctggccttcactaaggtaaagggaacatggaggtggatgcttggcattgcaggtcttcctgcttttattcagttcatattgatgtgtatgctacctgaatcaccaaggtggctatacagacaggataggaaagaggaggctgaagccatattaaggaagatttaccccgcggctgaggttgaagaagagatcgattcgatgcgccgatcaattgaacatgagaaacaactggagggctccatcggcgagcagagtctggttggcaagctgacgaaggcactgagcagcaaggtcgtccgccgtgggctcatggccggcgtcatcgcgcaggtcgcccagcagttcgtcggcatcaacaccgtcatgtactacagcccgacgatcgtccagctggccggcttcgcgtcgaacaacacggccatggcgctgtccctcatcacctcgggcctcaacgccatcgggtccatcgtcagcatgttcttcgtggacagggccggccgccgtcgcctgatgatcatcagcctcgtcggcatcgtcctgtggctcgccgtgctcggcggcacgttcctcggcgccgcgcaccacgcgccgccggtcagcgacctggagacgcgggtgttcgccaaccagacgtgcccggagtacagcccgagcgcccgctggaactgcatgaactgcctcaaggcccagtccacctgcggcttctgcgcccacggaggaaacaagctcctccccggcgcgtgcctggcggcgggcgaagcgtcgcggcggacgtgccacgcggggaaccgggagttctacacggaagggtgccccaacaacttcgggtggctggcgctggtggcgctcggcgcgtacatcgtctcctactccccgggcatgggcaccgtgccatggatcgtcaactcggagatctacccgctgcggttcaggggcgtctgcggcggcatcgcggcggtggccaactgggtgtccaacctcatcgtcacgcagacgttcctgagcctcaccaaggcgctgggcacgtcggccaccttcttcctcttctgcgccgtctccttcttcgcgctcgtcgtcgtcttcttcaccgtgccggagaccaagggactgcagttcgaggaggtggagaagatgctcggggagaaggactacaagccgtggaagagataccgtcccgacgtgtcgtccaaagggcgcgacatcggcctctctgttccatgaaaggaagaagaacagtgtttggtttcaagttatttgggttttaactagcaataatctgtactcagtttacatgtagagtggccgttgccaatagaaattaatcagttgtttcattgtgtgacacattttagagccttttcccctgtgcttagaacgtttgatgatttttatataagtaaattgcgtcttggtcacctttttcc

SEQ ID NO: 8015 - protein, 581 aa, Oryza sativa
MEGGATLADKAEFKECLRLTWSQPYILQLVFSAGIGGLLFGYDTGVISGALLYIRDDFTAVEKSTVLRETIVSMAVAGAIVGAGFGGWMNDKFGRKPSILIADSLFLAGALIMALAPTPFVIIIGRIFVGLGVGMASMTAPLYISEASPARIRGALVSTNGLLITGGQFMAYLINLAFTKVKGTWRWMLGIAGLPAFIQFILMCMLPESPRWLYRQDRKEEAEAILRKIYPAAEVEEEIDSMRRSIEHEKQLEGSIGEQSLVGKLTKALSSKVVRRGLMAGVIAQVAQQFVGINTVMYYSPTIVQLAGFASNNTAMALSLITSGLNAIGSIVSMFFVDRAGRRRLMIISLVGIVLWLAVLGGTFLGAAHHAPPVSDLETRVFANQTCPEYSPSARWNCMNCLKAQSTCGFCAHGGNKLLPGACLAAGEASRRTCHAGNREFYTEGCPNNFGWLALVALGAYIVSYSPGMGTVPWIVNSEIYPLRFRGVCGGIAAVANWVSNLIVTQTFLSLTKALGTSATFFLFCAVSFFALVVVFFTVPETKGLQFEEVEKMLGEKDYKPWKRYRPDVSSKGRDIGLSVP

SEQ ID NO: 8016 - DNA, 2574 bp, Oryza sativa; identical to SEQ ID NO: 435
  CDS (569)..(2089)

SEQ ID NO: 8017 - protein, 506 aa, Oryza sativa; identical to SEQ ID NO: 436

SEQ ID NO: 8018 - DNA, 1413 bp, Streptomyces avermitilis
  CDS (1)..(1413)
atgaccagcacagcgcaggcgcccggagcccgggaagctcatcccgagcatctcggccatgtcatcttcatcgcggcggcggccgcgatgggcggcttcctcttcggttacgacagtgccgtgatcaacggcgccgtcgaggccatccggagcaagtacgacatcggttccgcgaccctggcccaggtcatcgccatcgcgctgatcggctgcgccgtcggcgccgcgaccgcgggccgcatagccgaccgcatcggccgcatccggtgcatgcagatcgccgccgtgctgttcaccgccagcgccatcggctcggcgctgcccttcgcgctgtgggacctcgcgttctggcgcgtcatcggcggcttcgccatcggtatggcctccgtgatcggccccgcctacatcgccgaggtcgccccggccgcgtaccgcggccgtctcggctccttccagcaggccgcgatcgtcatcggcatcgccatctcgcagctggtcaactgggccatcctgaacgccgccggcggcgaccagcgcggcaagctgctgggcctcgaagcctggcaggtcatgctcggcgtcatggtcgtcccggccgtcctctacggtctgctctccttcgcgatccccgagtcgccgcgctatctgatcgaagcgggcaaggacgcgcgcgcccgtgaggtgctcgaagaggtcgagggcaaggagatcgacctcgacgcccgcgtggaggagatcaggctcgccatgtaccgcgaggagaagccgagcttcaaggacctgctcggcggcaccttcttcttcaagccgatcgtctgggtcggtatcggactctcggtcttccagcagttcgtcggcatcaacgtggcgttctactactcggcgacgctgtggcagtcggtcggcgtcgacccgacggactcgttcctctactcgttcaccacgtcgatcatcaacatcatcggcaccgtgatcgccatgatcttcgtcgacagggtcggccgcaagccgctcgcgatcatcggctccgtgggtatggtcatcggtctcgcgctggaggcctgggccttctcgtacgacctcgtcgacggcaagctgccggccacccagggctgggtggccctgatcgccgcccacgtgttcgtcctcttcttcgccctctcctggggcgtcgtggtctgggtcttcctcggcgagatgttcccgaacaggatccgtgccgccgcgctcggtgtggccgcgtcggcccagtggatcgccaactgggcgatcaccgcgagcttcccgtccctggccgactggagcctctccggcacgtacatcatctacacggtgttcgccgcgctctccatccccttcgtgctcaagttcgtgaaggagaccaagggcaaggcgctggaggagatgggctga

SEQ ID NO: 8019 - protein, 470 aa, Streptomyces avermitilis
MTSTAQAPGAREAHPEHLGHVIFIAAAAAMGGFLFGYDSAVINGAVEAIRSKYDIGSATLAQVIAIALIGCAVGAATAGRIADRIGRIRCMQIAAVLFTASAIGSALPFALWDLAFWRVIGGFAIGMASVIGPAYIAEVAPAAYRGRLGSFQQAAIVIGIAISQLVNWAILNAAGGDQRGKLLGLEAWQVMLGVMVVPAVLYGLLSFAIPESPRYLIEAGKDARAREVLEEVEGKEIDLDARVEEIRLAMYREEKPSFKDLLGGTFFFKPIVWVGIGLSVFQQFVGINVAFYYSATLWQSVGVDPTDSFLYSFTTSIINIIGTVIAMIFVDRVGRKPLAIIGSVGMVIGLALEAWAFSYDLVDGKLPATQGWVALIAAHVFVLFFALSWGVVVWVFLGEMFPNRIRAAALGVAASAQWIANWAITASFPSLADWSLSGTYIIYTVFAALSIPFVLKFVKETKGKALEEMG

SEQ ID NO: 8020 - DNA, 1230 bp, Coxiella burnetii
  CDS (1)..(1230)
atgaatggatttgttgtcagtgccgtactcatcggcgcttttttgggagcgctttttagcggccatttggctgattacattggacgaaaacgtttactcattatcgatgctttgatttttattgttggcacagccatttccagtatgactgtctccattagctggttggtaattggacgtattattgtcggcattgctattggcatcgcttcttacagtgcgccgctttatatttctgaaatctctccccctcatcgccgcggtgctttagtttcgcttaatcagttggccgttacgatcggaatttttctttcgtacgtagtagattattattttgctcgccacgacgcttggcgctcgatgtttgccgctggtgtcatcccggccgctttgttattgctcggtatgatagtgttgccctacagtcctcgctggatattctcccgcggtcacgaagaaaaggctttgtggattttgcgaaaattgcgtggccacggtccccatgcggaacaagaattagagcatatccgcgctagtttgcagcagcaaaaaggcgactggagaacattattttcaaaaatcatccgtcctacgctttttatcgctatcggtttagcggtatttcaacaagtaacgggaattaacacggtactctactacgcccctaccattttaaaaatgactggttttcaggcttcacaaaccgctattttggcgacgatgggtatcggtgcggtgttggtcattatcaccattatcagtctgccattaatcgattcgctcggacgacgcccgttattattcatcggcgttggtgccatgacagttagtttgctcgtcttaagctggtcgtttaaagtgcacgggcatatggattatatgcgatggatcgcctttgggagcttattagtgtttatttcgggattttcaattagcttaggcccgatcatgtggctgatgttttctgaaattttcccgctgagagttcgtgggttaggagcgagcatcggagcttgcaccaactgggcatcgaactggttagttactataacgtttttaacattgatcgaatatcttggtcctagcggtaccttttttatttattttattattagcgtgattactcttattttcatttacacttccgtaccagaaaccaaaggggtaaccttggagcaaattgaagagaatctctatgcaggaaaagacatgcgttatttaggaaaataa

SEQ ID NO: 8021 - protein, 409 aa, Coxiella burnetii
MNGFVVSAVLIGAFLGALFSGHLADYIGRKRLLIIDALIFIVGTAISSMTVSISWLVIGRIIVGIAIGIASYSAPLYISEISPPHRRGALVSLNQLAVTIGIFLSYVVDYYFARHDAWRSMFAAGVIPAALLLLGMIVLPYSPRWIFSRGHEEKALWILRKLRGHGPHAEQELEHIRASLQQQKGDWRTLFSKIIRPTLFIAIGLAVFQQVTGINTVLYYAPTILKMTGFQASQTAILATMGIGAVLVIITIISLPLIDSLGRRPLLFIGVGAMTVSLLVLSWSFKVHGHMDYMRWIAFGSLLVFISGFSISLGPIMWLMFSEIFPLRVRGLGASIGACTNWASNWLVTITFLTLIEYLGPSGTFFIYFIISVITLIFIYTSVPETKGVTLEQIEENLYAGKDMRYLGK

SEQ ID NO: 8022 - DNA, 1407 bp, Shigella flexneri
  CDS (1)..(1407)
atggagggcatcatgcctgacgctaaaaaacaggggcggtcaaacaaggcaatgacgtttttcgtctgcttccttgccgctctggcgggattactctttggcctggatatcggtgtaattgctggcgcactgccgtttattgcagatgaattccagataacttcgcacacgcaagaatgggtcgtaagctccatgatgttcggtgcggcagtcggtgcggtgggcatcggctggctctcctttaaactcgggcgcaaaaagagcctgatgatcggcgcaatcctgtttgttgccggttcactgttctctgcggctgcgccaaacgttgaagtactgattctttcgcgcgttctgctggggctggcggtgggtgtggcctcttataccgcaccactgtacctgtcagaaattgcgccggaaaaaattcgcggcagtatgatctcgatgtatcagttgatgatcactatcgggatcctcggtgcttatctttctgataccgccttcagctacaccggtgcatggcgctggatgctgggtgtgattatcatcccggcaattttgctgctgattggtgtcttcttcctgccagacagcccacgttggtttgccgccaaacgccgttttgttgatgccgaacgcgtgctgctacgcctgcgtgacaccagcgcggaagcgaaacgcgaactggatgaaatccgtgaaagtttgcaggttaaacagagtggctgggcgctgtttaaagagaatagcaacttccgccgcgcggtgttccttggcgtactgttacaggtaatgcagcaattcaccgggatgaacgtcatcatgtattacgcgccgaaaatcttcgaactggcgggttataccaacaccaccgagcaaatgtgggggacagtgattgtcggcctgaccaacgtacttgccacctttatcgcaatcggccttgttgaccgctggggacgtaaaccaacgctaacgctgggcttcctggtgatggctgctggcatgggcgtactcggtacaatgatgcatatcggtatccactctccgtcggcgcagtatttcgccatcgccatgctgctgatgtttattgtcggttttgccatgagtgccggtccgctgatttgggtactgtgctccgaaattcagccgctgaaaggccgcgattttggcatcacctgctccaccgccaccaactggattgccaacatgatcgttggcgcaacgttcctgaccatgctcaacacgctgggtaacgccaacaccttctgggtgtatgcggctctgaacgtactgtttatcctgctgacattgtggctggtaccggaaaccaaacacgtttcgctggaacatattgaacgtaatctgatgaaaggtcgtaaactgcgcgaaatcggcgctcacgattaa

SEQ ID NO: 8023 - protein, 468 aa, Shigella flexneri
MEGIMPDAKKQGRSNKAMTFFVCFLAALAGLLFGLDIGVIAGALPFIADEFQITSHTQEWVVSSMMFGAAVGAVGIGWLSFKLGRKKSLMIGAILFVAGSLFSAAAPNVEVLILSRVLLGLAVGVASYTAPLYLSEIAPEKIRGSMISMYQLMITIGILGAYLSDTAFSYTGAWRWMLGVIIIPAILLLIGVFFLPDSPRWFAAKRRFVDAERVLLRLRDTSAEAKRELDEIRESLQVKQSGWALFKENSNFRRAVFLGVLLQVMQQFTGMNVIMYYAPKIFELAGYTNTTEQMWGTVIVGLTNVLATFIAIGLVDRWGRKPTLTLGFLVMAAGMGVLGTMMHIGIHSPSAQYFAIAMLLMFIVGFAMSAGPLIWVLCSEIQPLKGRDFGITCSTATNWIANMIVGATFLTMLNTLGNANTFWVYAALNVLFILLTLWLVPETKHVSLEHIERNLMKGRKLREIGAHD

SEQ ID NO: 8024 - DNA, 1927 bp, Prunus cerasus; identical to SEQ ID NO: 441
  CDS (56)..(1585)

SEQ ID NO: 8025 - protein, 509 aa, Prunus cerasus; identical to SEQ ID NO: 442

SEQ ID NO: 8026 - DNA, 1838 bp, Medicago truncatula
  CDS (112)..(1650)
cccaaccagcatagaattaaactaacagtgattcacccataaagttaagtttggtgctatattttagaaccttaaaggtagatatatccttagacaaaacagcgttcgaaaatggctggtggggttttaccagtggatagtacaccagtggcagtaactgccatcaatattggtggcaagttaacactctcaatcatcattacctgcatagttgctgcatccggtggccttctttatggatatgatctcggagtttcaggaggtgttacaacgatggtgccatttctccaaaaattctttccagacattctgagaaaggcagccagtgccgaagtgaatatgtattgtgtgtatgatagtcaaatattgacactatttacgtcttctctttatctagctggattagtgtcatccattgcagctagcaaagtcacggcggcttatggtcggagaaacgtcatcataataggaggtgctctcttcattgccggtggcgccattaatggtggttcggaaaatatccccatgctcattttgggtcgtgttcttcttgggtttggggttggtttcactaatcaagctgcaccgttgtacctatctgaaactgctcccccaaaatggcgaggcacttttaacacgggctttcagttcttcttgggaattggtgtagtcgctgccggctgcataaactacgccacggccaagcacacatggggatggagactctctcttggacttgcagtggttcctgcagctgtgatgacaatcggttccttcctcattaccgatacaccaaacggcttggtagaacgtggtaagatagagcaagccaaacaagccttacgcaaaattagaggatcctcggttgatattgaacccgagttagaagaacttatcaagtggacagaaattgcgaaatcagtgcaacaagagccctttaaaaccatattaaaaagggaatatcgacctcacttggtgatggcatttgcaatcccgtttttccaacagcttacagggatcaatattgtagccttttattcacccaacctctttcactctgtgggttttggacacgacggagctttactttccgccattatacttggatctgttagccttttgtctaaccttatctctgctggtattgttgatcgaattggtcgaagattcttgttcatatctgggggaattatgatgcttgtctgcttgattgctgtgtccattgtcctggcagtggtgactggtgttgatggtacaaaggacatatccaagggcaatgcaatagtggtattggtgctattgtgtttctactctgcaggttttggttggtcatggggtccattaacatggcttattccaagtgagattttcccagtaaaaataagaaccacaggacaaagcatagctgttgctgtgcaattcataataatctttgtgttatcgcaaacattcttgacaatgttatgccacatgaagtttggggccttcgtcttctatgctttttgggttattgtgatgactctgtttgttatcttcttcttgcctgagaccaaaggaattcctttggagtcaatgtacactatatggggcagacactggttttggtctcggtatgttaaaggacaagaggtcctagaaaatctcccatgaagtttttaacactttttatgattgatttattatttttaaagaagtcaatgcacatgcattatatcttgacaaaattgtgcagcattggcttcataaaaataaatcaataataaaagaaatgtaatcaataataacgtctcaaaaataatgtattgattgttaatgttaaaaaaaaaaaaaaaaaaaaa

SEQ ID NO: 8027 - protein, 512 aa, Medicago truncatula
MAGGVLPVDSTPVAVTAINIGGKLTLSIIITCIVAASGGLLYGYDLGVSGGVTTMVPFLQKFFPDILRKAASAEVNMYCVYDSQILTLFTSSLYLAGLVSSIAASKVTAAYGRRNVIIIGGALFIAGGAINGGSENIPMLILGRVLLGFGVGFTNQAAPLYLSETAPPKWRGTFNTGFQFFLGIGVVAAGCINYATAKHTWGWRLSLGLAVVPAAVMTIGSFLITDTPNGLVERGKIEQAKQALRKIRGSSVDIEPELEELIKWTEIAKSVQQEPFKTILKREYRPHLVMAFAIPFFQQLTGINIVAFYSPNLFHSVGFGHDGALLSAIILGSVSLLSNLISAGIVDRIGRRFLFISGGIMMLVCLIAVSIVLAVVTGVDGTKDISKGNAIVVLVLLCFYSAGFGWSWGPLTWLIPSEIFPVKIRTTGQSIAVAVQFIIIFVLSQTFLTMLCHMKFGAFVFYAFWVIVMTLFVIFFLPETKGIPLESMYTIWGRHWFWSRYVKGQEVLENLP

SEQ ID NO: 8028 - DNA, 1764 bp, Datisca glomerata
  CDS (79)..(1650)
cccttctctctttatctccttttcatcactcccctctttctctcctcgcaaaagaagtcagagataaaggacgaaaacatgccggccgtcggaggaatcgttgtcggtggcagtaaaaaggagtatcccggcaaccttactccttatgtcaccataacatgcattgttgccgctatgggtggtctgattttcggttacgatattggaatttcaggtggggtgacgtcaatggattcattcttgaagaaattcttcccggcggtttaccggaaaaaagagttggattcgacgacgaaccagtactgtcagtacgacagtcagactctgacgatgttcacgtcttctctttatttggctgctctgctcgcttcgatagtggcttccaccatcacccgtaaattcggcaggagattatccatgctcttcggcggcattctgttctgtgccggtgctatcatcaatggcttcgcccaggctgtttggatgctcattctcggtcgtatgtttctcggttttggtattgggttttccaatcagtctgtgccactctacctctcagagatggctccctacaagtacagaggagcattaaacataggcttccaattatcaatcacaattggaatattggtagcaaatgtgttaaattacttctttgccaagatcaggggcggctggggatggcggttgagcttaggtggcgcaatggtcccagcccttatcatcacggtcggatcgctactccttcccgacacacccaactcattaatcgagcgtggcaaccgagacgaagcccgcagcaaactccaaagggttcgaggcgttgatgacgtggacgaggagtttaacgatctggtggcggcaagtgaagagtcaaagcaagtggaacatccttggactaacctgttgaggaggaagtacagacctcatcttgcaatggctatactaattcctttcttccagcaacttaccggcatcaatgtgattatgttttacgcgcctgttttgtttaacaccattgggtttggaagtgatgcttcgctcatgtcggctgtgattactggctgtgttaatgtcgctgggactttggtttctatttatggggttgataagtggggaaggaggttccttttccttgagggtggatttcaaatgttgatttgccaggcggttgtagcagctgcaattggtgctaaatttggagtaaatggaaatccaggagaactgccaaaatggtatgcgatagtggtggtgctgttcatatgcatatatgtagcagggttctcttggtcatggggtcctctaggttggctagtgccaagtgaaagtttccccttagaaatacggtcagctgctcaaagtatcaatgtctctgtcaacatgatcttcacatttgctatagctcaaatcttcttgacaatgctttgccacttgaaattcggtttattcattttcttcgccttcttcgtggttgtcatgtctatcttcgtctacttcttcttgcccgagactaagggaatcccgatcgaagagatgggcagagtatggaagtcacattggtactggtcaagatttgttactgatgctgattacactattggatcaggagttgagatgggaaagggagcgcaggagcttaagaatatttaagtttaatgtttggggggagggttatttttagattatttttttctatctagtaaatagaagtttgggtcaatattaaattaagaacatatgaatgggtcaaatttgatgtatctg

SEQ ID NO: 8029 - protein, 523 aa, Datisca glomerata
MPAVGGIVVGGSKKEYPGNLTPYVTITCIVAAMGGLIFGYDIGISGGVTSMDSFLKKFFPAVYRKKELDSTTNQYCQYDSQTLTMFTSSLYLAALLASIVASTITRKFGRRLSMLFGGILFCAGAIINGFAQAVWMLILGRMFLGFGIGFSNQSVPLYLSEMAPYKYRGALNIGFQLSITIGILVANVLNYFFAKIRGGWGWRLSLGGAMVPALIITVGSLLLPDTPNSLIERGNRDEARSKLQRVRGVDDVDEEFNDLVAASEESKQVEHPWTNLLRRKYRPHLAMAILIPFFQQLTGINVIMFYAPVLFNTIGFGSDASLMSAVITGCVNVAGTLVSIYGVDKWGRRFLFLEGGFQMLICQAVVAAAIGAKFGVNGNPGELPKWYAIVVVLFICIYVAGFSWSWGPLGWLVPSESFPLEIRSAAQSINVSVNMIFTFAIAQIFLTMLCHLKFGLFIFFAFFVVVMSIFVYFFLPETKGIPIEEMGRVWKSHWYWSRFVTDADYTIGSGVEMGKGAQELKNI

SEQ ID NO: 8030 - DNA, 2032 bp, Prunus cerasus; identical to SEQ ID NO: 443
  CDS (74)..(1690)

SEQ ID NO: 8031 - protein, 538 aa, Prunus cerasus; identical to SEQ ID NO: 444

SEQ ID NO: 8032 - DNA, 1784 bp, Malus domestica
  CDS (116)..(1561)
gcacgaggataagaccatcaccggccaagcccaaaacacgagtatcgcagactttgatcccccaaagaaagccaagacaaagaagtttgccattgcctgtggcgttttggcttcaatgacttcaatcttacttggttatgatattggtgtaatgagtggagcgtcactcttcattaaagaaaacctcaaaatcagtgatgttcaagtcgaaattatgaacggtactttgaacctctactcccttattggctccgccttggctggtagaacctccgactggattggacgccggtacaccatagtacttgccggaacaatcttctttattggagctctcctcatgggctttgcccctaactacgccttcctcatgttcgggcgatttgttgccggagttggagttggctacgctcttatgatagctcccgtctacactgccgagatctctccggcctcgtttcgtggcttcctcacatcttttcccgaggtgtttgttaatattggcatattactggggtacgtatccaactatgccttctccaagctccccattcacttgaactggaggatcatgctcggtgtcggcgcatttccatctgttattcttgccgtcggtgtcttagccatgcccgagtcacctcgttggctcgtcatgcaagggcgacttggagacgccaagcgagttctacaaaaaacctcagaatccatagaagagtgtcagctcagactagatgacatcaaagaagccgcaggaatccccaaagagtccaacgacgacgttgttcaggtatctaaacgcagccacggtgaaggcgtgtggaaagaattgctccttcatcccacaccagccgttcgccatattttaatcgcagctcttggtatccacttctttgaacaatcgtcaggtatagactctgtcgttttgtacagccccaggatcttcgaaaaggcaggaatcacctcctacgatcacaagctgctcgcaacggtggctgttggagttgtcaagactatttgcatcttagtcgccacggttttccttgataagtttggaaggcgtcctttgcttttgactagcgtggctggaatggtattttcacttagctgtctcggtgcaagccttacgatcgttgatcaacagcacggaaagatcatgtgggccatcgtgttgtgcatcaccatggtattacttaacgttgcgtttttctccatcgggctggggccgattacatgggtctacagctccgagatcttcccactgcagctgcgcgcgcaagggtgtagtatgggagtggccgtaaatagggtgacgagtggggtcatctccatgacttttatttcattgtataaggccatcacgattgggggagccttctttctttacgcgggaattgctgcggttggttgggtcttcttttatatgttgtacccagagacacagggccgaacccttgaagatatggaggtattgtttggtaaataccataagtggagagaagcaaatgccttgcttcagaaagctaagcaagttgatggcgacgacaagggtcaagtccactaggcataaaatggcgaatgcttaaataatcggtgtttgatgcacttgtttcctgataagaatttctttctttcgaaacgtcataggatatttcacttatatatgtgtaactgttgccaattacatcttatcttccctttcaagttggaagaacttgtgtgtaaagaagacattatgttgtcatatatgtttatacaagtttgatcttcaaaaaaaaaaaaaaaaa

SEQ ID NO: 8033 - protein, 481 aa, Malus domestica
MTSILLGYDIGVMSGASLFIKENLKISDVQVEIMNGTLNLYSLIGSALAGRTSDWIGRRYTIVLAGTIFFIGALLMGFAPNYAFLMFGRFVAGVGVGYALMIAPVYTAEISPASFRGFLTSFPEVFVNIGILLGYVSNYAFSKLPIHLNWRIMLGVGAFPSVILAVGVLAMPESPRWLVMQGRLGDAKRVLQKTSESIEECQLRLDDIKEAAGIPKESNDDVVQVSKRSHGEGVWKELLLHPTPAVRHILIAALGIHFFEQSSGIDSVVLYSPRIFEKAGITSYDHKLLATVAVGVVKTICILVATVFLDKFGRRPLLLTSVAGMVFSLSCLGASLTIVDQQHGKIMWAIVLCITMVLLNVAFFSIGLGPITWVYSSEIFPLQLRAQGCSMGVAVNRVTSGVISMTFISLYKAITIGGAFFLYAGIAAVGWVFFYMLYPETQGRTLEDMEVLFGKYHKWREANALLQKAKQVDGDDKGQVH

SEQ ID NO: 8034 - DNA, 2012 bp, Malus domestica; identical to SEQ ID NO: 445
  CDS (104)..(1579)

SEQ ID NO: 8035 - protein, 491 aa, Malus domestica; identical to SEQ ID NO: 446

SEQ ID NO: 8036 - DNA, 2178 bp, Mesembryanthemum crystallinum
  CDS (512)..(2008)
ctcgttctctttctctctctctctcctctcttgttgttgttgctcccctacacggcagagtagagtagaccattctctgctttgtccttcatctctctctcatttctctcttttcttcaacactgtcacgttcacaacaagcaaaataagtcacgcatcataaaatctcattcacagaaaccagaaaaaaatcactgttactactctttgatcgcttgaaatttttgtgaacgtttcagtcactcaaattgcttcttaaaccagtgttttagtttataaagcttcaatctttgttgggtttttttttctttccattttctgctgagtaagattctgggttttacttcttcaaaactcatttttggacgatttctggggttaaaacccttttatatgtgaattaattttctgggttcattttatttctcatcaatttgggcttgattactgaatttcttgaatttgattctactctgcatttgggaattttgtttggaaaaatttggtgatcatgacacttgattcaatccctgggagttctgggtacttggattcataccctgagaggagaattacgtactttgggaacaaatttgttctggctttgactgttactgctggaattggtggattactctttggctatgatacaggtgtgatatcaggggcactcctgtacataaaagatgaatttccggcagtcaaaaacagcagcttcttgcaggaaacgattgtgagcatggcattggtcggtgcaatgattgggtctgccactgctggatggattaacgatgtatatgggcgtaaaaaagccactcttcttgctgattttatcttcgctattggtgccgtagttatggctgctgctcccgatccatatattctcatagtgggacgattcctggttggattgggtgtcgggctggcatcagtttgtgctcctgtttatattgctgaagcatctcctacggaagtaagaggagggcttgttagcacaaatgtgctaatgataacttttggacaatttgtttcctactgcgtgaaccttgcttttactgaggttcctggaacttggcgttggatgcttggggtatcgggcgtgcctgctgtcttgcaattcggctttatgcttcttttgccagagtccccccgctggctttacttgaagcatgagaaatccaaagctgctgcagtactcgcaaagatatacgacccctttaggctggaagacgagcttgatttgcttgctgctgctgaggaggaggagaagaacaaaccagctgtccatatatcagatgttttcacaaaaagagaactcagatatgcatttattgctggtggtggtctcctggcatttcagcaacttgcgggaatcaacaccgtcatgtattacagccctacgattgtccagatggctggtttcagttccaaccagttagccctcctaatctctctcatcgtcgctgccatgaacgcggtcggaacggtccttggtatataccttatcgaccacatggggcgacgcaaactagccctcacgagcctctcgggcgtgtttgtcgccctcgtcatgctcacgatctccttcatgctccgttcatcgggccccacctccgccctctactcgtggctcgctgtcttggggcttgccctttacattgccttctttgctccagggatgggacctgtcccatgggccatcaactctgagatatacccccaggcttacaggggtttgtgtgggggtatgggtgccacgatctgttggatcgttaacctctttgtttcggagacgttcctctccatcgcagacgccattggaaccggtcccacattcctgataatcgcaggcattgtgattgttgcgtttgtattcgtggtttgcttcgttcccgagaccaaggccttgacattcgaggaggtcgaccagatgttcatggacagagcttatggaaccgaggaaaatactcaaagccttcttgaatcctcgaatcggtctggaaattagcctatttgtcgtgaatcgcgatgaacgtgccatatttatcacaccaccctagttatggctacatgttgttgattatttttgcctcattagtccacatatggagttattataaagagttgtttatgctattgagcagagtcttctttatgtcatgtaaatgatcactatga

SEQ ID NO: 8037 - protein, 498 aa, Mesembryanthemum crystallinum
MTLDSIPGSSGYLDSYPERRITYFGNKFVLALTVTAGIGGLLFGYDTGVISGALLYIKDEFPAVKNSSFLQETIVSMALVGAMIGSATAGWINDVYGRKKATLLADFIFAIGAVVMAAAPDPYILIVGRFLVGLGVGLASVCAPVYIAEASPTEVRGGLVSTNVLMITFGQFVSYCVNLAFTEVPGTWRWMLGVSGVPAVLQFGFMLLLPESPRWLYLKHEKSKAAAVLAKIYDPFRLEDELDLLAAAEEEEKNKPAVHISDVFTKRELRYAFIAGGGLLAFQQLAGINTVMYYSPTIVQMAGFSSNQLALLISLIVAAMNAVGTVLGIYLIDHMGRRKLALTSLSGVFVALVMLTISFMLRSSGPTSALYSWLAVLGLALYIAFFAPGMGPVPWAINSEIYPQAYRGLCGGMGATICWIVNLFVSETFLSIADAIGTGPTFLIIAGIVIVAFVFVVCFVPETKALTFEEVDQMFMDRAYGTEENTQSLLESSNRSGN

SEQ ID NO: 8038 - DNA, 1569 bp, Oryza sativa
  CDS (1)..(1569)
atggcagctgcaaccgcagctgatgttgccgaggatacggccagtgtgtactccggcaagcttaccctctacgtcttcctcacctgcggcgtcgcggcgaccggcggcctcatcatcggctatgacatcggcatctctggtggtgtgacatcgatggacacgttcctggggaagttcttcccgtcggttctccaccaagaacagacggcgcagggcacaagccagtactgcaagttcaacagccagccgctgaccgcgttcacctcgtcgctgtacctcgcggcgctcgtggcctccttcttcgtcgcgtccttcacgcgcgcgctgggcaggaagtggtccatgttcggcggcggcgtctccttcctcgccggtgccaccctcaacggcgccgcgcggaacgtcgccatgctcatcgtcggccgcatcctcctcggcatcggcgtcgccttctgtggtctgtccactccgatatacttgtctgagatggcgccaccgcggctgcgtggcatgctcaacatcggcctccagctgatgatcaccgtgggcatcttctccgccaatctcgtcaactacggtgcggccaagatcaggggtggctgggggtggcgtgtcagcctcggcctcgctgccgccccggcatgcgtcatcgccgtgggctcgctcttcctcccggactcaccgagctccctcatcaaccgtggccgccacgagcaggcgcggcgggtgctgcggcgcatccgtggcaccgacgaggtggacgacgagtacggcgacctcgtcgcagcagccagcgagatcgaggtgtattccggctgctccgcgagacgacggccgtggcgcgacgtcctgcagcgcaggtaccggccgcagctcgccatggccgtcctcatccccttcttccagcagctcaccggcatcaacgtcatcatgttctacgcgcccgtgctgttcaagaccatcggcctcggaggagacgcgtcgctcatgtcggcggtcatcaccgggctggtcaatatcgttgcaacgttcgtgtccatcgccaccgtcgacagccttggccgacgcaagctcttgttccagggaggctgccagatgcttgtgagccaggttatcattggaacgctgatcggtgtggtgtttggtacgagtggcgatggcaacatctcgagggcgttggcggtctgcatcgtggtgttcatctgcgtctacgtcgccggcttcgcttggtcgtggggcccgcttggcgtcctcctgccgagcgagatcttcccgctggaggtccggccggcggggcagagcatcagcgtggccgtgaacatgctctgcacgttcgccgtcgcggaggccttcctcccgatgctctgccacatgaggttcggcctcttctacttctttagcggatgggtgctcgtgatgacgctcttcgtctcggccttcctgcctgagaccaagggcgtgccgatcgagaagatgaccgtcgtgtggagaacgcactggttttggggtagattttactgtaaccaggatgcagatgcacacgttcaagtggcaaacagcaaagtttga

SEQ ID NO: 8039 - protein, 522 aa, Oryza sativa
MAAATAADVAEDTASVYSGKLTLYVFLTCGVAATGGLIIGYDIGISGGVTSMDTFLGKFFPSVLHQEQTAQGTSQYCKFNSQPLTAFTSSLYLAALVASFFVASFTRALGRKWSMFGGGVSFLAGATLNGAARNVAMLIVGRILLGIGVAFCGLSTPIYLSEMAPPRLRGMLNIGLQLMITVGIFSANLVNYGAAKIRGGWGWRVSLGLAAAPACVIAVGSLFLPDSPSSLINRGRHEQARRVLRRIRGTDEVDDEYGDLVAAASEIEVYSGCSARRRPWRDVLQRRYRPQLAMAVLIPFFQQLTGINVIMFYAPVLFKTIGLGGDASLMSAVITGLVNIVATFVSIATVDSLGRRKLLFQGGCQMLVSQVIIGTLIGVVFGTSGDGNISRALAVCIVVFICVYVAGFAWSWGPLGVLLPSEIFPLEVRPAGQSISVAVNMLCTFAVAEAFLPMLCHMRFGLFYFFSGWVLVMTLFVSAFLPETKGVPIEKMTVVWRTHWFWGRFYCNQDADAHVQVANSKV

SEQ ID NO: 8040 - DNA, 1724 bp, Oryza sativa
  CDS (1)..(1578)
atggcggcgaaggttgggttgttcccctcgtcgtcactcaccaccagcccccacgccatcgcggctgcgccgaccaacgctccccgcccacgcggggctcgtggattggcgtctccaggtcgatccgcggcggcgatggacgccttccacgtgtcgtgcggacacatgcgcagggcggcgaggcgccctccagcggtggcgccggagatggcgcggccgggaaggagttctcgtggtcgtccatcatccttccgtaagatagctcccctctccatctctttgtctgctgaactcagtggaaccacttggttcagcctgtcatctatacagctagggctcgtggcaagcggttcactctatggtgctcttggtggttcgcttcttgcatatcgcgttgccgattttctaggaagaagaatagaactggtcacagctgcagctttatatatttctggtgctctggtcactggatttgcacctgattttgtacttctgatcataggccgtctcctctatggtatcggtattggtttggcgatgcacggtgcacctctttatattgcagagacttctccttcgcgaatacgtgggacattgatatctttaaaggagttgtttattgtattaggaatactgactggataccttgtagggagtcttgaaattgatgtggtaggaggatggcgttatatgtttggttttggtgctccactggcagtaataatggctattggtatgtggaatttaccgccttcaccaagatggcttcttctcagggcagttcaaggaaaggcgtcagtggaagataacaaaaagaaggcaattcaggcattgagatcactgagggggcgctttaggagtgacagggtcttagcagatgagattgatgatacccttctctctattaaggctgcttatgcagaacaagaatctgaagggaacatttggaagatgtttgagggagctagcttgaaggcactcatcattggaggaggactggttctcttccagcagataacaggccagccaagtgttctatactatgcaacttccattcttcagactgctgggtttgcagctgcatctgatgctgccaaagtatcaattttgattgggttgttcaagttgttgatgacaggtgttgcagtatttaaagttgacgatcttggaaggcgtccactacttataggaggcattggtggaatagctgtttcactgttcttattagcagcttactacaagattctgaacagcttcccttttgtcgctgttggtgctttacttctgtatgtcggttcttaccaggtatcgtttggtccaataagttggctaatggtttctgagatcttcccactccgaacaagaggacgtgggatcagccttgcagtacttacaaatttcggctcaaatgcactggtgacatttgccttttcacccttgcaggaattccttggaccagccaatattttccttctatttggagccatatcgttgctctcccttgtgtttgtcatcctaaaagttccagagactaaaggacttacattggaggagatcgaatccaagctcctgaagtaagctcactggtactcaagttgtatgtgtgtgtgtgttttttttgagggcaagttgctatgtgttcattagatgaggttgatacgtgtcggtgtaaatttgttcagtcgatttatgtgattaatatagtcgtacatgtagtattttgt

SEQ ID NO: 8041 - protein, 525 aa, Oryza sativa
MAAKVGLFPSSSLTTSPHAIAAAPTNAPRPRGARGLASPGRSAAAMDAFHVSCGHMRRAARRPPAVAPEMARPGRSSRGRPSSFRKIAPLSISLSAELSGTTWFSLSSIQLGLVASGSLYGALGGSLLAYRVADFLGRRIELVTAAALYISGALVTGFAPDFVLLIIGRLLYGIGIGLAMHGAPLYIAETSPSRIRGTLISLKELFIVLGILTGYLVGSLEIDVVGGWRYMFGFGAPLAVIMAIGMWNLPPSPRWLLLRAVQGKASVEDNKKKAIQALRSLRGRFRSDRVLADEIDDTLLSIKAAYAEQESEGNIWKMFEGASLKALIIGGGLVLFQQITGQPSVLYYATSILQTAGFAAASDAAKVSILIGLFKLLMTGVAVFKVDDLGRRPLLIGGIGGIAVSLFLLAAYYKILNSFPFVAVGALLLYVGSYQVSFGPISWLMVSEIFPLRTRGRGISLAVLTNFGSNALVTFAFSPLQEFLGPANIFLLFGAISLLSLVFVILKVPETKGLTLEEIESKLLK

SEQ ID NO: 8042 - DNA, 1422 bp, Pseudomonas syringae
  CDS (1)..(1422)
atgtcttcaagtagcactacagcagcggctgacacgcaaggtcggcaaaacgcctcgcctaaccgactgattttcatctccgtacttgtggcaaccatgggcgcgctcgcgtttggttatgacaccggtattatcgccggcgcattgcccttcatgacgctgccggccgatcagggcgggctgggtttgaatgcctacagcgaagggatgatcacggcttcgctgatcgtcggtgcagccttcggctcactggccagtggctatatttccgaccgtttcggacgacgcctgaccctgcgcctcctgtcggtgctgttcatcgcgggtgcgctgggtacggccattgcgccgtccattccgttcatggtcgccgcgcgcttcctgctgggtatcgcggtgggtggcggctcggcgacggtgccggtgttcattgccgaaatcgccggcccctcgcgtcgtgcgcggctggtcagccgcaacgaactgatgatcgtcagcggccagttgctcgcctatgtgctcagcgcggtcatggccgcgctgctgcacacgccgggcatctggcgctatatgctggcgatcgcgatggtgccgggggtgttgctgctgatcggcaccttcttcgtacctccttcgccgcgctggctggcgtccaaaggccgttttgacgaagctcaggatgtgctggagcaactgcgcagcaacaaggacgatgcgcagcgtgaagtggacgaaatgaaagctcaggacgagcaggcgcgcaatcgtcccaaggcaaaggaattgctgcgtcagcgctgggtcatcaagctgctgctgatcggcatcggtctgggctttaccgcacagctcaccggcgtgaacgccttcatgtattacacaccgatcatcctcaagaataccgggatgggcaccaacgctgcgctgacggccaccatcggcaacggcgtggtgtcggtcatcgcgaccctgctgggcatctgggcaatcggtcgttatggtcgtcgccacttgctcatgaccggtctggtgatggtcatcctgatgcaggccgcgcttggctgcgtactgcaattcatgccgcagaacctgacccagagctacacggccctcgcctgcattctggtgttcctgctgttcatgcaaatgtgcatttcgccggtgtactggctgttgatgtcggaactgttccccatgcaggtgcggggtttgctgaccggcacggcggtgtcgatgcagtggctgttcaacgcctcggtggcgtttaccttcccgattgcagtggataccatcggcaacccgacgttcttcatctttgcggccatcaacgtcggctcgctgatcttcgtgttcctgtgccttcccgagaccaagggcaagtcgcttgaacagatcgagaaacacctgaagaaagagctgtaa

SEQ ID NO: 8043 - protein, 473 aa, Pseudomonas syringae
MSSSSTTAAADTQGRQNASPNRLIFISVLVATMGALAFGYDTGIIAGALPFMTLPADQGGLGLNAYSEGMITASLIVGAAFGSLASGYISDRFGRRLTLRLLSVLFIAGALGTAIAPSIPFMVAARFLLGIAVGGGSATVPVFIAEIAGPSRRARLVSRNELMIVSGQLLAYVLSAVMAALLHTPGIWRYMLAIAMVPGVLLLIGTFFVPPSPRWLASKGRFDEAQDVLEQLRSNKDDAQREVDEMKAQDEQARNRPKAKELLRQRWVIKLLLIGIGLGFTAQLTGVNAFMYYTPIILKNTGMGTNAALTATIGNGVVSVIATLLGIWAIGRYGRRHLLMTGLVMVILMQAALGCVLQFMPQNLTQSYTALACILVFLLFMQMCISPVYWLLMSELFPMQVRGLLTGTAVSMQWLFNASVAFTFPIAVDTIGNPTFFIFAAINVGSLIFVFLCLPETKGKSLEQIEKHLKKEL

SEQ ID NO: 8044 - DNA, 1467 bp, Lactobacillus plantarum
  CDS (1)..(1467)
atgtctgctgaaaaaagtatttcatctgatcatgtaccgctatcagatccagctttaaaaaccatcaatcgaaatgccgggcgtaatctgaatcatattgcatttatttcaacacttggcggtttattatttggggttgataccggtgtcattaacggtgcaatcggatatatggcgacccccgcggaattaaacctctcgcctaataatgaaggactagtcacgagtggcatcactcttggtgctgcattcggtgcagtcttcgcaggacacctctcagaccgaattggtcgaaaacgacttttaaagtacctagccttgcttttctttgtttgcacattagcttgttctcttgcgccgaacgcactgtttatgatcatctcccgggtcctactcgggctagctgtgggtggtgcctccgttatagtgccaacatatctatcagaaatatccacccctgaaataagaggacgtctagtaacacaaaacgagttaatgattgttaccggacaactattagcctttatcgtaaatgctattttaggtaattggtttggccatatttctaatatttggcgttatatgattggctttggcatgattccagctgttgcactcttcttcggtatgatggttgtgccagaatcaccgcggtggctagtaatggtcaatcagcttgataatgcctttgattctcttaggaaaatccgctcccatcccgaaacatgtaacgaagaaattacccagattcaggatacattgaatcaagaaagcgagattaagcaggccactttcaaggacctatcaacaccatggattcgacgcctggtctttattggaatcggtcttggcgtaatgcagcaatttattggcattaatatcatgatgtattacggaacaacaatcctgacgaactccggattcgcacataatgccgctctaattgcaaatataggtaatggtctagtgtcggttatcgctacttttatcggcatgtcaattatgaatcgcgtgaatagacgaagcatgctaatcgctggtattatcggcactaccacttcacttatcttaatcgttggtgtttctgcattccttagccagagcccgctgttaccaatacttgtcgttctttgcaccatgatgtttttgggctttttccaaggttttatctctccattagtttggctcttgctctctgaaatatttccacaaaacttacgtggactgggaatgggtgtctcgacctttttcctgtggtttgcaaactttcttgtaggctactttttcccaatactattgagtgcagtcggaatgacatggacatttttgatcttcgtatttttcaatattctgtcatttatcttcgcatataaatatgcacctgaaacgcgtggaaaatcacttgaattgatccaaatggaatttaaatatggtgataccacgggaattaaccccgaagataaataa

SEQ ID NO: 8045 - protein, 488 aa, Lactobacillus plantarum
MSAEKSISSDHVPLSDPALKTINRNAGRNLNHIAFISTLGGLLFGVDTGVINGAIGYMATPAELNLSPNNEGLVTSGITLGAAFGAVFAGHLSDRIGRKRLLKYLALLFFVCTLACSLAPNALFMIISRVLLGLAVGGASVIVPTYLSEISTPEIRGRLVTQNELMIVTGQLLAFIVNAILGNWFGHISNIWRYMIGFGMIPAVALFFGMMVVPESPRWLVMVNQLDNAFDSLRKIRSHPETCNEEITQIQDTLNQESEIKQATFKDLSTPWIRRLVFIGIGLGVMQQFIGINIMMYYGTTILTNSGFAHNAALIANIGNGLVSVIATFIGMSIMNRVNRRSMLIAGIIGTTTSLILIVGVSAFLSQSPLLPILVVLCTMMFLGFFQGFISPLVWLLLSEIFPQNLRGLGMGVSTFFLWFANFLVGYFFPILLSAVGMTWTFLIFVFFNILSFIFAYKYAPETRGKSLELIQMEFKYGDTTGINPEDK

SEQ ID NO: 8046 - DNA, 1413 bp, Lactobacillus plantarum
  CDS (1)..(1413)
atggacgttagcgaaagtacaaacaaaaagagcaactcgcacacaggtttcctctggttggcgacattcatagccgcaatggggtcgttactctttgggtatgacacagggatcgttaatggatctcttgagtttatggcggtaaaaggacagcttgatttaactgcatttcaacaaggaattgtttcttcaggattgactcttggggccgcttttggtgcgattattggcggaccatttgcagacaaaattgggcgaaaaaagattttaactatcttaggtattatcttttcagtcggtgccctgggatgtgcatttgccacaaacattactattttaatcgtatttcggtttattttaggtttagcggtaggctctgcatcggctaatgtaccagtatatattgccgaaattgcaccaactgaattacgagggaaaatggtaacaactgcgcaagttatgattgtttctggccaatttgttgcttttggtgttaatgctgctctaacgccattgggtgctcaaaatgctgcaatttggcgctggatgttaggattaggaactattcctggcattatcctttggatcggaatgtaccttatcccagaatcaccaagatggttggtttcgcaggggaagatggataaggcattgggtgtgttacggagaattcgttcggctgccagtgtggaatctgaaatgaaggagattcaggataaggataaggccgataaggaactaaatgctgaacaagcaacgtttaaggagctaattagtaaacgctgggttgtacaaattctgattactggtgcaatgttgggtatcattcaacaatttgccggaattaattctattatgtattatggtggtaaaatcattcaagaatctggatttgatacgactgtcgcggcaatattaaatgccggtaatggattcttgtcgattgttggagctgtcttaggaatgttcacgattgattggttaggtagaagaaaattagagtttgcaggcctaacaatttgtggtattacgctggtttctgctggtgttatccatactgttgcgcctaatgctagctgggctggcattacgattgttgttttagtttatctttatattattttcttccagggtacattaggccccgtcacctggctgattaattcagagatttttccacaaagatatcgtggaattggtactggtattacaatctttgtattatggatcggtaattttattgttggtttgttatccccagtattattggaatggaatatgtcgaatacgttttatatttttgctgtgtgctgtgtattaggtattatctttgttgcgttacgagtacctgagacgaaaggcgtaccgctagaagaaattgaaaaatacttccggactaagtatgacaaatga

SEQ ID NO: 8047 - protein, 470 aa, Lactobacillus plantarum
MDVSESTNKKSNSHTGFLWLATFIAAMGSLLFGYDTGIVNGSLEFMAVKGQLDLTAFQQGIVSSGLTLGAAFGAIIGGPFADKIGRKKILTILGIIFSVGALGCAFATNITILIVFRFILGLAVGSASANVPVYIAEIAPTELRGKMVTTAQVMIVSGQFVAFGVNAALTPLGAQNAAIWRWMLGLGTIPGIILWIGMYLIPESPRWLVSQGKMDKALGVLRRIRSAASVESEMKEIQDKDKADKELNAEQATFKELISKRWVVQILITGAMLGIIQQFAGINSIMYYGGKIIQESGFDTTVAAILNAGNGFLSIVGAVLGMFTIDWLGRRKLEFAGLTICGITLVSAGVIHTVAPNASWAGITIVVLVYLYIIFFQGTLGPVTWLINSEIFPQRYRGIGTGITIFVLWIGNFIVGLLSPVLLEWNMSNTFYIFAVCCVLGIIFVALRVPETKGVPLEEIEKYFRTKYDK

SEQ ID NO: 8048 - DNA, 1401 bp, Lactobacillus plantarum
  CDS (1)..(1401)
atgaataagcagaaaaaggtttccagtaaatttattttcttctttggttcgtttggtggcattctctttgggtatgacattggggtaatgacaggcgcattaccgtttctgaagaccgattgggcattgactaatgcaacattggttgggtgggtgacatcagcagtaatgtttggcgcaatttttggtgctgcaattgccggtcagttggcggatcgactaggtcgtcggcggatgatcttgatgtcatcattgatttttgcaattggctcgattctgtgtggcttttcacctaacaacggaacttactatttgattggcatgcggatcttcttggggttagccgtgggtgctgcttctgcactagtacctgcatatatgtctgaaatggcaccagcacgattgcgcggtagtttatctggaattaatcagaccatgattgtgtcggggatgttaatttcttacattgttgattatattctgaaggatctacccgagaatatgtcatggcggctaatgttaggattggcagcggttccagcgattattctctttctgggagtcttgaagttgccggaatccccacggttcttaattaaagccaatcggttagacgaagcccgtcaagttttatcttttgttcgtaaaccagatgaagttgacagtgaagttaaagcgattcaatcaacagcccaaacggaggctaacaatttagaaaagacctcctgggcaaccttgttcaatgggaaatatcggtacttagtcatggcaggtgttggggttgcagcttttcaacaatttcaaggtgctaatgcaatcttttactacattccgttaatcgttgaaaaggcaaccggtagtgctgcaagttcagcactaatgtggccaattgttcaaggcatcttattagttttaggatcattactttacatttggattgctgaaaaattcaatcggcggactttattgatgttgggtggttccgtcatggcattatcattcctgctaccagctgttattaatagtttggtgccaaatgcaagtccaatgatgattgttgtcttcttatcgatttacgtggctttctactcattcacttgggcaccattgacttgggtgctcgtgggtgaagtctttccgcttgcagttcgcggtcgggcatcaggcttagcttcttcattcaattggattgggtcatgggctgtggggttattattcccaattatgacggcttcaatgtcacaagaagcagtttttgcggtgttcggtgtgatctgtgtattaggagtgctattcgttcgattctgtgttccagaaactcgtggtcactcacttgaagagattgaagcagcaggaacgaatcatcacaaacaagtacccgtacaacaagcgagtcattaa

SEQ ID NO: 8049 - protein, 466 aa, Lactobacillus plantarum
MNKQKKVSSKFIFFFGSFGGILFGYDIGVMTGALPFLKTDWALTNATLVGWVTSAVMFGAIFGAAIAGQLADRLGRRRMILMSSLIFAIGSILCGFSPNNGTYYLIGMRIFLGLAVGAASALVPAYMSEMAPARLRGSLSGINQTMIVSGMLISYIVDYILKDLPENMSWRLMLGLAAVPAIILFLGVLKLPESPRFLIKANRLDEARQVLSFVRKPDEVDSEVKAIQSTAQTEANNLEKTSWATLFNGKYRYLVMAGVGVAAFQQFQGANAIFYYIPLIVEKATGSAASSALMWPIVQGILLVLGSLLYIWIAEKFNRRTLLMLGGSVMALSFLLPAVINSLVPNASPMMIVVFLSIYVAFYSFTWAPLTWVLVGEVFPLAVRGRASGLASSFNWIGSWAVGLLFPIMTASMSQEAVFAVFGVICVLGVLFVRFCVPETRGHSLEEIEAAGTNHHKQVPVQQASH

SEQ ID NO: 8050 - DNA, 1383 bp, Bacteroides thetaiotaomicron
  CDS (1)..(1383)
atgaaaagttataataaaaagtttgtctattccatttgtttggtttctgcgatgggcggtctgctctttgggtatgactgggtggtaatcggaggagcgaaacctttctatgaactctatttcggtattgccgattcgccgacgatgcagggactggctatgagtgtagccttgcttggctgtctgatcggtgctatggtagccggtatgatggctgaccgctatggcaggaaacctctcttgctgatttccgcatttatctttttatcttccgcatacgctaccggtgcattttccgtattcagctggtttttggcagcacgctttttgggaggtatcggcatcggtatcgcttcggggctgtctccgatgtacattgccgaagtagctcctacttccatccgggggaaactggtatccctcaatcaactgactattgtattaggaatccttggcgcacaaatagccaactggctgatagccgagcctatacctgccgactttacgcctgccgatatctgtgcttcatggaacgggcagatgggatggcgctggatgttttggggagcagcatttccggcagcggtattcttgctgctagcctgttttattcccgaaagtccccgttggctggcaatgaaaggcaagagagagaaagcatggagtgtacttagccggataggaggaaaccgctatgcggagcaggaacttcagatggtggaacaaacttctgcttccaagtcggaaggaggattgaaattattgttcagtcgcccgttccgtaaggtactcgtactgggtgttatcgtggctgtgttccagcaatggtgcggtacgaatgtgattttcaattatgcacaggaaatattccagtcggcgggttattcgctgggtgatgtactctttaatattgtggtgaccggtgtagcgaatgtgatctttacgtttgtggctatctatacggtcgaacgtttggggcgccgtgctttgatgcttttgggggctggaggactggcaggtatttatctggttctcggcacgtgttacttttttcaggtcagcggtttctttatggtagtgctggtagtgttggcgatagcttgttatgccatgtctctggggcctatcacgtgggtactgcttgctgagatattccccaaccgcgtgcgtggtgtggctatggcaacctgtactttcgctttgtgggtcggtagtttcacgcttacctacacatttccgttgctgaatactgcattgggcagttacggcacattctggatttattcggctatctgcgtcttcggcttccttttcttcctgcgtgcattgcctgagacaaaagggaaatcgctggagacattggagaaagatctgataaaataa

SEQ ID NO: 8051 - protein, 460 aa, Bacteroides thetaiotaomicron
MKSYNKKFVYSICLVSAMGGLLFGYDWVVIGGAKPFYELYFGIADSPTMQGLAMSVALLGCLIGAMVAGMMADRYGRKPLLLISAFIFLSSAYATGAFSVFSWFLAARFLGGIGIGIASGLSPMYIAEVAPTSIRGKLVSLNQLTIVLGILGAQIANWLIAEPIPADFTPADICASWNGQMGWRWMFWGAAFPAAVFLLLACFIPESPRWLAMKGKREKAWSVLSRIGGNRYAEQELQMVEQTSASKSEGGLKLLFSRPFRKVLVLGVIVAVFQQWCGTNVIFNYAQEIFQSAGYSLGDVLFNIVVTGVANVIFTFVAIYTVERLGRRALMLLGAGGLAGIYLVLGTCYFFQVSGFFMVVLVVLAIACYAMSLGPITWVLLAEIFPNRVRGVAMATCTFALWVGSFTLTYTFPLLNTALGSYGTFWIYSAICVFGFLFFLRALPETKGKSLETLEKDLIK

SEQ ID NO: 8052 - DNA, 1407 bp, Bacteroides thetaiotaomicron; identical to SEQ ID NO: 453
  CDS (1)..(1407)

SEQ ID NO: 8053 - protein, 468 aa, Bacteroides thetaiotaomicron; identical to SEQ ID NO: 454

SEQ ID NO: 8054 - DNA, 1455 bp, Bacteroides thetaiotaomicron
  CDS (1)..(1455)
atgaataatacaacgaacgaaggaagtaaactctacttgtattcgattacttctgttgctattttgggcggtttgctcttcggttatgatacggcggttatatccggcgcggaaaaagggctcgaagccttcttcctgtccgcttccgattttcagtataataaggtaatgcatggcattacttcttccagcgcattgataggctgcgtgctggggggggctttatccggtgtctttgcttcccgtttgggacgtcgtaactcattgcggcttgctgctgtattatttttcctctcggctcttggctcttattatccggaagttcttttcttcgaatacggaaaaccgaatatggatttgttgatagcattcaatctgtatcgtgttctgggaggtatcggagtaggactggcttcagcggtatgtccgatgtatattgctgaaattgctccttccaatattcgtggaacccttgtttcgtgcaatcagtttgccattatctttggtatgttggttgtgtactttgtgaactatctgattatgggtgaccatcagaatccgattattctgaaagatgctgccggtgtgttgtcagtaagtgctgagtcggatatgtggacagttcaggaaggatggcgttatatgtttggttcggaagccttcccggccgctttcttcggcctgttgctgttctttgttccaaagactccccgttatttggttcttgtacagcaggaagaaaaggcttacactattctggagaaaatcaacggtaagaagaaagctcaggaaattcttaatgatattaaggctactgctcaggaaaaaacagagaaactctttacttatggagtaacagtgattgtgatcggtattctactgtccgtattccagcaggcgatcggtattaatgcagtactttactatgctccgcgtattttcgaaaatgcaggtgccgaaggtggtggtatgatgcagacagtgattatgggtattgtaaacattatctttacgctggttgctatctttacggtagaccgctttggtcgtaaaccattgctgattatcggatctattggtatggctgtaggagcatttgcagtggcaatgtgtgatagtatggcaatcaaaggtgttcttccggtactttctatcatcgtatacgctgctttcttcatgatgtcatggggaccgatttgctgggtattgatttcagaaatcttcccgaatactattcgtggtaaagcagttgctattgcagtggctttccaatggatattcaactacatcgtatcttctactttcccggcattgtatgacttcagtccgatgtttgcatatagcttatacggaatcatctgtgtcgctgccgctatctttgtttggcgttgggtacccgagactaaagggaagacgctggaagatatgagtaagctttggaagaaaaacaaataa

SEQ ID NO: 8055 - protein, 484 aa, Bacteroides thetaiotaomicron
MNNTTNEGSKLYLYSITSVAILGGLLFGYDTAVISGAEKGLEAFFLSASDFQYNKVMHGITSSSALIGCVLGGALSGVFASRLGRRNSLRLAAVLFFLSALGSYYPEVLFFEYGKPNMDLLIAFNLYRVLGGIGVGLASAVCPMYIAEIAPSNIRGTLVSCNQFAIIFGMLVVYFVNYLIMGDHQNPIILKDAAGVLSVSAESDMWTVQEGWRYMFGSEAFPAAFFGLLLFFVPKTPRYLVLVQQEEKAYTILEKINGKKKAQEILNDIKATAQEKTEKLFTYGVTVIVIGILLSVFQQAIGINAVLYYAPRIFENAGAEGGGMMQTVIMGIVNIIFTLVAIFTVDRFGRKPLLIIGSIGMAVGAFAVAMCDSMAIKGVLPVLSIIVYAAFFMMSWGPICWVLISEIFPNTIRGKAVAIAVAFQWIFNYIVSSTFPALYDFSPMFAYSLYGIICVAAAIFVWRWVPETKGKTLEDMSKLWKKNK

SEQ ID NO: 8056 - DNA, 1407 bp, Bacteroides thetaiotaomicron; identical to SEQ ID NO: 455
  CDS (1)..(1407)

SEQ ID NO: 8057 - protein, 468 aa, Bacteroides thetaiotaomicron; identical to SEQ ID NO: 456

SEQ ID NO: 8058 - DNA, 1404 bp, Staphylococcus epidermidis; identical to SEQ ID NO: 457
  CDS (1)..(1404)

SEQ ID NO: 8059 - protein, 467 aa, Staphylococcus epidermidis; identical to SEQ ID NO: 458

SEQ ID NO: 8060 - DNA, 1392 bp, Oceanobacillus iheyensis
  CDS (1)..(1392)
atgattcaagataagaaaatatcaagtaagttcatttatttttttggagcttttggaggtattctctttggttatgatattggtgttatgacaggagctttaccttttctgcaaagtgattggaatcttcaaaacgatcctactgcaataggatggattacttcatcgttaatgctaggtgcaatctttggaggggcgctatcaggtcaattatcagatcgtataggaagacgtaagatgattttaatcgcttctattatttttgcactaggttctattatggctgggatttctcctcataatggcattctatttatgattgtatctcgcattattttaggacttgctgtaggagcagcttcagctctagtaccagcatatatgtctgaaatggcccctgcacgtttacgtggacgtttatcaggaattaatcaaacgatgatagtttcagggatgttactctcgtatatcgttgcatttgtattaaaagatttaccggaaacaatggcttggcgcttaatgcttagtttggcagcggtaccagcgttaattttattcttcggagtattaagattaccagaatcacctcgttttctaatcaaaaataataaaataaacgaagctcgtaaagtattgagttatattcgtccaaaagaaaaaattgaaagcgaaatctctcaaattcaagcatcaacaaaatatgaagaaaaagcaagccaaaaaacatcttggggaacactgttaagcggtaaatatcgttatttagtaattgctggtttaggtgtagctgctttccaacaattccagggtgcaaatgctattttttattacatcccgttaattgtagagaatgcgacagggaatgcagcaagttcagctcttatgtggccgataattcaagggataatattagtactaggttcgctcctattcctactaattgctgacaagttcaatcgacgtacattattaacacttggtggaactgttatgggattatcgtttatattaccggcgattttaaatatcgttatcccgaatgcaagtccaatgatgatcgttgtattcttaagtatctacgttgctttttattcgttcacatgggctcctttaacttgggttatagttggagaaatcttcccgctagtcattagaggacgttcttcgggattagcgtcatcgtttaattggatcggatctttcttagttggattattattcccagttatggttgcttcgatggcacaagaagcagttttcgcaatttttggtgcgatttgtctgctaggtgtactatttgttcgattatgtgtacctgaaacgcgtggtcgttctcttgaggaaattgagaaaataggagaaagtaaacagcttcataagaaaacagtttaa

SEQ ID NO: 8061 - protein, 463 aa, Oceanobacillus iheyensis
MIQDKKISSKFIYFFGAFGGILFGYDIGVMTGALPFLQSDWNLQNDPTAIGWITSSLMLGAIFGGALSGQLSDRIGRRKMILIASIIFALGSIMAGISPHNGILFMIVSRIILGLAVGAASALVPAYMSEMAPARLRGRLSGINQTMIVSGMLLSYIVAFVLKDLPETMAWRLMLSLAAVPALILFFGVLRLPESPRFLIKNNKINEARKVLSYIRPKEKIESEISQIQASTKYEEKASQKTSWGTLLSGKYRYLVIAGLGVAAFQQFQGANAIFYYIPLIVENATGNAASSALMWPIIQGIILVLGSLLFLLIADKFNRRTLLTLGGTVMGLSFILPAILNIVIPNASPMMIVVFLSIYVAFYSFTWAPLTWVIVGEIFPLVIRGRSSGLASSFNWIGSFLVGLLFPVMVASMAQEAVFAIFGAICLLGVLFVRLCVPETRGRSLEEIEKIGESKQLHKKTV

SEQ ID NO: 8062 - DNA, 1548 bp, Escherichia coli O6
  CDS (1)..(1548)
atggaatatccatcacataacgacatgtcgcagcaatttaatccatatttatgctatttccgacctgacacctgtgtgagttgttcacgtattttttcactatgtcttactctctgctggcaggaaaaaatggttactatcaatacggaatctgctttaacgccacgtcctctgcgggatacgcggcgtatgaatatgtttgtttcggtagctgctgcggtcgcaggattgttatttggtcttgatatcggcgtaatcgccggagcgttgccgttcattaccgatcactttgtgctgaccagccgtttgcaggaatgggtggtcagtagcatgatgctcggcgcagcaattggtgcgctgtttaatgggtggctgtcgttccgcctggggcgtaaatacagcctgatggcgggggccatcctgtttgtactcggttcgatagggtccgcttttgcgaccagcgtagagatgttaatcgccgctcgtgtggtgttgggcattgctgttgggatcgcgtcttacaccgctcctctatatctttctgaaatggcaagtgaaaacgttcgcggtaagatgatcagcatgtaccagttgatggtcacactcggcatcgtgctggcgtttttatccgatacagcgttcagttatagcggtaactggcgcgcaatgttgggggttcttgctttaccagcagtcctgctgattattctggtggtcttcctgccaaatagcccgcgctggctggcggaaaaggggcgtcatattgaggcggaagaagtgttgcgtatgctgcgcgatacgtcggaaaaagcgcgagaagaactcaacgaaattcgtgaaagcctgaagttaaaacagggcggttgggcactgtttaagatcaaccgtaacgtccgtcgtgctgtatttctcggtatgttgttgcaggcgatgcagcagtttaccggtatgaacatcatcatgtactacgcgccacgtatcttcaaaatggcgggctttacgaccacagaacaacagatgattgcgactctggtcgtggggctgacctttatgttcgctaccttcattgcggtctttacggtagataaagcagggcgtaagccggctctgaaaattggtttcagcgtgatggcgttaggcactctggtgctgggttactgcctgatgcagtttgataacggtacggcttccagtggcttgtcctggctctctgttggcatgacgatgatgtgtattgccggttatgcgatgagcgccgcgccagtggtgtggatcttgtgctctgaaattcagccgctgaaatgccgcgattttggcatcacctgctcaacgacgacaaactgggtgtcgaatatgattatcggcgcgaccttcctgacactgcttgatagcattggcgctgccggtacgttctggctctacactgcgctgaacattgcgtttgtgggcatcactttctggctcattccggaaaccaaaaatgtcacgctggaacatatcgagcgcaaactgatggcaggcgaaaagttgagaaatatcggcgtctga

SEQ ID NO: 8063 - protein, 515 aa, Escherichia coli O6
MEYPSHNDMSQQFNPYLCYFRPDTCVSCSRIFSLCLTLCWQEKMVTINTESALTPRPLRDTRRMNMFVSVAAAVAGLLFGLDIGVIAGALPFITDHFVLTSRLQEWVVSSMMLGAAIGALFNGWLSFRLGRKYSLMAGAILFVLGSIGSAFATSVEMLIAARVVLGIAVGIASYTAPLYLSEMASENVRGKMISMYQLMVTLGIVLAFLSDTAFSYSGNWRAMLGVLALPAVLLIILVVFLPNSPRWLAEKGRHIEAEEVLRMLRDTSEKAREELNEIRESLKLKQGGWALFKINRNVRRAVFLGMLLQAMQQFTGMNIIMYYAPRIFKMAGFTTTEQQMIATLVVGLTFMFATFIAVFTVDKAGRKPALKIGFSVMALGTLVLGYCLMQFDNGTASSGLSWLSVGMTMMCIAGYAMSAAPVVWILCSEIQPLKCRDFGITCSTTTNWVSNMIIGATFLTLLDSIGAAGTFWLYTALNIAFVGITFWLIPETKNVTLEHIERKLMAGEKLRNIGV

SEQ ID NO: 8064 - DNA, 1554 bp, Bifidobacterium longum
  CDS (1)..(1554)
atgacgacgacaacggcatcacccgtatcgaaacagacggcatccgcggcgcaggaaaccagcgcaaccggtgcggcggccaccgcaatcgaaaccatcgaaaccggcgtggccggagtggcgggcgcggccacaaacgcggcagccaacgcaatcgaggacctcgaagccgccgaatcgcacggcttctccacgcgcttcccgctcaacagcgcattcatcttcaccttcggcgcgctcggcggcatgctgttcggtttcgacaccggcatcatctccggcgcctccccgcttatcgaatcggacttcggcctgagcgtctctcagaccggcttcatcacctcctcggtgctgatcggctcgtgcgcaggcgcgctgtcgatcggcgcactgtctgaccggttcggccgcaagaagctgctcatcgtctccgcgctgctgttcctgctcggctcaggcctgtgcgcctcctccaccggattcgcgatgatggtgtgcgcccgcatcatcctgggtctcgccgtcggcgcggcctccgccctgaccccggcgtacttggccgaactggcgccgaaggagcgtcgcggctcactgtccacgctgttccagctcatggtcaccttcggcattctgctggcctacgcctccaacctcggattcctgaaccacaacctcttcggcatccgcgactggcgctggatgctcggttcggcgctggtgccggccgccttgttgctgctcggcggcctgttgctgcccgaatccccgcgttatctggtgaacaagggcgacacccgcaacgccttcaaagtgcttacgctgattcgcaaggacgtggatcagacccaggtgcagattgagctggacgaaatcaaggccgtggccgcacaggacaccaagggtggtgtgcgcgaactgttccgtatcgctcgtccggcgctggtggccgccatcggtatcatgctgttccagcagctcgtgggcatcaactcggtgatctacttcctgccgcaggtgttcatcaagggcttcggcttccctgaaggcgacgcgatctgggtgtcggtgggcatcggcgtggtgaacttcgtgagcaccatcgtggccacgcttatcatggatcgtttcccgcgcaagggcatgctgatcttcggttccatcgtgatgaccgtttcgctcgcggtgctcgccgtgatgaacttcgtgggcgacgtggccgtgctggcagtgccgacgatgattctcatcgctttctatatcctcggctttgcggtctcgtggggcccgatcgcctgggtgcttatcggcgagatcttcccgctgagcgtgcgcggcatcggctcatccttcggctcggcggcgaactggctgggcaacttcatcgtctcccagttcttcctcgtgctgctcgatgcgttcggcaacaatgtgggcggcccgttcgcgattttcggcgtgttctcggccctgtccatcccgttcgtgctgcgcttggtgcccgagaccaagggcaagtcgctggaggaaatcgagaaggaaatgaccaagcgctag

SEQ ID NO: 8065 - protein, 517 aa, Bifidobacterium longum
MTTTTASPVSKQTASAAQETSATGAAATAIETIETGVAGVAGAATNAAANAIEDLEAAESHGFSTRFPLNSAFIFTFGALGGMLFGFDTGIISGASPLIESDFGLSVSQTGFITSSVLIGSCAGALSIGALSDRFGRKKLLIVSALLFLLGSGLCASSTGFAMMVCARIILGLAVGAASALTPAYLAELAPKERRGSLSTLFQLMVTFGILLAYASNLGFLNHNLFGIRDWRWMLGSALVPAALLLLGGLLLPESPRYLVNKGDTRNAFKVLTLIRKDVDQTQVQIELDEIKAVAAQDTKGGVRELFRIARPALVAAIGIMLFQQLVGINSVIYFLPQVFIKGFGFPEGDAIWVSVGIGVVNFVSTIVATLIMDRFPRKGMLIFGSIVMTVSLAVLAVMNFVGDVAVLAVPTMILIAFYILGFAVSWGPIAWVLIGEIFPLSVRGIGSSFGSAANWLGNFIVSQFFLVLLDAFGNNVGGPFAIFGVFSALSIPFVLRLVPETKGKSLEEIEKEMTKR

SEQ ID NO: 8066 - DNA, 1515 bp, Arabidopsis thaliana
  CDS (1)..(1515)
atggccggtggagctcttaccgatgaaggaggcctaaagagagctcatctctatgaacatcggatcacttcttacttcatcttcgcttgcatcgtcggatccatgggaggctctcttttcggctatgatcttggagtctctggtggtgttacatcaatggacgatttcttgaaagagttcttcccagggatctacaaaagaaagcaaatgcatctaaacgaaacagattactgcaaatacgacaatcaaatcctcacactcttcacttcttctctctacttcgccggtttaatctcaactttcggagcttcttacgtcaccagaatctacggtaggagaggaagcatcctcgttggctctgtcagcttcttcctcggaggagtgattaacgctgcagccaaaaacatcctcatgttaatccttggtcgaatcttcctcggcataggcattggattcggaaaccaggcggttccgctatacctctcggagatggctccagcgaagattagaggaactgtgaatcagcttttccagctaacaacttgcattggaattctagttgctaatttgataaactacaaaacagagcaaatccatccatggggatggagactctctctcggtctcgccaccgtcccagctatactcatgttcctcggtggactcgttttgcctgaaacacccaatagtcttgtcgagcaagggaagctcgagaaggctaaagccgtgctgatcaaagtacgtggcacaaacaatatagaagctgagtttcaggatcttgtcgaagccagtgacgctgctagagccgtgaagaatccgtttcgcaatcttcttgctagaagaaacagaccgcagctagtgattggagccattgggcttcctgcgtttcagcaactaaccggaatgaattcgatcctgttttatgctccggttatgtttcagagcttagggtttggtggatctgcgtcgcttatctcgtctaccattacaaatgctgcgcttgttgtcgcggcgatcatgtctatgtattcagctgataaatttggaagaaggtttcttcttcttgaagctagcgtggagatgttctgttacatggttgtagtaggagtaacactagccttgaagtttggggaaggtaaggagctaccaaaatcgctcggtctgattcttgtggtccttatctgtctatttgtattggcgtatggtcgatcttggggtccaatgggatggttagttccgagcgagcttttccctctagagactcgatcagccggtcagagcgttgtggtgtgcgtgaaccttttcttcacggctctaatcgcgcagtgtttcctggtgtcgctgtgccatctcaagtacggaatgttccttttattcgccggacttatattggggatgggaagcttcgtttactttctgttgccggagacgaaacaggttccgattgaagaggtttatcttctttggagacagcattggttatggaagaaatatgtcgaagatgttgatgaataa

SEQ ID NO: 8067 - protein, 504 aa, Arabidopsis thaliana
MAGGALTDEGGLKRAHLYEHRITSYFIFACIVGSMGGSLFGYDLGVSGGVTSMDDFLKEFFPGIYKRKQMHLNETDYCKYDNQILTLFTSSLYFAGLISTFGASYVTRIYGRRGSILVGSVSFFLGGVINAAAKNILMLILGRIFLGIGIGFGNQAVPLYLSEMAPAKIRGTVNQLFQLTTCIGILVANLINYKTEQIHPWGWRLSLGLATVPAILMFLGGLVLPETPNSLVEQGKLEKAKAVLIKVRGTNNIEAEFQDLVEASDAARAVKNPFRNLLARRNRPQLVIGAIGLPAFQQLTGMNSILFYAPVMFQSLGFGGSASLISSTITNAALVVAAIMSMYSADKFGRRFLLLEASVEMFCYMVVVGVTLALKFGEGKELPKSLGLILVVLICLFVLAYGRSWGPMGWLVPSELFPLETRSAGQSVVVCVNLFFTALIAQCFLVSLCHLKYGMFLLFAGLILGMGSFVYFLLPETKQVPIEEVYLLWRQHWLWKKYVEDVDE

SEQ ID NO: 8068 - DNA, 1545 bp, Aspergillus niger; identical to SEQ ID NO: 459
  CDS (1)..(1545)

SEQ ID NO: 8069 - protein, 514 aa, Aspergillus niger; identical to SEQ ID NO: 460

SEQ ID NO: 8070 - DNA, 1752 bp, Aspergillus niger; identical to SEQ ID NO: 463
  CDS (1)..(1752)

SEQ ID NO: 8071 - protein, 583 aa, Aspergillus niger; identical to SEQ ID NO: 464

SEQ ID NO: 8072 - DNA, 1584 bp, Emericella nidulans; identical to SEQ ID NO: 467
  CDS (1)..(1584)

SEQ ID NO: 8073 - protein, 527 aa, Emericella nidulans; identical to SEQ ID NO: 468

SEQ ID NO: 8074 - DNA, 1512 bp, Arabidopsis thaliana
  CDS (1)..(1512)
atggggtttgatcccgagaaccaatcgatctcttccgttggacaggttgttggtgattcttcttcaggtgggattactgctgaaaaggaacctttgttaaaggaaaaccacagcccagagaactactctgttcttgcagccattcctccgtttctctttccagctcttggagcattgctttttggttatgaaattggtgcaacatcttgtgctatcatgtctcttaagtcgcctactctaagtggaatttcatggtacgacttgtcttcagtggatgttggtataattaccagtggctcactgtatggtgccttaattggctccattgttgcatttagtgttgccgacattataggaaggagaaaggagctgattttggctgcattcttgtatcttgttggagccattgtgactgtagtagcacctgtcttttccatactgataattggacgagttacgtatggcatggggattggactgaccatgcacgcggctccaatgtacattgcagagactgctccaagtcaaatacgtggacggatgatatcactaaaggaattctccactgtccttgggatggttgggggttatggaatcggtagcctttggattacggttatttctggttggcgttacatgtacgcaacaattctcccttttccagttattatgggaactggaatgtgttggctaccagcatctccgaggtggcttttactgcgcgctctccagggacaaggaaatggggagaatcttcaacaggctgcgattagatctctttgtcgccttagagggtctgtcatagctgactcagcagctgaacaagtaaacgaaatattggctgaactttcccttgtgggtgaagacaaagaagctacatttggtgaattatttcgaggcaaatgcttgaaagctctcactatagcaggagggttagtcttgttccaacagataactgggcaaccaagtgtactatattatgcaccatcaatactacagactgccggcttttctgctgcagctgatgcaactcggatctcaattctgctcggcctattgaagttggttatgacaggagtttctgtgatagttatcgacagagttggaaggagacctttacttctttgtggtgttagcggaatggtgatctcattgttcctcctgggatcctactacatgttttataaaaatgtaccagctgttgctgtagctgcattgctactgtatgtaggctgttaccagctgtcctttggccctattggttggctgatgatttcagagatatttcccttaaaattaagaggtagaggaatcagtctagcagtgcttgtgaattttggcgcaaacgcacttgtgacattcgctttctcaccgctaaaggagctgttaggagctggaatactgttctgtgcatttggagtgatatgtgtcgtgtctctcttcttcatatactacattgtgccagagacaaagggtctcactcttgaagaaattgaagccaaatgtctctaa

SEQ ID NO: 8075 - protein, 503 aa, Arabidopsis thaliana; identical to SEQ ID NO: 472

SEQ ID NO: 8076 - DNA, 1837 bp, Arabidopsis thaliana
  CDS (131)..(1699)
atctaatatctctttctcaatttcggttccactttcctttcgtttgcaaaaacccatcccatcaaaaataaacaagaggccctaaagaagaatcctaaagactttacgggacttgtttaggataaaagaaatgcctgccggtggattcgtcgtcggggatggccaaaaggcttatcccggcaaactcactccctttgttctcttcacttgcgttgttgctgccatgggcggtctcatcttcggatacgatatcggaatctccggtggtgtgacgtcgatgccgtctttcctcaagcgattcttcccgtcggtgtatcggaaacaacaagaggacgcgtcaacgaaccagtactgtcagtacgatagcccgacgctaacgatgttcacatcgtctctatatctagcggcgctaatttcgtcgctggtggcttccaccgtgacaagaaagttcggacggcggctctcgatgctcttcggcggcatactcttctgcgccggagctctcattaatggtttcgccaaacatgtttggatgctcatcgtcggtcgtatcttgcttggtttcggtatcggtttcgctaatcaggctgtgccactgtacctctctgagatggctccatacaaatacagaggagctttaaacattggtttccaactctcaattacaatcggaatcctcgtcgccgaagtgctcaactacttcttcgccaagatcaaaggcggttggggatggcggctcagtctcggaggcgcggtggttcctgccttgatcataaccatcggctccctcgtcctccctgacactcccaattcaatgatcgagcgtggccaacacgaagaagccaaaaccaagctcagacgaatccgtggtgtcgatgacgtcagccaagagtttgacgatttggtcgccgctagtaaagagtcgcagtcgatagagcacccgtggagaaacctcctccgccgcaaataccgaccacatctcactatggccgttatgattccgttctttcaacagctaaccggaatcaatgtgattatgttttacgctccggttttgttcaacaccattggtttcacgaccgatgcttctctcatgtccgctgtggtcactggctcggttaacgtggccgctacgcttgtttctatctacggtgttgacagatggggacgtcggtttctctttcttgaaggtggtacacaaatgcttatatgccaggctgtggttgcagcttgcataggggccaagtttggggtagacgggacccctggtgagctaccgaagtggtatgctatagtggttgtaacgttcatttgcatctatgtggcgggttttgcgtggtcgtggggcccactagggtggttagtaccgagtgaaatcttcccgttggagataaggtcggcggcgcagagtatcaccgtgtccgtgaacatgatcttcacgttcattatcgcgcaaatcttcttgacgatgctttgtcatttgaagtttgggttattcctcgttttcgcctttttcgtggtggtgatgtcgatctttgaatacattttcttgccggagacgaaagggattccgatagaggagatgggtcaagtgtggaggtcacactggtattggtcaaggtttgtggaggatggtgagtatgggaatgcgcttgagatgggcaagaacagtaaccaagctggaacgaagcatgtttgatttatcattgtttttaatgagagttttaagaaagaaagaaaaaagatttgtaatttctaatgtcgtaaaggaaaaagtgtattagcctagatatatattggtgtttatataattcaataccacatggagaaattatgc

SEQ ID NO: 8077 - protein, 522 aa, Arabidopsis thaliana
MPAGGFVVGDGQKAYPGKLTPFVLFTCVVAAMGGLIFGYDIGISGGVTSMPSFLKRFFPSVYRKQQEDASTNQYCQYDSPTLTMFTSSLYLAALISSLVASTVTRKFGRRLSMLFGGILFCAGALINGFAKHVWMLIVGRILLGFGIGFANQAVPLYLSEMAPYKYRGALNIGFQLSITIGILVAEVLNYFFAKIKGGWGWRLSLGGAVVPALIITIGSLVLPDTPNSMIERGQHEEAKTKLRRIRGVDDVSQEFDDLVAASKESQSIEHPWRNLLRRKYRPHLTMAVMIPFFQQLTGINVIMFYAPVLFNTIGFTTDASLMSAVVTGSVNVAATLVSIYGVDRWGRRFLFLEGGTQMLICQAVVAACIGAKFGVDGTPGELPKWYAIVVVTFICIYVAGFAWSWGPLGWLVPSEIFPLEIRSAAQSITVSVNMIFTFIIAQIFLTMLCHLKFGLFLVFAFFVVVMSIFEYIFLPETKGIPIEEMGQVWRSHWYWSRFVEDGEYGNALEMGKNSNQAGTKHV

SEQ ID NO: 8078 - DNA, 1536 bp, Oryza sativa
  CDS (1)..(1536)
atgacgagccagctgggctcggcacggaggccttccaagttccaacctttacaaattaattacatatgcggggcgtcgctgttcatcaaggaggacatgaagatcacggacgtcgaggtggagatcctgctcggcatcctcaacctctactccctcgtcggctccttcgccgccggccggacctccgactggatcggccgccgcctcaccatcatcctcgccgcggtcatcttcttcgtcggcgccatcatgatgggcctctccgtcaactaccccatgctcatggccggccgcttcgtcgccggcatcggcgtcggctacgccttcatgatcgcgcccgtctacaccgccgaggtctcgccggcgtcgtcgcgcggcttcctcacctccttcccggaggtgttcatcaacttcggcatcctcctcggctacgtctccaactacgccttctcgcgcctccgcctgcagctcggctggcgcctcatgctcggcgtcggcgcggcgccgtccgtcgccctcgcgctcatggtgctcgccatgccggagtcgccgcggtggctcgtcatgaagggccgcctcgccgacgccaaggtcgtcctcggcgagacctcggacacggcggaggaggccgccacccgcctcgcggaaatcaaggaggcggtggccatcccggccgacctcgacggtgacgtcgtggccgtgccgaagagggccggcggcgagaggcgcgtgtggaaggagctgatcctgtcgccgacgccggccgtccggcgcgtgctcctgtcggcgctcggcatccacttcttccagcagtcgtcgggcatcgacgccgtcgtgctctacagcccgcgcgtgttccagagcgccgggatcaccgacaagaacaagctgctcggcacgacgtgcgccgtgggcgtcaccaagacgctcttcatcctggtggcaacgttcacgctcgaccgcttcggccggcggccgctgctgctggccagcgccggcggcatgatcgccaccctcgtcaccctcggcttaggcctcaccgtcatcggtgaggacgccaccggcggcggctgggccatcgccgtgtccatcgcctccatcctcgccttcgtcgccttcttctccatcggcctcggccccatcacctgggtgtacagctccgagatcttcccgctccacctccgcgccctcggctgcgctctcggcgtcggcctcaaccgcgtcaccagcggcgtcatctccatgaccttcctctccctctccaaggccatcaccatcggcggcagcttcttcctctacgccggcgtcgcctcgcttgcttggctcttcttcttcacctacctcccggagactcgtggacgcacgctcgagcagatgggcgagctcttccgcatccacaacatggccggcgacgacgactctgccgccactcgaccgccgtcgccggaggaggaggagaagatcaccaactacgtggagatggcggcgccgtcgtcgtcgtcgtcgacggccactagcagccatcatgcaaagtga

SEQ ID NO: 8079 - protein, 511 aa, Oryza sativa
MTSQLGSARRPSKFQPLQINYICGASLFIKEDMKITDVEVEILLGILNLYSLVGSFAAGRTSDWIGRRLTIILAAVIFFVGAIMMGLSVNYPMLMAGRFVAGIGVGYAFMIAPVYTAEVSPASSRGFLTSFPEVFINFGILLGYVSNYAFSRLRLQLGWRLMLGVGAAPSVALALMVLAMPESPRWLVMKGRLADAKVVLGETSDTAEEAATRLAEIKEAVAIPADLDGDVVAVPKRAGGERRVWKELILSPTPAVRRVLLSALGIHFFQQSSGIDAVVLYSPRVFQSAGITDKNKLLGTTCAVGVTKTLFILVATFTLDRFGRRPLLLASAGGMIATLVTLGLGLTVIGEDATGGGWAIAVSIASILAFVAFFSIGLGPITWVYSSEIFPLHLRALGCALGVGLNRVTSGVISMTFLSLSKAITIGGSFFLYAGVASLAWLFFFTYLPETRGRTLEQMGELFRIHNMAGDDDSAATRPPSPEEEEKITNYVEMAAPSSSSSTATSSHHAK

SEQ ID NO: 8080 - DNA, 1673 bp, Drosophila melanogaster
  CDS (88)..(1554)
ctaaagctgtattagctacattcgccgcctcgttgccagaaaaaaacgatttcagttcgtgattcagattaactatacagcaccgcaatgaagatcctgatgcgagcggacacccatgtgtccttctccgtgcccgccgatgggctcaaggccaattttaccttttcccaggtcttggctgctctgagtgtctcgctgtgctccttggtggtcggatttgtcagcgcttacacgtcgcctgcacttgtgtcgatgaccgatcgaaccatcacctcctttgaggtcacaaaagatgctggttcctgggttggtggcatcatgccactggctgcattagcaggtggcataacaggaggacccttgatcgaatatctgggcaggcgcagcaccatcctggccactgcggtgcccttcatcgtatcatcactgctgattgcgtgtgctgtgaatgtgatcatgattctgtgcggacgattcctaactggattctgcgttggcattgcctctttatccctgcccgtctatctgggtgagactttgcagccggaagtgcggggcactttgggtttgctgcccaccgctcttggtaacataggcatcctggtttgctatgtggcgggatcctttatgaattggtcgatgctggccttcttgggagctgctctgcccgttcccttcctgattttgatgatcattatccccgaaactccgcgctggtttgtgaaccgtggtcaggaagagcgcgccaggaaggctttgaaatggctgcgtggcaaggaggcggatgtggagcccgaactaaaggagttgatgcaatctcaggccgatgccgatcgtcaggccactcagaacacctgtttggagctgtttaagcgaaacaatctgaagccactttccatttccttgggtctgatgttctttcaacagttcagcggtatcaacgcggttatcttctacacggtccagatcttcaaggatgcgggatccacaattgatagcaatctttccacgatcatcgtgggtgtagttaacttttttgctacgtttatgggcatcattctgattgatcggttgggcagaaagattcttctgtatgtatccgacatcgccatgatcgtgaccctgtccattctgggcggcttcttctactgcaaggcgcatggtccggatgtgtcccatttgggttggttgccactcacttgcttcgttatctacattctgggattctccctgggcttcggacccattccctggctgatgatgggtgagattctgccggccaagattcgaggaccggctgcctcggtggtcacggctttcaactggttctgcacgtttgtggtaaccaagaccttccaggacctcacggttgctatgggcgcgcatggagccttctggctattcggcgccatctgcatcgtgggtctgttctttgtgattatttttgtgcccgaaacgcggggcaaatcgttggaggaaattgagcgaaagatgatgggccgtgtgcccatgtcctcggtggtcaacatcaagccatttcctttcaacatgtaaatggcgtgttgctaaggatagggtagtgtcttggtgcttaaattgtgaatttttaggcaagcgaaataaatcaaaattacccttgaaaaataaaaaaaaaaaaaaaaaaaaaaaaaaaa

SEQ ID NO: 8081 - protein, 488 aa, Drosophila melanogaster
MKILMRADTHVSFSVPADGLKANFTFSQVLAALSVSLCSLVVGFVSAYTSPALVSMTDRTITSFEVTKDAGSWVGGIMPLAALAGGITGGPLIEYLGRRSTILATAVPFIVSSLLIACAVNVIMILCGRFLTGFCVGIASLSLPVYLGETLQPEVRGTLGLLPTALGNIGILVCYVAGSFMNWSMLAFLGAALPVPFLILMIIIPETPRWFVNRGQEERARKALKWLRGKEADVEPELKELMQSQADADRQATQNTCLELFKRNNLKPLSISLGLMFFQQFSGINAVIFYTVQIFKDAGSTIDSNLSTIIVGVVNFFATFMGIILIDRLGRKILLYVSDIAMIVTLSILGGFFYCKAHGPDVSHLGWLPLTCFVIYILGFSLGFGPIPWLMMGEILPAKIRGPAASVVTAFNWFCTFVVTKTFQDLTVAMGAHGAFWLFGAICIVGLFFVIIFVPETRGKSLEEIERKMMGRVPMSSVVNIKPFPFNM

SEQ ID NO: 8082 - DNA, 2234 bp, Kluyveromyces lactis; identical to SEQ ID NO: 473
  CDS (402)..(2102)

SEQ ID NO: 8083 - protein, 566 aa, Kluyveromyces lactis; identical to SEQ ID NO: 474

SEQ ID NO: 8084 - DNA, 1476 bp, Corynebacterium glutamicum
  CDS (1)..(1476)
atggctagtaccttcattcaggccgacagccctgaaaaaagtaagaagctgcccccactcacagaaggtccgtatagaaagcggctattctacgttgcactagttgcgacgtttggtgggctgctcttcggatatgacaccggagtaatcaacggtgcactcaacccaatgacacgtgagctcggactaaccgcgttcaccgagggtgttgtaacttcttccctgctgtttggtgcagcagctggtgcgatgtttttcggtcgcatttccgacaactggggtcgccggaaaacaatcatctcacttgcagtagctttctttgtcggcaccatgatctgcgtgtttgctccatcttttgcagtaatggttgtcggacgtgtgcttcttggactcgcagttggtggcgcttccactgttgtccctgtctacctggctgaacttgctccttttgaaatccgtggctcactggctggccgtaatgagttgatgattgttgttggtcagctcgcagcttttgtcatcaatgcgattattggaaatgtttttggacaccacgatggtgtgtggcgctacatgctggcaattgccgcaatcccagcaattgccctcttctttggaatgctccgagttccagaatccccacgctggcttgttgagcgaggacgcattgatgaggctcgcgcagttcttgaaaccattcgccctctagaacgtgcccatgcagaagttgctgatgttgaacacctagcaagagaagagcacgccgtttccgagaagtccatgggcttaagggaaattttgtccagcaagtggcttgtgcgcatcctcctggtaggtatcggattgggtgtcgcacagcagctgaccggcatcaactccatcatgtactacggccaggttgttctcattgaggctggtttctccgagaatgcagctctgatcgccaacgtggcgccaggagtgatcgcagttgtcggtgcattcatcgcactgtggatgatggatcgtatcaaccgccgtaccaccctcattaccggttattctctcaccaccattagccacgtattgatcggtatcgcatccgtagcattcccagtcggcgatcctcttcgcccctacgttatcttgactctggttgtggtcttcgtgggatccatgcagaccttcctcaacgtagctacctgggttatgctctctgagctcttcccgctggcaatgcgcggtttcgcaatcggtatctcagtgttcttcctctggatcgcaaacgcgttcctcggattgttcttcccaaccatcatggaagcagtaggactaaccggaaccttcttcatgttcgccggaatcggtgtggttgccttgatcttcatctacacccaggttcctgaaactcgtggacgtaccttggaggagattgatgaggatgttacttccggtgtcattttcaacaaggacatccgaaaaggaaaggtgcactag

SEQ ID NO: 8085 - protein, 491 aa, Corynebacterium glutamicum; identical to SEQ ID NO: 476

SEQ ID NO: 8086 - DNA, 1446 bp, Xanthomonas campestris
  CDS (1)..(1446)
atgtttccaggtgaacccatgtccagtgtctccattgacggcgcccccgatgccggcgagaacacccgtttcatcatcctgatcagctgcgtggccacgatcggcggctttctgttcggcttcgacagtggcgtgatcaatggcaccgtcgacgggctcaagcagaccttccagtccagcgccgccgagaccggcttcgaagttgcctcgatgctgctggggtgcgccatcggcgccttctttgccggccgcctggccgaccgctggggccgccgtgctgtcctgatcatttctgcggcgctgttcctgctctcggctatcggtgccggtgcctcgcacagctccggcttcttcatctttgcccgcgtgatgggcggctttgcggtaggcgcagccagcgtcatttcgccggcctacatcgccgaggttgcctccgcgcgctatcgcggccggctcgccaccatgcagcagatcgccatcatcagcgggctgttctgcgcgttcttgagcaactacctgctggccaatgccgccggtgcgtccaccgagccgttatggggcgggcaggcggcctggcgctggatgttctggatgcaggccatcccgtcgctgctgttcctgctgctgttgctggtcatccccgaaagcccgcgctacctggtggtcaagggccgtcgcgagcaggcgctggtggtgctcaagcggctgtacggtaacgcggccgcgcagaccaagctgggcgaaatctccgcctcgatgtcggccgaccagcacaagcccaagttctccgacctgatcagcaagaccaccggcaagatccgcccgatcgtatggattggcgtcggcctggcggtgttccagcaactggtcggcatcaacgtggtgttctattacggcgcggtgctgtggcaggcagtgggcttctccgaacaggacgccttgctgatcaacgtgctctccggcggcctcagcattggtgcctgcctggtcacggtgatgctggtcgacaagatcggccgcaagccgttgctgtggatcggctcggccggtatggcggtatcgctggcactggtgacctacgccttcgccaccgcctcgctggatcccaacggcaagctcgcgatgtccgatgccatgggcatgctcgcgctggttgccgccaacgtctacgtggtgttcttcaatgcctcgtggggcccggtgatgtgggtgatgctgggcgagatgtttcccaaccagatccgcggttcgggcctggccattgccggcgctgcacagtggacttccaacttcgccatcaccgtcagcttcccgatcctgctcggcagcatcggtcttgccggcgcctacggcatctacaccgttgccgccttcatctcggtgttcttcgtgctcaagtacgtctacgagacgaagggcaaggagctggagcagatggagggctga

SEQ ID NO: 8087 - protein, 481 aa, Xanthomonas campestris
MFPGEPMSSVSIDGAPDAGENTRFIILISCVATIGGFLFGFDSGVINGTVDGLKQTFQSSAAETGFEVASMLLGCAIGAFFAGRLADRWGRRAVLIISAALFLLSAIGAGASHSSGFFIFARVMGGFAVGAASVISPAYIAEVASARYRGRLATMQQIAIISGLFCAFLSNYLLANAAGASTEPLWGGQAAWRWMFWMQAIPSLLFLLLLLVIPESPRYLVVKGRREQALVVLKRLYGNAAAQTKLGEISASMSADQHKPKFSDLISKTTGKIRPIVWIGVGLAVFQQLVGINVVFYYGAVLWQAVGFSEQDALLINVLSGGLSIGACLVTVMLVDKIGRKPLLWIGSAGMAVSLALVTYAFATASLDPNGKLAMSDAMGMLALVAANVYVVFFNASWGPVMWVMLGEMFPNQIRGSGLAIAGAAQWTSNFAITVSFPILLGSIGLAGAYGIYTVAAFISVFFVLKYVYETKGKELEQMEG

SEQ ID NO: 8088 - DNA, 1428 bp, Xanthomonas axonopodis
  CDS (1)..(1428)
atgtccagtgtttccattgacggcgcccccgatgccggcgagaacacccgtttcatcatcctgattagttgcgtggccacgatcggtggcttcctgttcggcttcgacagcggcgtgatcaatggcaccgtcgacggcctgaaacagaccttccagtccactgccgcagagacgggcttcgaggtcgcctcgatgctgctgggctgcgccatcggcgccttctttgccggccgcctggccgaccgctggggccgccgcgcggtcctgatcatttccgcggcgctgttcctgctctcggccatcggggccggcgcctcgcacagctctgcctttttcatctttgcgcgcgtgatgggcggctttgcggtgggcgcggccagcgtcatttcgccggcctacatcgccgaggtcgcctccgcgcgctaccgcggccggctcgccacgatgcagcagatcgccatcatcagcgggctgttctgcgcattcctgagcaactacctgctggccaacgccgccggtgcctccaccgagccgctctgggccgggcaggccgcctggcgctggatgttctggatgcaggcggttccctccatcctgttcctgttgctgctgctggtcatcccggaaagcccgcgctatctggtggtcaagggtcgccgcgagcaggcgctggtggtgctcaagcgcctgtacggcaacgccgccgcgcagaccaagctgggcgagatttccgcctcgatggcggccgaccagcacaagcccaagttctccgacctgatcaacaaggccaccggcaagatccgccccatcgtctggatcggcattggcctggcggtgttccagcaactggtcggcatcaacgtggtgttctactacggcgcggtgttgtggcaggcagtgggcttctccgagcaggatgcgctgttgatcaacgtgctttccggcggcctcagcatcggtgcctgcctggtcacggtgatgctggtggacaagatcggccgcaagccgctgctgtggatcggctcggccggcatggccgtctcgctggccttggtgacctacgcgtttgccactgcctcgctggatcccaacggcaagcttgcgatgtccgatgccatgggcatgctcgccctggtggccgccaacgtctatgtggtgttcttcaacgcctcgtggggcccggtgatgtgggtgatgctgggcgaaatgttccccaaccagatccgcggctcgggcctggccattgccggtgccgcgcagtggacgtccaacttcgccatcaccgtcagcttcccgatcctgctcggcagtatcggtctggccggtgcctacggcatctacaccgtcgccgccttcatctcggtgttcttcgtactcaagtacgtctacgagaccaagggcaaggagctggagcagatggagggctga

SEQ ID NO: 8089 - protein, 475 aa, Xanthomonas axonopodis
MSSVSIDGAPDAGENTRFIILISCVATIGGFLFGFDSGVINGTVDGLKQTFQSTAAETGFEVASMLLGCAIGAFFAGRLADRWGRRAVLIISAALFLLSAIGAGASHSSAFFIFARVMGGFAVGAASVISPAYIAEVASARYRGRLATMQQIAIISGLFCAFLSNYLLANAAGASTEPLWAGQAAWRWMFWMQAVPSILFLLLLLVIPESPRYLVVKGRREQALVVLKRLYGNAAAQTKLGEISASMAADQHKPKFSDLINKATGKIRPIVWIGIGLAVFQQLVGINVVFYYGAVLWQAVGFSEQDALLINVLSGGLSIGACLVTVMLVDKIGRKPLLWIGSAGMAVSLALVTYAFATASLDPNGKLAMSDAMGMLALVAANVYVVFFNASWGPVMWVMLGEMFPNQIRGSGLAIAGAAQWTSNFAITVSFPILLGSIGLAGAYGIYTVAAFISVFFVLKYVYETKGKELEQMEG

SEQ ID NO: 8090 - DNA, 1778 bp, Apium graveolens var
  CDS (79)..(1650)
tcggcaccagatcacactccatgttcatgtgccacattgtaccctaaaacagtacttagctcttcatctctcttaaagatggctggagctttcaatgtttccggtgacgattccggcggctctaaagatgtaggatcacctgtaatatttgatgctgtcaagaaacctaaacgaaataaatatgcttttggttgcgctattttagcttccatgacttccgttttgcttggttatgatattggagtgatgagtggagcagcaatttacataaaagatcagctccatgtgtcggacgtaaaactggagattgttgtcggaataattaacttcttttcacttgttgggtctgctcttgccggaagaacctccgactggattggcaggcgttacacaatggtgctagccggtgctatattttttgttggagcaatacttatgggatttgcaaccaactattcatttctgatgtttggtcgattcgtcgccggaatccggagtaggttatgccctcatgattgctccggtgtacacggccgaggtttcttcagcatcatctcgtggatttcttacttcattcccggaagtttcattaatatcggtgtactgctcggatatgtctcgaattatgcattttccaaactccctgccaacttgggctggcgattcatgcttggaatcggagcaataccttcaatcggtttagcgattggtgtcctaggcatgcccgaatcacctcgttggctcgtcatgaaaggccgtctcggcgaagctagacaagtcctagacaaaacctcagattccaaagaagaatctcgccttagattatccgacatcaaacaggctgctggcatacccgaagaatgcaacgacgatatcgttgtaatgcctaaacggaggaatgacgaggcagtgtggaaagagttgcttctccatcctacaccatcagtccgtcacgcgttcattgctggcgttggtctacattttttccaacaatcaagtggcatagacgctggtggtttgtacagtcctcgaattttcgaaaaggctggaatcacgagtaccgacttaaaactgctagcaacaatagctgttggaatctcgaagacactcttcatcctagtagctacatttttactcgatcgaatcggacgacgtccattgcttctcacaagcatgggaggaatgatcatatccttaactctcctgggaacatccttggctgttattgccactcagatcacacagttcattgggccggggcattggcaatcttcggaggtttaccatacgtgggccgtttttttttggctagggccaattgcatggggttatagttcagaggtgttcccattacgactaagggcccaaggatgtagcattggagtagctgttaacaggggtacaagtggaattatctcgatgacatttttgtcgctatacaaagccataagtatagcaggggcattctatttatttgcagctattgcaggagtggcatggatatttatattcacattacttcctgaaacacaagggaggagccttgaagaaatggggttactgtttggaacctattttggttggagaaaaactttgaagggtttgaagaacagagaagctgaggaagctaaaaatgctaatgtcatatagaaagtttatatttgtcaagtatgggtagtctactttatatgactctgttaccggtacataattttgtaaaataatgtgaattcgggaacaaatccatgtgtgatgagaccaaaaaaaaaaaaaaaaaa

SEQ ID NO: 8091 - protein, 523 aa, Apium graveolens var
MAGAFNVSGDDSGGSKDVGSPVIFDAVKKPKRNKYAFGCAILASMTSVLLGYDIGVMSGAAIYIKDQLHVSDVKLEIVVGIINFFSLVGSALAGRTSDWIGRRYTMVLAGAIFFVGAILMGFATNYSFLMFGRFVAGIRSRLCPHDCSGVHGRGFFSIISWISYFIPGSFINIGVLLGYVSNYAFSKLPANLGWRFMLGIGAIPSIGLAIGVLGMPESPRWLVMKGRLGEARQVLDKTSDSKEESRLRLSDIKQAAGIPEECNDDIVVMPKRRNDEAVWKELLLHPTPSVRHAFIAGVGLHFFQQSSGIDAGGLYSPRIFEKAGITSTDLKLLATIAVGISKTLFILVATFLLDRIGRRPLLLTSMGGMIISLTLLGTSLAVIATQITQFIGPGHWQSSEVYHTWAVFFWLGPIAWGYSSEVFPLRLRAQGCSIGVAVNRGTSGIISMTFLSLYKAISIAGAFYLFAAIAGVAWIFIFTLLPETQGRSLEEMGLLFGTYFGWRKTLKGLKNREAEEAKNANVI

SEQ ID NO: 8092 - DNA, 2118 bp, Homo sapiens
  CDS (110)..(1603)
agcggggctgagcgaagccgcggggcccaaccgcagtcgcggggtctgggaggaagcagtaccttgaagagaaattggagagggagtcaattcctaggatagcagagagatggacaacagacagaatgtcaccccagctctgatctttgccatcacagttgctacaatcggctctttccagtttggctacaacactggggtcatcaatgctcctgagacgatcataaaggaatttatcaataaaactttgacggacaaggcaaatgcccctccctctgaggtgctgctcacgaatctctggtccttgtctgtggccatattttccgtcgggggtatgatcggctccttttccgtcggactctttgttaaccgctttggcaggcgcaattcaatgctgattgtcaacctgttggctgccactggtggctgccttatgggactgtgtaaaatagctgagtcagttgaaatgctgatcctgggccgcttggttattggcctcttctgcggactctgcacaggttttgtgcccatgtacattggagagatctcgcctactgccctgaggggtgcctttggcactctcaaccagctgggcatagttattggaattctggtggcccagatctttggtctggaactcatccttgggtctgaagagctatggccggtgctattaggctttaccatccttccagctatcctgcaaagtgcagcccttccatgttgccctgaaagtcccagatttttgctcattaacagaaaaaaagaggagaatgctacgcggatcctccagcggttgtggggcacccaggatgtatcccaagacatccaggagatgaaagatgagagtgcaaggatgtcacaagaaaagcaagtcaccgtgctggagctctttagagtgtccagctaccgacagcccatcatcatttccattgtgctccagctctctcagcagctctctgggatcaatgctgtgttctattactcaacaggaatcttcaaggatgcaggtgttcaacagcccatctatgccaccatcagcgcgggtgtggttaatactatcttcactttactttctctatttctggtggaaagggcaggaagaaggactctgcatatgataggccttggagggatggctttttgttccacgctcatgactgtttctttgttattaaagaatcactataatgggatgagctttgtctgtattggggctatcttggtctttgtggcctgttttgaaattggaccaggccccattccctggtttattgtggccgaactcttcagccagggcccccgcccagctgcgatggcagtggccggctgctccaactggacctccaacttcctagtcggattgctcttcccctctgctgcttactatttaggagcctacgtttttattatcttcaccggcttcctcattaccttcttggcctttaccttcttcaaagtccctgagacccgtggcaggacttttgaggatatcacacgggcctttgaagggcaggcacacggtgcagatagatctgggaaggacggcgtcatggggatgaacagcatcgagcctgctaaggagaccaccaccaatgtctaagtcatgcctccttccacctccctcccggcatgggaaagccacctctccctcaacaagggagagactttatcaggatgaacccaggactgcttctgaatgctgctacttgatttctttctcatcccacgcactccatgagcaccccaaggctgcagtttgttggatcttcaatggctttttaaattttatttcctggacatcctcttctgcttaggagagaccgagtgaacctaccttcatttcaggagggattggccgcttggcacatgacaactttgccagcttttcctcccttgggttctgatattgccgcactagaggatataggagaggaaaagtaaggtgcagttgccccaacctcagacttaccaggaagcagatacatatgagtgtggaagccggagggtgtttatgtaagagcaccttcctcacttccatacagctctacgcggcaaattaacttgagttttatttatcttatcctctggtttaattacataaatatttatttttta

SEQ ID NO: 8093 - protein, 497 aa, Homo sapiens
MDNRQNVTPALIFAITVATIGSFQFGYNTGVINAPETIIKEFINKTLTDKANAPPSEVLLTNLWSLSVAIFSVGGMIGSFSVGLFVNRFGRRNSMLIVNLLAATGGCLMGLCKIAESVEMLILGRLVIGLFCGLCTGFVPMYIGEISPTALRGAFGTLNQLGIVIGILVAQIFGLELILGSEELWPVLLGFTILPAILQSAALPCCPESPRFLLINRKKEENATRILQRLWGTQDVSQDIQEMKDESARMSQEKQVTVLELFRVSSYRQPIIISIVLQLSQQLSGINAVFYYSTGIFKDAGVQQPIYATISAGVVNTIFTLLSLFLVERAGRRTLHMIGLGGMAFCSTLMTVSLLLKNHYNGMSFVCIGAILVFVACFEIGPGPIPWFIVAELFSQGPRPAAMAVAGCSNWTSNFLVGLLFPSAAYYLGAYVFIIFTGFLITFLAFTFFKVPETRGRTFEDITRAFEGQAHGADRSGKDGVMGMNSIEPAKETTTNV

SEQ ID NO: 8094 - DNA, 1449 bp, Arabidopsis thaliana
  CDS (1)..(1449)
atggccattagggaaatcaaagatgtagagaggggtgaaatagtgaataaggtagaagatcttgggaaaccatttttgactcatgaagatgatgaaaaagagagtgagaataatgaatcatatttgatggttctcttcagtacttttgttgctgtctgtggctcctttgagtttggctcttgtgttggatactcagcgcctactcagtcatctataagacaagatctcaatctctcccttgcagagttctccatgtttggatccatcttaactatcggtgcaatgcttggtgctgttatgagtgggaaaatttcagatttctccggccgaaaaggggcaatgaggacatcagcttgcttctgcattacaggttggctcgctgtcttcttcaccaagggggcattgttacttgatgtaggaaggttctttacaggatatggaattggagttttttcttatgtggtccctgtgtacattgctgagatatctcccaagaatctccgaggtggactcacaacactgaaccaactcatgattgtgatcggctcatcggtttctttcttgatcggatctctcatttcttggaaaactcttgccctaaccggacttgctccctgcattgttttgctctttggcttgtgcttcatacccgaatctcctcgatggctggcaaaagcaggccatgagaaagagtttcgcgtagccctgcaaaagctgcgaggaaaagatgcagatatcacaaatgaagcagacggtattcaagtctcgattcaagctctagagattcttccaaaagcaagaatccaagaccttgtgtccaagaaatatggtcgatctgtcatcattggtgtttccctgatggtattccaacagtttgttggaatcaatgggatcggattctacgcaagtgaaacgtttgtaaaagccggatttacctctgggaaactaggaacaatcgctatcgcttgtgttcaggtgccaataactgttcttggaacaatcttgatagataaatctggacgaaggccactaattatgatttcagctggtggtatcttcttgggatgcatactcacaggcacatctttcttactcaagggacagagcttgttgcttgaatgggtcccttccttagccgttggaggtgtacttatctatgtagctgctttctccatcggaatgggacctgttccttgggtgataatgtctgagatatttccgataaacgtaaagggaatcgccggaagcttagtggtactagtgaattggtctggtgcttgggctgtttcttacactttcaacttcctcatgagctggagctctccaggtacattctatttgtactcggcttttgcagctgcgacgataatatttgtggcgaagatggtgccagagacgaaagggaagacactggaagagatccaagcttgtattcgaagagaaacataa

SEQ ID NO: 8095 - protein, 482 aa, Arabidopsis thaliana; identical to SEQ ID NO: 482

SEQ ID NO: 8096 - DNA, 1561 bp, Arabidopsis thaliana
  CDS (1)..(1530)
atgacattgacgatcccaaacgcacctgggagctccgggtacttggatatgttcccagagagaaggatgtcgtattttgggaattcttacattctgggtttgactgtcactgccggaatcggtggccttctgttcggttatgatacaggtgtaatttccggtgcccttttgtacattaaggatgatttcgaagttgttaagcagagcagtttcttacaggaaactattgtaagtatggctttagttggtgccatgattggtgctgcagctggaggttggatcaatgactactacggtcgtaaaaaggcgactctttttgcagatgttgtctttgcagctggagctatcgttatggctgctgctcctgatccgtatgttttgatatcgggtcgtctcttggtcggtttaggagttggtgttgcttctgtgactgctccggtttatatagcggaagcatctccatcggaagttagaggtggacttgtgagcaccaacgtattgatgatcactggtggacagtttctttcatatctcgttaattctgctttcacacaggttccaggaacatggagatggatgcttggtgtttcaggcgttcccgctgtgattcagttcatcctcatgcttttcatgccagaatcccctcgatggcttttcatgaaaaatcgtaaagcggaagccatccaagtgctcgccagaacctatgacatctcgcggttagaagacgagattgatcatctttcagcggctgaagaggaagaaaaacaaaggaagcgcactgttggctacttggatgttttcagatccaaagaattgagacttgcatttcttgccggagcaggacttcaggcgtttcagcagttcactggtatcaatacagttatgtactacagccctacgatagtccaaatggctggatttcactcaaaccagctcgctttgttcctgtctctcattgttgctgccatgaatgctgctggaacagtcgtggggatttacttcatcgatcattgtggaaggaaaaagctagctctctcaagtttatttggcgtcattatatcactcttaatcctctcagtctcgtttttcaaacaatctgagacatcatctgatggagggctctatggttggctcgctgtgcttggcttagctctatacattgttttctttgcaccgggaatgggaccagtcccatggacggtgaactcagagatataccctcaacaataccgaggcatatgcggaggcatgtcagctacagttaactggatcagcaatttgattgtggcacaaacattcttgacaatcgcggaagctgctggaacaggaatgactttcttgattttggcgggaattgcggttcttgctgtaatctttgtgattgtgtttgtccctgagactcaagggctaacgttttcggaagttgaacagatttggaaagaaagagcttatggaaatatcagtggctggggcagtagcagtgatagcaacaacatggaagggttactcgagcagggatctcaatcttaaagatcttggatggctcatgagtcatgcatga

SEQ ID NO: 8097 - protein, 509 aa, Arabidopsis thaliana
MTLTIPNAPGSSGYLDMFPERRMSYFGNSYILGLTVTAGIGGLLFGYDTGVISGALLYIKDDFEVVKQSSFLQETIVSMALVGAMIGAAAGGWINDYYGRKKATLFADVVFAAGAIVMAAAPDPYVLISGRLLVGLGVGVASVTAPVYIAEASPSEVRGGLVSTNVLMITGGQFLSYLVNSAFTQVPGTWRWMLGVSGVPAVIQFILMLFMPESPRWLFMKNRKAEAIQVLARTYDISRLEDEIDHLSAAEEEEKQRKRTVGYLDVFRSKELRLAFLAGAGLQAFQQFTGINTVMYYSPTIVQMAGFHSNQLALFLSLIVAAMNAAGTVVGIYFIDHCGRKKLALSSLFGVIISLLILSVSFFKQSETSSDGGLYGWLAVLGLALYIVFFAPGMGPVPWTVNSEIYPQQYRGICGGMSATVNWISNLIVAQTFLTIAEAAGTGMTFLILAGIAVLAVIFVIVFVPETQGLTFSEVEQIWKERAYGNISGWGSSSDSNNMEGLLEQGSQS

SEQ ID NO: 8098 - DNA, 1420 bp, Arabidopsis thaliana
  CDS (1)..(1389)
atggaaggagagaataatatggagaaaggattgttattggcaaaaaaggaagacagtgcaaatacaactccacttcttatcttctccaccttcatcattgtctctgcctccttcacctttggcgctgccataggttatactgcagatacaatgtcctccattatgtcagacttggatctttctctcgcacaattttcgctgtttggttcgttgtcgacgtttggaggaatgatcggtgcaatattcagcgccaaagctgcaagtgccttcggtcataaaatgacgttgtgggtggctgatttattctgcataactggttggcttgcaatttcactagccaaggatattatttggcttgacatggggcgatttttggtgggaattggagttggtctcattagctacgtggttcctgtatatattgcagaaataacacccaagcacgtaagaggggcttttacatttagcaatcagcttttgcaaaactgtggagttgcagtcgtatattactttggaaatttcttgtcatggagaactttagccataataggtagtattccatgttggatacaagttattggtttgttcttcatacctgagtctccaagatggctggcgaaaaaaggtcgtgataaagaatgtgaagaagttcttcaaaagttaagaggaagaaaatacgatattgtgcctgaagcttgcgaaatcaagatttcagttgaagcttcgaagaaaaattcgaatatcaacattcgtagtcttttcgaaaagagatatgctcatcaacttacaatcggcattggtttgatgcttctgcaacagttatgtggaactgcaggaataagttcttacggaagcactctatttaaacttgccgggtttcctgctcggattgggatgatggtgttatctcttatcgtcgtaccaaaatctttaatgggtctaatcctcgtggatcgatggggaagacgcccacttcttatgacttcagcgttggggttgtgtttaagctgtatcacattggcagtagcgtttggagttaaagatgtcccgggaattggaaaaattactccaattttctgtttcattggaatattgtcgtttacgatgatgttcgcaattggaatgggagcgttaccatggattataatgtctgagatatttccaatggatataaaggtattagctgggagtttagtgaccatagcaaattggttcactggttggatcgccaactatgctttcaattttatgttggtttggagcccaagcgggacttttataatatccgctataatctgtggagcaacaattgtattcacatggtgcttggtgccggagactcgaagattaacgttagaagaaatccaactgtcgtttgtcaatgtttagggttcatcggaagcattcatatatacatcat

SEQ ID NO: 8099 - protein, 462 aa, Arabidopsis thaliana
MEGENNMEKGLLLAKKEDSANTTPLLIFSTFIIVSASFTFGAAIGYTADTMSSIMSDLDLSLAQFSLFGSLSTFGGMIGAIFSAKAASAFGHKMTLWVADLFCITGWLAISLAKDIIWLDMGRFLVGIGVGLISYVVPVYIAEITPKHVRGAFTFSNQLLQNCGVAVVYYFGNFLSWRTLAIIGSIPCWIQVIGLFFIPESPRWLAKKGRDKECEEVLQKLRGRKYDIVPEACEIKISVEASKKNSNINIRSLFEKRYAHQLTIGIGLMLLQQLCGTAGISSYGSTLFKLAGFPARIGMMVLSLIVVPKSLMGLILVDRWGRRPLLMTSALGLCLSCITLAVAFGVKDVPGIGKITPIFCFIGILSFTMMFAIGMGALPWIIMSEIFPMDIKVLAGSLVTIANWFTGWIANYAFNFMLVWSPSGTFIISAIICGATIVFTWCLVPETRRLTLEEIQLSFVNV

SEQ ID NO: 8100 - DNA, 1998 bp, Oryza sativa
  CDS (197)..(1717)
gacacatcgatattatccaaacaccatataaacctttctcaccttccggattccggccatcttcgtttctcgtcttcgccggcggccgccgcatttctgatcggccgatatatatcggatcttcagactggtcgcagcagctcgtgtgtgattgagaagtacacaaggagaagaaggagaagacgacgcagctgccatgggagaagagaagcagaatgacgagaggaagaacaagtacgccgtcgggtgctccatcatcggctccatcatctcggtcctcatgggctatgacactggtgtgatgagtggggcgatgctgttcatcaaggaggacctgaagacgaacgacacgcaggtgcaggtcctcgccgggatcctcaacgtgtgcgcgctcgtcggctccctcaccgccggccgcgtctccgactgcgtcggccgccgcctcaccatctccctcgccgcctgcatcttcctcgtgggctccgtcctcatgggcctcgcgcccaacttcgccacgctcctcgccggccgctgcgtcgccggcgtcggcgtcggctacgcgctcatgattgcgccggtgtacgccgccgagatcgcctccgccgacatccgcggctcgctcacctcgctcccggagatctgcatcagcttcgggatactcatcggctacgtggccaactacctgctcgccaagctgccgctggtgtacgggtggcgcgccatgctcggcctcggcgcgctcccgagcgccgcgctcgcgctcggcgtgctcgccatgcccgagtccccgcggtggctcgtcgtccagggccgcgccgaggaggcgctctccgtgctccgccgcgtgtgcgacaggcccagcgaggccgacgcgcggctcgcggagatcaaggccgcggcggggctcgccgacgacgacggcgccgccgccaacgcgggcagcggcggcaagggcgtgtggagggagctgttcctgcacccgacgccgccggtgcggcgcatcgtcatcgccgccctggggatccacttcttccagcacctcaccggcatcgaggccgtggtgctctacagcccgcgcatcttcaaggcggccggcatcgccagccgcaactcggtgctcgctgcgaccatcggcgtgggcgtcaccaagacggcgttcatcctcaccgccatcctcctcgtcgaccgcataggccggcggccgctctacctgtcaagcctcgccggcatcatcgcctcgctcgcctgcctcggcatgggcctcaccgtcatcgagcggtcgccgccgcaccactcgccggcgtgggccgtcgtgctcgccatcgccaccgtgttcaccttcgtcgcctccttctccatcggcgtcgggccgatcacctgggcctacagctcggaggtgtacccgctccgcctccgcgcgcagggcgccagcgtcggcgtcgccatcaaccgcgtgatgaacgccggcgtgtccatgacgttcgtgtcgctctacaaggccatcaccatcggcggcgccttcttcctcttcgccgggctcgccgtcgccgccgccacgttcttctacctcctgtgcccggagacgcagggcaagccgctggaggagatcgaggaggtgttcagccaggggtggcgcgcgcggcgccgggcgtcggcggcggccgtcgagatgccggcctccggcggcggcggcggcggcggcgccccgatggcgtagtgcgaagtgcaccgcggtgcgcgtgcgtgaacaaagtgcaacgcacgcgtgtggatgacgtggaagtgtttgtcacttggggaaaagaacgaatattcgctagctagctagtggtacagatggctagagattgaaatggaagggacctgatactactactgttgcatttgtaggaaacgactactagctaacaatgtcattctggtgtcgtgtggtgtttagaaaaaacaaaatcgttgaaatacagtaaaaaaaattaagaaaataaaaatttgtgctac

SEQ ID NO: 8101 - protein, 506 aa, Oryza sativa
MGEEKQNDERKNKYAVGCSIIGSIISVLMGYDTGVMSGAMLFIKEDLKTNDTQVQVLAGILNVCALVGSLTAGRVSDCVGRRLTISLAACIFLVGSVLMGLAPNFATLLAGRCVAGVGVGYALMIAPVYAAEIASADIRGSLTSLPEICISFGILIGYVANYLLAKLPLVYGWRAMLGLGALPSAALALGVLAMPESPRWLVVQGRAEEALSVLRRVCDRPSEADARLAEIKAAAGLADDDGAAANAGSGGKGVWRELFLHPTPPVRRIVIAALGIHFFQHLTGIEAVVLYSPRIFKAAGIASRNSVLAATIGVGVTKTAFILTAILLVDRIGRRPLYLSSLAGIIASLACLGMGLTVIERSPPHHSPAWAVVLAIATVFTFVASFSIGVGPITWAYSSEVYPLRLRAQGASVGVAINRVMNAGVSMTFVSLYKAITIGGAFFLFAGLAVAAATFFYLLCPETQGKPLEEIEEVFSQGWRARRRASAAAVEMPASGGGGGGGAPMA

SEQ ID NO: 8102 - DNA, 2145 bp, Homo sapiens
  CDS (46)..(1479)
ggcggttcaggcgccagagctggccgatcggcgttggccgccgacatgacgcccgaggacccagaggaaacccagccgcttctggggcctcctggcggcagcgcgccccgcggccgccgcgtcttcctcgccgccttcgccgctgccctgggcccactcagcttcggcttcgcgctcggctacagctccccggccatccctagcctgcagcgcgccgcgcccccggccccgcgcctggacgacgccgccgcctcctggttcggggctgtcgtgaccctgggtgccgcggcggggggagtgctgggcggctggctggtggaccgcgccgggcgcaagctgagcctcttgctgtgctccgtgcccttcgtggccggctttgccgtcatcaccgcggcccaggacgtgtggatgctgctggggggccgcctcctcaccggcctggcctgcggtgttgcctccctagtggccccggtctacatctccgaaatcgcctacccagcagtccgggggttgctcggctcctgtgtgcagctaatggtcgtcgtcggcatcctcctggcctacctggcaggctgggtgctggagtggcgctggctggctgtgctgggctgcgtgcccccctccctcatgctgcttctcatgtgcttcatgcccgagaccccgcgcttcctgctgactcagcacaggcgccaggaggccatggccgccctgcggttcctgtggggctccgagcagggctgggaagacccccccatcggggctgagcagagctttcacctggccctgctgcggcagcccggcatctacaagcccttcatcatcggcgtctccctgatggccttccagcagctgtcgggggtcaacgccgtcatgttctatgcagagaccatctttgaagaggccaagttcaaggacagcagcctggcctcggtcgtcgtgggtgtcatccaggtgctgttcacagctgtggcggctctcatcatggacagagcagggcggaggctgctcctggtcttgtcaggtgtggtcatggtgttcagcacgagtgccttcggcgcctacttcaagctgacccagggtggccctggcaactcctcgcacgtggccatctcggcgcctgtctctgcacagcctgttgatgccagcgtggggctggcctggctggccgtgggcagcatgtgcctcttcatcgccggctttgcggtgggctgggggcccatcccctggctcctcatgtcagagatcttccctctgcatgtcaagggcgtggcgacaggcatctgcgtcctcaccaactggctcatggcctttctcgtgaccaaggagttcagcagcctcatggaggtcctcaggccctatggagccttctggcttgcctccgctttctgcatcttcagtgtccttttcactttgttctgtgtccctgaaactaaaggaaagactctggaacaaatcacagcccattttgaggggcgatgacagccactcactaggggatggagcaagcctgtgactccaagctgggcccaagcccagagcccctgcctgccccaggggagccagaatccagccccttggagccttggtctgcagggtccctccttcctgtcatgctccctccagcccatgacccggggctaggaggctcactgcctcctgttccagctcctgctgctgctctgaggactcaggaacaccttcgagctttgcagacctgcggtcagccctccatgcgcaagactaaagcagcggaagaggaggtgggcctctaggatctttgtcttctggctggaggtgcttttggaggttgggtgctgggcattcagtcgctcctctcacgcggctgccttatcgggaaggaaatttgtttgccaaataaagactgacacagaaaatcaggtcagtgtctctgggctttgtgcaagctcagtttgaaaagggtttattcccatcactgcccaggacaccctgtggctttacttgctcatggtcagccaagcttacccttcacactgagaagtcatttctggctacttccttgggctcagttccctgggtcatcagccatcaaatcttgttgagtttaaaaaataaacagcaaaaaaaaacaaaccaaaaaaaaaaaaaaaaaaaaaaaaaaaaaaa

SEQ ID NO: 8103 - protein, 477 aa, Homo sapiens
MTPEDPEETQPLLGPPGGSAPRGRRVFLAAFAAALGPLSFGFALGYSSPAIPSLQRAAPPAPRLDDAAASWFGAVVTLGAAAGGVLGGWLVDRAGRKLSLLLCSVPFVAGFAVITAAQDVWMLLGGRLLTGLACGVASLVAPVYISEIAYPAVRGLLGSCVQLMVVVGILLAYLAGWVLEWRWLAVLGCVPPSLMLLLMCFMPETPRFLLTQHRRQEAMAALRFLWGSEQGWEDPPIGAEQSFHLALLRQPGIYKPFIIGVSLMAFQQLSGVNAVMFYAETIFEEAKFKDSSLASVVVGVIQVLFTAVAALIMDRAGRRLLLVLSGVVMVFSTSAFGAYFKLTQGGPGNSSHVAISAPVSAQPVDASVGLAWLAVGSMCLFIAGFAVGWGPIPWLLMSEIFPLHVKGVATGICVLTNWLMAFLVTKEFSSLMEVLRPYGAFWLASAFCIFSVLFTLFCVPETKGKTLEQITAHFEGR

SEQ ID NO: 8104 - DNA, 1419 bp, Salmonella typhimurium
  CDS (1)..(1419)
atggtctctattaatcatgactctgctttaacgccgcgttcgcttcgcgacacacgacgtatgaatatgtttgtttcggtttctgcagcggtagcgggactgttatttggtctggatatcggcgttatcgccggggcgctgccttttattaccgaccatttcgtactgaccagccggctgcaggaatgggtcgtcagcagcatgatgcttggcgcggcaattggcgcattatttaacggctggctttcattccggctggggcgtaagtatagcctgatggctggcgcgattttgttcgtgctcggctcgctggggtcggcgtttgcttccagcgtggaagtattgattggcgcccgcgtgatactgggcgtagcagtagggattgcctcctataccgcgccgctttatctctctgaaatggcaagtgaaaatgttcgcggcaaaatgatcagtatgtatcaactgatggtgacgttaggcattgtgctggcttttttatccgatacggcattcagctacagcggcaactggcgcgcgatgttgggcgtgctggcgctgcctgcggtgttgctcattattctggtggtattcctgccgaatagtccgcgttggctggcgcaaaaaggtcgccatattgaagcggaagaggtgctgcgtatgctgcgcgatacctcggaaaaagcccgtgatgaactgaatgagattcgggaaagcctcaaactcaagcagggagggtgggcattatttaaagctaaccgcaatgttcgccgcgccgtgttcctcggtatgctgctacaggcaatgcagcagttcaccggcatgaacatcattatgtactatgcgccgcgcatttttaaaatggccggctttaccaccacggaacagcaaatgatcgccacgctggtggtcggactgacttttatgttcgcgacgtttatcgccgtctttacggtcgataaggccgggcgtaaaccggcgttaaaaatcggtttcagcgtaatggcgttagggacattggtgttgggctactgcctgatgcagtttgataacggtacggcatcaagcggtctctcctggctttccgttgggatgacgatgatgtgtatcgccggttacgcgatgagcgccgctccggtggtgtggatactgtgttcggaaatccagccgctgaaatgccgtgattttggcattacctgttcaaccacgacaaactgggtatcgaacatgatcatcggcgcgacattcctgacactgttggacagcattggcgcggcaggtacattctggctctacaccgcgctgaatatcgcttttatcggcatcactttctggctgattccggaaaccaaaaatgtcaccctggagcacatcgaacgcaagctgatggcgggcgagaagctaagaaatattggcgtgtaa

SEQ ID NO: 8105 - protein, 472 aa, Salmonella typhimurium
MVSINHDSALTPRSLRDTRRMNMFVSVSAAVAGLLFGLDIGVIAGALPFITDHFVLTSRLQEWVVSSMMLGAAIGALFNGWLSFRLGRKYSLMAGAILFVLGSLGSAFASSVEVLIGARVILGVAVGIASYTAPLYLSEMASENVRGKMISMYQLMVTLGIVLAFLSDTAFSYSGNWRAMLGVLALPAVLLIILVVFLPNSPRWLAQKGRHIEAEEVLRMLRDTSEKARDELNEIRESLKLKQGGWALFKANRNVRRAVFLGMLLQAMQQFTGMNIIMYYAPRIFKMAGFTTTEQQMIATLVVGLTFMFATFIAVFTVDKAGRKPALKIGFSVMALGTLVLGYCLMQFDNGTASSGLSWLSVGMTMMCIAGYAMSAAPVVWILCSEIQPLKCRDFGITCSTTTNWVSNMIIGATFLTLLDSIGAAGTFWLYTALNIAFIGITFWLIPETKNVTLEHIERKLMAGEKLRNIGV

SEQ ID NO: 8106 - DNA, 2039 bp, Olea europaea
  CDS (133)..(1767)
acgcggggggaccttccaaagttactctatctacctgccacataaactataaccacactgcaatcacatacgaagtggaagtgccgacaataatctcaaatcaactttctaatttggtcaaattggtggaaaatgcaggtttctacacatgctgttaaaggaaatttatgccttggattacaaaaccttaggccgttgccgagttcgcgtgaattgagagagaataatttaggtttcgctgttagtgagcttcggatgacaaaaaggagcagttgcttcggaattggcctagactcaattgccatgggagcaagggggaattggcctaaaagtgtgtacggatcattggccaaggccagatcagtcagagctcaagcttatgaaggagatgttgaggatgttgcacctgccaaaatccaagtgaaatcatctggaactgttctgccatatgttggtgttgcttgtttgggagccattctttttggatatcatctaggggtggttaatggtgctctagagtatcttgccaaggatcttggaattgctgaaaatgctgtgttgcaaggttgggtggttagcacacttcttgctggtgccactgttggttcattcactgggggttctttggctgataaatttgggcgaacaaagacttttctgttggatgcaattccacttgcagttggagcatttctttgtgccactgcacagaacatagagacaatgataattggtcgcttacttgctggaattggaattggtatatcgtctgctattgtgccactttatatatctgagatctcaccaactgaaatccgtggaacacttggatctgtaaaccagctatttatatgtattgggattctggcagcattggtagctggattgcctttagctggaaatcctttgtggtggaggacgatgtttggtgttgcgattattccgtccatattattggcacttggaatggctttttctcctgaaagcccacggtggctttatcagcaagggaaaatttctgaagctgaagtgtccatcagaaagctaaatggaaaagaaagggttgctgaggttatgagtgatttggatgcagcagctcaaggttcctctgaaccagaagctgggtggtttgatcttttcagtagtcgctattggaaagttgttagcgttggtgcagctctcttcttgttccagcagcttgctgggataaatgccgtagtatactattctacttctgttttccgcagtgctggaattacatctgatgttgctgccagtgctctagttggggcggcaaatgtttttgggacaaccattgcgtcctccttgatggataagcaaggaaggaaaagtcttctgcttacaagctttgctggcatggctgtttccatgttgctgctttccttaaccttcacttggaagactctggcaccatatgcaggcacccttgctgttcttggcactgttctttatgtattatccttctctcttggtgctggtcctgtgcctgctcttctgcttccagagatttttgcctctagaattagagcaaaagcagtggcattgtctttaggcatgcattggatatcgaattttgtcattggcctgtacttcttgagcgttgtaactaagtttggaataagtacagtgtacctgggatttgcatctgtttgtcttctagcagtcatgtacatagcaggtaatgttgtggaaactaagggacgatcactggaggaaatagagcgcgctcttactgctgctccttgaggggaataatgttgtagcaccaagggaagtatttgccgtttcccctatcgcagattatccgagaatcatctttccagttttcattatgtgacaaatggactgttggtaagcatttgatgaacctgcgttttgattttggctttgttattttgattgtaactagtgtggggggcgttgtctcgacttttatcacatcagtagatgggtgttggggacagtttgatgtaaattagatagttctttcactaataaggatttagatttgagaaatt

SEQ ID NO: 8107 - protein, 544 aa, Olea europaea
MQVSTHAVKGNLCLGLQNLRPLPSSRELRENNLGFAVSELRMTKRSSCFGIGLDSIAMGARGNWPKSVYGSLAKARSVRAQAYEGDVEDVAPAKIQVKSSGTVLPYVGVACLGAILFGYHLGVVNGALEYLAKDLGIAENAVLQGWVVSTLLAGATVGSFTGGSLADKFGRTKTFLLDAIPLAVGAFLCATAQNIETMIIGRLLAGIGIGISSAIVPLYISEISPTEIRGTLGSVNQLFICIGILAALVAGLPLAGNPLWWRTMFGVAIIPSILLALGMAFSPESPRWLYQQGKISEAEVSIRKLNGKERVAEVMSDLDAAAQGSSEPEAGWFDLFSSRYWKVVSVGAALFLFQQLAGINAVVYYSTSVFRSAGITSDVAASALVGAANVFGTTIASSLMDKQGRKSLLLTSFAGMAVSMLLLSLTFTWKTLAPYAGTLAVLGTVLYVLSFSLGAGPVPALLLPEIFASRIRAKAVALSLGMHWISNFVIGLYFLSVVTKFGISTVYLGFASVCLLAVMYIAGNVVETKGRSLEEIERALTAAP

SEQ ID NO: 8108 - DNA, 1521 bp, Arabidopsis thaliana
  CDS (1)..(1521)
atggccggtggaggattggctcttgatgtctccagcgccggaaacattgatgccaagatcacagccgcagttgtcatgagttgcattgtggctgcctcatgtggtctcatttttggctatgacatcggaatctcagggggtgtgacgactatgaagccgtttcttgagaaattctttccatcggttcttaaaaaagcttcggaagctaagacgaatgtctactgcgtctacgacagccaacttcttacggccttcacatctagcctttatgttgccggcttagtagcttccttagtggctagccgtctcacagcggcttatggtcgccgaaccaccatgatccttggcggtttcactttcctctttggtgctctgatcaatggcttagctgctaacatcgccatgctcatctccggtcggattttgctaggatttggtgtcggtttcaccaaccaggcggctccggtatatctatcggaagtagcaccaccgcgatggcgtggagcattcaacatcggcttttcatgcttcatcagtatgggagtagtagcagccaatctaataaattacggtaccgatagtcaccgtaacggctggcgtatctcgctaggtctagctgctgtaccagccgcgatcatgaccgtgggatgtctattcatttccgacacaccttctagcctcttggcgcgtgggaaacacgatgaagctcacacgtcgctgcttaagctacgtggcgtcgaaaacatagctgacgtggaaaccgagctagcagagttggttaggtcaagccagctagccattgaggctagagccgaactgtttatgaagacgatattgcagagacggtataggcctcatcttgtggttgctgtggtgataccatgttttcaacagttaactggaataacggtgaacgcgttctatgcgccggttctgtttcgatcggttgggtttggttctggtccggctcttattgcgacgttcatactcgggtttgttaatcttggttcgcttcttctctcaacaatggttattgaccggtttggtagacggtttttgttcattgctggcggtattctgatgcttctctgtcagattgcagtggctgtgttactagctgtgacagtgggagccaccggggacggagagatgaagaagggttacgccgtgacggtggtggtgttactttgcatatacgcagctgggtttggatggtcgtgggggccattaagctggcttgtcccaagtgagatattcccactcaagatacgaccagctggtcagagcttaagcgttgccgtgaacttcgccgcaacgtttgctctctctcaaacgttcttagcaacgctctgcgatttcaagtacggtgctttcttgttttacggcggttggatctttacaatgacgatattcgtcatcatgttcttgcccgagaccaaagggatacctgtggattctatgtatcaagtttgggagaagcattggtattggcaacggtttactaaaccgacgtcaacttaa

SEQ ID NO: 8109 - protein, 506 aa, Arabidopsis thaliana
MAGGGLALDVSSAGNIDAKITAAVVMSCIVAASCGLIFGYDIGISGGVTTMKPFLEKFFPSVLKKASEAKTNVYCVYDSQLLTAFTSSLYVAGLVASLVASRLTAAYGRRTTMILGGFTFLFGALINGLAANIAMLISGRILLGFGVGFTNQAAPVYLSEVAPPRWRGAFNIGFSCFISMGVVAANLINYGTDSHRNGWRISLGLAAVPAAIMTVGCLFISDTPSSLLARGKHDEAHTSLLKLRGVENIADVETELAELVRSSQLAIEARAELFMKTILQRRYRPHLVVAVVIPCFQQLTGITVNAFYAPVLFRSVGFGSGPALIATFILGFVNLGSLLLSTMVIDRFGRRFLFIAGGILMLLCQIAVAVLLAVTVGATGDGEMKKGYAVTVVVLLCIYAAGFGWSWGPLSWLVPSEIFPLKIRPAGQSLSVAVNFAATFALSQTFLATLCDFKYGAFLFYGGWIFTMTIFVIMFLPETKGIPVDSMYQVWEKHWYWQRFTKPTST

SEQ ID NO: 8110 - DNA, 1557 bp, Arabidopsis thaliana
  CDS (1)..(1467)
atgagttttagggatgataatacggaagagggaagaaatgatcttcggcgaccgttcttacacacaggaagttggtatcggatgggttcgagacaatctagtatgttggaatcgtctcaagttattcgagacagctcaatttctgtcttagcttgtgttttgattgttgctcttggtcctattcaattcggattcacttgtggttattcctcaccaactcaagctgccattactaaggatcttggtttaactgtatcagagtactctgtgtttgggtctctatccaatgtgggtgctatggttggagcaattgcgagtggtcagattgctgaatacgttggacggaaagggtctctgatgattgctgcaattcccaatattattggatggctttcgatatcatttgcaaaagatacttcttttctttacatgggaagattgttagaaggcttcggagttgggattatctcctatacggttcccgtatatatagctgagatcgctccacagaccatgagaggagccttaggttcagttaaccagctttctgtaacaattgggataatgctggcgtatttactcggtctctttgttccatggagaattcttgcagttttgggagtattgccatgtacattgttgataccgggtctttttttcattcctgaatctcctcggtggttggcaaagatgggtttgacagatgatttcgaaacttcattgcaagttcttcgtggatttgagactgatattaccgttgaggttaatgaaatcaagagatctgtggcatcatctagcaaacgttctgcagttcggtttgtagacctcaagcgcaggagatactatttcccactgatggttggtatagggctgcttgcacttcaacaacttggaggaatcaatggtgtcttgttctattcgagtacaatttttgaatctgcaggggtgacatcaagtaatgtggcgacatttggagttggcgttgttcaggtagtggcgactgggatagcgacatggttggtggataaagcaggtcgtcggcttctactcatgatctcttctatcggaatgacgataagcctcgtgattgtagcagttgcattttaccttaaggaatttgtatcacctgattccaacatgtacaacattctaagcatggtttccgtagttggagttgtggctatggttatttcttgctctctaggaatgggaccaattccatggctgattatgtctgagattctgccagtgaatataaagggtttagccggaagtatagcaactttgttaaactggttcgtgtcatggttagtgacaatgactgcaaatatgctgttagcatggagcagtgggggaactttcactctctacgctttggtttgtggattcactgtggtttttgtgagtctttgggttcctgagactaaaggaaaaacgcttgaagagatccaagctttgttcagatgatcaaaacaagaagaggaagaagaagacaaaattttcactttttgctttctccattacagatcattcttttgtcccttccctgtgtctgta

SEQ ID NO: 8111 - protein, 488 aa, Arabidopsis thaliana
MSFRDDNTEEGRNDLRRPFLHTGSWYRMGSRQSSMLESSQVIRDSSISVLACVLIVALGPIQFGFTCGYSSPTQAAITKDLGLTVSEYSVFGSLSNVGAMVGAIASGQIAEYVGRKGSLMIAAIPNIIGWLSISFAKDTSFLYMGRLLEGFGVGIISYTVPVYIAEIAPQTMRGALGSVNQLSVTIGIMLAYLLGLFVPWRILAVLGVLPCTLLIPGLFFIPESPRWLAKMGLTDDFETSLQVLRGFETDITVEVNEIKRSVASSSKRSAVRFVDLKRRRYYFPLMVGIGLLALQQLGGINGVLFYSSTIFESAGVTSSNVATFGVGVVQVVATGIATWLVDKAGRRLLLMISSIGMTISLVIVAVAFYLKEFVSPDSNMYNILSMVSVVGVVAMVISCSLGMGPIPWLIMSEILPVNIKGLAGSIATLLNWFVSWLVTMTANMLLAWSSGGTFTLYALVCGFTVVFVSLWVPETKGKTLEEIQALFR

SEQ ID NO: 8112 - DNA, 1876 bp, Arabidopsis thaliana
  CDS (87)..(1727)
ctcagcaatcacaatctatctggtttaagccctcactatcctctctctcaaatcgcggagtctccgaagtttctctgtcagacaaaatgcagtcgtcaacgtatgcggttaaaggaaacgctgcgtttgcgtttcagagacggaccttctcttctgacagatcgacgacttctaccggaattcgcttcgctggttataagagcttagccaccaccgggccactctactgttctggttctgaagccatgggagcgacgcttgctcgtgctgataacgggatccagagcgttatgagtttctcttctgtcaaagctcgatcggtcagagctcaagcctcatctgatggagatgaagaagaagctatacctctgagatctgaagggaaaagctctggaacagttttgccttttgttggtgttgcttgtcttggtgctatactctttggttatcatctcggggtggttaatggtgctcttgaatatcttgctaaggatcttgggatcgccgaaaatactgttttgcaaggatggattgttagttctctgcttgctggtgctacggtaggttcattcactggaggtgcattagctgacaaatttggacgaacaagaacttttcaattggatgctatcccgcttgccattggagctttcttatgtgcaacagctcagagtgtgcagactatgattgtgggacgtctgctcgctggaattggaattggaatctcatcagcgattgtaccactttacatatctgagatatcaccaactgaaatccgtggagcactcggatctgtgaaccagttgttcatctgtataggaatacttgcagccttgatagctggattaccccttgcagcaaaccctctatggtggaggacgatgtttggtgttgcagttatcccttccgttctattggccataggaatggctttttctccagaaagcccaaggtggctcgttcagcaaggaaaagtctctgaagctgaaaaggcgatcaaaactttgtatggcaaagaaagagtggttgaactagttcgcgacttatcagcctctggccaaggttcttctgagccggaggcaggatggtttgatctattcagcagccgctactggaaagttgtaagcgtaggtgcggctctcttcttgtttcaacagttagccgggataaacgcagttgtgtattactccacatcggtattccgtagtgcgggaatccaatcagatgttgcagccagtgctctcgttggagcatcaaatgtctttggcactgctgttgcttcatcgttgatggataaaatgggaaggaaaagtcttttactgacaagctttggtggaatggctttgtcaatgctgttactctccttgtccttcacatggaaggctcttgctgcctattctggaacccttgccgttgttggaactgttctatatgtcctgtcattctcacttggtgctggcccggtaccggctcttcttcttccagagatatttgcatcccgaatcagagcaaaagccgtcgctctttctctcggcatgcactggatatcaaactttgtgatcggactatacttcttaagcgttgtgactaaattcggaatcagcagtgtctacttgggttttgctggagtctgcgtccttgcggtcctctacattgcaggaaacgtcgtcgagactaaaggtcgatcactggaggaaatagagcttgctcttacatctggagcttgaaattaaacaaaagaaatcagcagaacaaaaaccagtttgtttcatcatttagtttgtgagtctttctctaatctgctactcttaaattgtacaatggacgacgttatcaataacgagaaatcttttcatgaccaaaaaaaaaaaaaaaa

SEQ ID NO: 8113 - protein, 546 aa, Arabidopsis thaliana
MQSSTYAVKGNAAFAFQRRTFSSDRSTTSTGIRFAGYKSLATTGPLYCSGSEAMGATLARADNGIQSVMSFSSVKARSVRAQASSDGDEEEAIPLRSEGKSSGTVLPFVGVACLGAILFGYHLGVVNGALEYLAKDLGIAENTVLQGWIVSSLLAGATVGSFTGGALADKFGRTRTFQLDAIPLAIGAFLCATAQSVQTMIVGRLLAGIGIGISSAIVPLYISEISPTEIRGALGSVNQLFICIGILAALIAGLPLAANPLWWRTMFGVAVIPSVLLAIGMAFSPESPRWLVQQGKVSEAEKAIKTLYGKERVVELVRDLSASGQGSSEPEAGWFDLFSSRYWKVVSVGAALFLFQQLAGINAVVYYSTSVFRSAGIQSDVAASALVGASNVFGTAVASSLMDKMGRKSLLLTSFGGMALSMLLLSLSFTWKALAAYSGTLAVVGTVLYVLSFSLGAGPVPALLLPEIFASRIRAKAVALSLGMHWISNFVIGLYFLSVVTKFGISSVYLGFAGVCVLAVLYIAGNVVETKGRSLEEIELALTSGA

SEQ ID NO: 8114 - DNA, 1377 bp, Arabidopsis thaliana
  CDS (1)..(1377)
atggaagaaggacttcttcggcatgaaaacgacagagatgatcgtcgtatcacagcttgtgttatcctcagcacttttgttgctgtttgtagttccttcagctatggatgtgctaatggttatacttccggcgctgaaactgcaatcatgaaagagttagacctttctatggcacaattttcagcgtttggttcctttttgaacttgggaggtgcggtgggagctttgtttagcggtcaattagcagtcatccttggcagaagacgaacgttgtgggcatgcgatttgttctgcatttttggttggctctccattgcttttgcaaagaatgtcttgtggctggacttgggaagaatttctttaggcatcggagtgggcttgactagctacgtggtccctgtctatattgcggaaatcactcctaaacatgttcgtggcgcattttctgcttcaaccctgcttcttcaaaacagtggaatttctctgatttattttttcggaactgtaattaattggcgggttctggctgttataggtgctcttccatgtttcattccagtgatcggtatatatttcataccggaatcaccaagatggttggctaaaatcggttcagttaaagaagtagaaaactctctgcatcgccttagagggaaagatgctgatgtttcagatgaagccgctgaaattcaggttatgacaaaaatgcttgaagaagattcaaagtccagtttttgtgacatgtttcagaagaagtatagacgaactctagtggttggaattggtttaatgttgatacaacaattatctggagctagcggtatcacatattattcaaatgccatatttagaaaagctggcttttcagagagacttggatcaatgatatttggtgtgttcgtgatcccaaaagctttggttggtctgattcttgtggatagatggggaagacgaccactcctattggcttctgctgttggaatgtctatcggatccttgcttattggggttagcttcacgttacaggaaatgaatctgtttcctgaatttattccagttttcgtcttcataaatattctggtctactttggattttttgcaatcggtataggagggctaccttggatcattatgtctgagatatttccgataaatataaaagtttcagcagggtcaatcgttgcattaacatcgtggaccactgggtggttcgttagttatggtttcaactttatgtttgaatggagcgcacaaggaaccttttacatatttgcgatggtggggggattgtcattgctttttatatggatgctcgtgccggaaaccaaaggacagtcgcttgaagaattgcaagcatcccttacggggacaacctaa

SEQ ID NO: 8115 - protein, 458 aa, Arabidopsis thaliana
MEEGLLRHENDRDDRRITACVILSTFVAVCSSFSYGCANGYTSGAETAIMKELDLSMAQFSAFGSFLNLGGAVGALFSGQLAVILGRRRTLWACDLFCIFGWLSIAFAKNVLWLDLGRISLGIGVGLTSYVVPVYIAEITPKHVRGAFSASTLLLQNSGISLIYFFGTVINWRVLAVIGALPCFIPVIGIYFIPESPRWLAKIGSVKEVENSLHRLRGKDADVSDEAAEIQVMTKMLEEDSKSSFCDMFQKKYRRTLVVGIGLMLIQQLSGASGITYYSNAIFRKAGFSERLGSMIFGVFVIPKALVGLILVDRWGRRPLLLASAVGMSIGSLLIGVSFTLQEMNLFPEFIPVFVFINILVYFGFFAIGIGGLPWIIMSEIFPINIKVSAGSIVALTSWTTGWFVSYGFNFMFEWSAQGTFYIFAMVGGLSLLFIWMLVPETKGQSLEELQASLTGTT

SEQ ID NO: 8116 - DNA, 1608 bp, Oryza sativa
  CDS (1)..(1608)
atggcagggacgggagcctccgttaagatgattcgttgcgttgtaaagtgcggcgggcagcagcagcacgtcgtcgtcgctgcgcgcggtgatcggaagtcgccggcgatcgcggcgccaccaccagcgaccgtgcggatgccgggccgcgtgctctgctgcggcatgaggtcgcgcggggcggatctcgccggcgtcgagatggcggcggggccgcagccgcagggcggcgtctcggggctcttccgcggcccgcgctcgagcccgcgctactcccgcgtgcgcgccaccgccacagttgatcctgaggatattccattggagaaggttcaagctaaatcttctggaagtgttctgccatatgtgggcgttgcttgtttgggggctattttatttggttatcatcttggagtggtcaacggcgctcttgaatatcttgcaaaggaccttggaatttctgagaatgctgtgttacaaggatgggtggttagcacaaccctggctggtgcgacagcaggttcttttactggaggtgctttagctgacaaatttggacgaacacggacgttcatcctggatgcaatccctctcgctgtaggtgcattcctgagtgcaacagctcatgatgttcgcacaatgattattggccgattacttgctgggattggtattggcatatcttctgctcttgtgcccctttacatatctgaggtatttcacccactgaaatacgtggagcacttggttctgttaatcagctttttatctgcattggaattcttgctgctctggtggaggacaatgttcggaatttcaattgttccatccattttgcttgctcttgggatggctgtttcacctgaaagccctcgttggctattccagcaaggaaaactttctcaggcagaaacagctattaaaaaactatatggaagagaaaaagttgctgaagttatgtatgacctaaaagctgccagccaaggttcttctgagccagatgctggctgtgtgggcgcagctatgttcttgttccaacagcttgccggtataaatgctgttgtatattactctacatcggtgttccgcagtgcaggcattgcatctgatgttgcagcgagtgcccttgttggagcagccaatgtttttggtacaatgattgcatcttctctgatggacaagcaaggaaggaagagccttctgataacaagcttttctggcatggctgcctcaatgttacttctatcattgtccttcacgtggaaggctttggcaccttattcaggccctcttgctgttgctggcactgttttgtatgtgctgtcttttgctcttggagctggcccagttccagcattgctccttcctgaaatatttgcctccagaataagggctaaagctgttgcattatctctgggcatgcactgggtttcgaacttctttattggcctctacttcttgagcgtcgtcaacaaattcggaatcagcactgtgtatttgggatttgcatctgtttgcgctcttgctgttgtctacatagctggaaatgtggttgagaccaaggggcgttctctggaagagattgagcgggctctaagttcagcaagctga

SEQ ID NO: 8117 - protein, 535 aa, Oryza sativa
MAGTGASVKMIRCVVKCGGQQQHVVVAARGDRKSPAIAAPPPATVRMPGRVLCCGMRSRGADLAGVEMAAGPQPQGGVSGLFRGPRSSPRYSRVRATATVDPEDIPLEKVQAKSSGSVLPYVGVACLGAILFGYHLGVVNGALEYLAKDLGISENAVLQGWVVSTTLAGATAGSFTGGALADKFGRTRTFILDAIPLAVGAFLSATAHDVRTMIIGRLLAGIGIGISSALVPLYISEVFHPLKYVEHLVLLISFLSALEFLLLWWRTMFGISIVPSILLALGMAVSPESPRWLFQQGKLSQAETAIKKLYGREKVAEVMYDLKAASQGSSEPDAGCVGAAMFLFQQLAGINAVVYYSTSVFRSAGIASDVAASALVGAANVFGTMIASSLMDKQGRKSLLITSFSGMAASMLLLSLSFTWKALAPYSGPLAVAGTVLYVLSFALGAGPVPALLLPEIFASRIRAKAVALSLGMHWVSNFFIGLYFLSVVNKFGISTVYLGFASVCALAVVYIAGNVVETKGRSLEEIERALSSAS

SEQ ID NO: 8118 - DNA, 1606 bp, Arabidopsis thaliana
  CDS (18)..(1454)
gttgtatcattacatgcatgcataaaatgatggtggtggagaaagaaagaagcatagaagaaaggcttttgcagctcaagaaccaaaacgacgattcagaatgtcgtattactgcttgtgttatccttagtactttcatcgctgtgtgtggttctttctcctttggtgtctctcttggttatacttcaggtgcagagataggaattatgaaggacttggatctttctatcgcgcaattttcagcatttgcttcattatccactttgggagctgcaattggagctttgtttagcggtaaaatggcgatcatccttggcagaagaaaaacaatgtgggtgtccgatctcctctgtatcattggttggttctccatcgctttcgctaaggatgtgatgtggttgaacttcggaagaatctcctcagggataggactcggcttaattagctatgtggtacctgtctatatagcagaaatttcaccaaaacatgttcgtggtacatttacctttacaaatcagctccttcaaaactctggactcgcaatggtttatttttctgggaattttctcaactggaggatattggctttattaggtgctttaccatgcttcattcaagtaatcggtttattcttcgtaccagagtccccaagatggctggcaaaagttggctccgataaagaactagaaaattcacttcttcgtcttagggggggaaatgctgatatttcacgtgaagcctcagacattgaagttatgaccaaaatggtagaaaatgattcaaagtcgagtttttgtgatttgttccagagaaaatatagatacactctcgtggtaggaatcgggctaatgttgatacaacaattttcaggaagttctgcagtgctctcatatgccagtaccattttacggaaagcaggtttttcggtgaccattggatcgacgctactaggtctcttcatgataccaaaagccatgattggtgtcattcttgtcgataaatggggcagacggcctctcttgttgacttctgtatctgggatgtgcataacttccatgcttattggagtcgccttcacattacagaaaatgcaattgctaccggagctaacaccagtattcacgtttatatgcgttacgctgtatattggaacttatgctataggcttgggaggccttccttgggtaattatgtctgagatatttccaatgaatataaaagtaactgcaggaagtatagtaacgttagtatcatggtcaagtagttcgatcgtcacttatgctttcaactttctgctcgagtggagcactcaaggaacattttacgtatttggagcagtcggaggactagcattgctttttatttggttgctcgttccggaaacgaaaggattatcacttgaagaaatacaagcttcgcttattcgtgagcccgatagaataaatcaaagttagattgaaacgtttaagttttattttaatagataaataattaaaatcaatttatgatactgtgctaagaaagtaattttttttttcattatgtaatcactatttaatttttctaatacttagaattttttatgtataaaaaaaaaaaaaaaaaa

SEQ ID NO: 8119 - protein, 478 aa, Arabidopsis thaliana
MHKMMVVEKERSIEERLLQLKNQNDDSECRITACVILSTFIAVCGSFSFGVSLGYTSGAEIGIMKDLDLSIAQFSAFASLSTLGAAIGALFSGKMAIILGRRKTMWVSDLLCIIGWFSIAFAKDVMWLNFGRISSGIGLGLISYVVPVYIAEISPKHVRGTFTFTNQLLQNSGLAMVYFSGNFLNWRILALLGALPCFIQVIGLFFVPESPRWLAKVGSDKELENSLLRLRGGNADISREASDIEVMTKMVENDSKSSFCDLFQRKYRYTLVVGIGLMLIQQFSGSSAVLSYASTILRKAGFSVTIGSTLLGLFMIPKAMIGVILVDKWGRRPLLLTSVSGMCITSMLIGVAFTLQKMQLLPELTPVFTFICVTLYIGTYAIGLGGLPWVIMSEIFPMNIKVTAGSIVTLVSWSSSSIVTYAFNFLLEWSTQGTFYVFGAVGGLALLFIWLLVPETKGLSLEEIQASLIREPDRINQS

SEQ ID NO: 8120 - DNA, 1787 bp, Arabidopsis thaliana
  CDS (100)..(1524)
gctctcttggttttttgctaaaaacagagcattttctctctagctctcactgtttctttaccagaagtttcgtcatattagtacatgcaagtgtaagggatggtgatggaggaaggaagaagcatagaagaagggcttttgcagctcaagaacaaaaacgacgattcagagtgtcgtattactgcttgtgttatccttagcacttttgtcgccgtttgtggctccttctcttttggtgttgctactggttacacttcaggtgctgagacaggagttatgaaggacttggatctttctatcgcgcaattttcagcttttggctcattcgccactttaggagctgcaattggtgcactgttctgcggtaatctggcaatggtcattggcagaagagggacaatgtgggtctccgatttcctatgcatcactggttggctctccatcgcttttgctaaggaagtaatgttgctgaacttcggaagaatcatttcagggataggtttcggcttgacgagctatgtggtacctgtctacatagcagaaattacgccaaaacatgttcgtggtacatttacgttttcaaaccagcttcttcaaaacgctggactcgccatgatttatttttgtgggaacttcatcaattggaggacgttggctttattaggtgctttaccatgcttcattcaagtaatcggtttattcttcgtgccagagtctccaagatggctggccaaagttggctccgataaagaactagaaaattcactgtttcggcttagaggaagagatgctgatatttcacgtgaagcctcagaaattcaagtaatgaccaaaatggtggaaaatgattcaaagtcgagtttttcagatttgttccagagaaagtatagatacaccctcgtggtaggaatcgggctaatgttgatacaacaattctcaggaagtgctgctgtaatctcttatgcaagtaccatttttagaaaagctggtttttcggtggccattggaacgacgatgctaggtatcttcgtgattccaaaagccatgattggcctcattcttgtcgataaatggggcagacgtcctctcttgatgacttcagcgtttgggatgagcatgacttgcatgctacttggggtcgccttcacattacagaaaatgcaattgctttcggaactaactccaatattatcgtttatatgcgtaatgatgtatattgcaacttatgcaataggcttgggaggtctaccttgggtaattatgtcggagatatttccaataaatataaaagtaactgcaggaagtatagttacgttagtctcattttcaagtagttcaatcgtcacttacgctttcaactttctgttcgaatggagcactcaaggaacgtttttcatattcgcgggtatcggtggagcagcgttgctttttatatggttgctcgttccagaaacgaaaggattatcactcgaagaaatacaagtttcacttattcatcagcccgatgaaagaaatcaaacttaatttgaattattttattttattataaaaatgatcaaattcagtttatggtgttatatttgtttatttacaaacaaggattttttttttttcattatgtaattactactttatttttctgggtaattagccccatttttatgatgtatatttacgagatgtaaaacttggcctacgtacatgtgtattttatctctaaaattgcaaatgtaatatttttcggacatatattaaagaagagattgatttctaaaaaaaaaaaaaaa

SEQ ID NO: 8121 - protein, 474 aa, Arabidopsis thaliana
MVMEEGRSIEEGLLQLKNKNDDSECRITACVILSTFVAVCGSFSFGVATGYTSGAETGVMKDLDLSIAQFSAFGSFATLGAAIGALFCGNLAMVIGRRGTMWVSDFLCITGWLSIAFAKEVMLLNFGRIISGIGFGLTSYVVPVYIAEITPKHVRGTFTFSNQLLQNAGLAMIYFCGNFINWRTLALLGALPCFIQVIGLFFVPESPRWLAKVGSDKELENSLFRLRGRDADISREASEIQVMTKMVENDSKSSFSDLFQRKYRYTLVVGIGLMLIQQFSGSAAVISYASTIFRKAGFSVAIGTTMLGIFVIPKAMIGLILVDKWGRRPLLMTSAFGMSMTCMLLGVAFTLQKMQLLSELTPILSFICVMMYIATYAIGLGGLPWVIMSEIFPINIKVTAGSIVTLVSFSSSSIVTYAFNFLFEWSTQGTFFIFAGIGGAALLFIWLLVPETKGLSLEEIQVSLIHQPDERNQT

SEQ ID NO: 8122 - DNA, 1539 bp, Oryza sativa
  CDS (1)..(1539)
atggagaacgccggcgccggcgatggcgcgcccaagcactacccgggcaagatgaccgtcttcgtcttcatcgcctgcctcgtcgcctcctccggcggcctcatcttcggctacgacatcggcatctccggtggcgtgacgtcgatggacccgttcctgtcgcggttcttcccgtcggtgtacgccaaggagaaggaggtggtggacacgaaccagtactgcaagttcgacagcgagccgctcacgctcttcacctcgtcgctctacctcgccgcgctcatcgcttccctcttcgcctccgtcatcacccgcaagttaggccgcaagatgaccatgctcggcggcggcttcatcttcctcatcggcgccgtcctcaacggagccgccgtcaacgtcgccatgctcatcattggccgcatcttgctcggcatcggcgtcggcttcagcatccaggctgtgccgctgtacctgtcggagatggcgccggcgaagatgaggggcatgctgaacatcatcttccagctcatgatcaccgtcggcatcctcttcgccaacctcatcaactacttcaccgacaagatcgccggcggctggggatggcgcgtcagcctcggcctcgccgccgtcccggccgtcatcatgaccgtcggctccatcctcctccccgacacccccaactcgctcctgtcccgcggcaaggagaacgaggcacgcaccatgctccgccgcatccgtggcaccgaggacatcggcccggagtacgacgacctcgtcgccgccagcgaggccaccaaggccatcgagaacccgtggcgcacgctcctcgagcgccggtacaggccgcagctggtgatgtcggtgctgatcccgacgctgcagcagctcaccggcatcaacgtcgtcatgttctacgcgcccgtgctgttcaagaccatcggattcggcggcacggcctcgctcatgtccgccgtcatcaccggcctcgtcaacatgttcgccaccttcgtctccatcgccaccgtcgaccgattcggccgccgcgtgctcttcatccagggcggcatccaaatgatcatagcgcagtttattcttgggacactgatcgccgtcaagttcgggacggcgggcgtggcgaacatctcgcagggttacgccatcgtggtggtgctgttcatctgcctgttcgtgtcggcgttcgcgtggtcgtgggggcccctggggtggctggttcccagcgagatcttcccgctggagatcaggtcggcggcgcagagcgtggtggtggtgttcaacatggcgttcaccttcttcatcgcgcagatcttcctgatgatgctgtgccgcctcaagttcgggctcttcttcttcttcggcgccatggagctgatcatgacggggttcgtcttggtcttcctgccggagaccaaggggatccccatcgaggagatggacaggatctggggggagcactggtactggagccgcttcgtcggcgccggccgcaaccgggtcatgcagatggcctccaccaacgtgtga

SEQ ID NO: 8123 - protein, 512 aa, Oryza sativa
MENAGAGDGAPKHYPGKMTVFVFIACLVASSGGLIFGYDIGISGGVTSMDPFLSRFFPSVYAKEKEVVDTNQYCKFDSEPLTLFTSSLYLAALIASLFASVITRKLGRKMTMLGGGFIFLIGAVLNGAAVNVAMLIIGRILLGIGVGFSIQAVPLYLSEMAPAKMRGMLNIIFQLMITVGILFANLINYFTDKIAGGWGWRVSLGLAAVPAVIMTVGSILLPDTPNSLLSRGKENEARTMLRRIRGTEDIGPEYDDLVAASEATKAIENPWRTLLERRYRPQLVMSVLIPTLQQLTGINVVMFYAPVLFKTIGFGGTASLMSAVITGLVNMFATFVSIATVDRFGRRVLFIQGGIQMIIAQFILGTLIAVKFGTAGVANISQGYAIVVVLFICLFVSAFAWSWGPLGWLVPSEIFPLEIRSAAQSVVVVFNMAFTFFIAQIFLMMLCRLKFGLFFFFGAMELIMTGFVLVFLPETKGIPIEEMDRIWGEHWYWSRFVGAGRNRVMQMASTNV

SEQ ID NO: 8124 - DNA, 1702 bp, Oryza sativa
  CDS (87)..(1628)
ggactggtgagtactgatcgtagtccagccttgttctcctctctctctctctctcctcactcctcgcacacttcggaattcccatcatggccggcggcgccatgaccgacaccgatggcgctcacaagaactacccggggaagatgaccatcttcgtcttcctcgcctgcctcgtcgcctcctccggcggcctcatcttcggctacgacatcggcatctccggcggcgtgacgtcgatggactcgttcctgatcaagttcttcccgtcggtgtacgccaaggagaaggagatggtggagacgaaccagtactgcaagttcgacagcgagctgctcaccctcttcacctcgtcgctctacctcgccgcgctcatcgcctcgctcttcgcttccgtcatcacccgcaagttcggccgcaggatcaccatgctcggcggcggcgtcatcttcctcgtcggcgccatcctcaacggagccgccgccgacgtcgccatgctcatcatcggccgcatcctcctcggcatcggcgtcggcttcagcaaccaggctgtgccactgtacctgtcggagatggcgccggcgaggatgcggggcatgctgaacatcagcttccagctcatgatcaccgtcggcatcctcgccgccaacctcatcaactacttcaccgacaagatcgccggagggtgggggtggcgcgtcagcctcggcctcgccgccgtcccggccgtcatcatggccggcggctccctcttcctccccgacacccccaactcgctcctctcccgcggcaaggagaacgaggcgcgcgccatgctccgccgcatccgtggcaccgacgacgtcggcccggagtacgacgacctcgtcgccgccagcgaggcgtccaaggccatcgagaacccgtggcgcacgctcctcgagcgccggtacaggccgcagctggtgatgtcggtgctgatcccgacgctgcagcagctcaccggcatcaacgtcgtcatgttctacgcgccggtcctcttcaagaccatcggattcggcggcacggcctcgctcatgtccgccgtcatcaccggcctcgtcaacatgttcgccaccttcgtctccatcgccaccgtcgaccgcctcggccgccgcaagctcctccttcagggcggcgtccaaatgatctttgcgcagttcattcttgggacgctgatcgccgtcaagttcgggacggcgggcgtggcgaacatctcgcggggttacgccatcgtggtggtgctgtgcatctgcgtgttcgtgtcggcgttcgcgtggtcgtggggacccctcgggtggctggttcccagcgagatcttcccgctggagatcaggtcggcggcgcagagcgtggtggtggtgttcaacatggccttcaccttcatcatcgcgcagatcttcctgatgatgctgtgccacctcaagttcggcctcttctacttcttcggcgccatggagctcatcatgacggggttcgtcttcttcttcctgccggagacgaaggggattcccatcgaggagatggacaggatctggggtaagcactggtactggagacggttcgtcggcgctggggccggcggcaaggtcgagattacctccacagtatgacattcgtgccgtaaacgtttatctttcaatttgttttcggattacgtaattgaatctgctggctacatcgatcc

SEQ ID NO: 8125 - protein, 513 aa, Oryza sativa
MAGGAMTDTDGAHKNYPGKMTIFVFLACLVASSGGLIFGYDIGISGGVTSMDSFLIKFFPSVYAKEKEMVETNQYCKFDSELLTLFTSSLYLAALIASLFASVITRKFGRRITMLGGGVIFLVGAILNGAAADVAMLIIGRILLGIGVGFSNQAVPLYLSEMAPARMRGMLNISFQLMITVGILAANLINYFTDKIAGGWGWRVSLGLAAVPAVIMAGGSLFLPDTPNSLLSRGKENEARAMLRRIRGTDDVGPEYDDLVAASEASKAIENPWRTLLERRYRPQLVMSVLIPTLQQLTGINVVMFYAPVLFKTIGFGGTASLMSAVITGLVNMFATFVSIATVDRLGRRKLLLQGGVQMIFAQFILGTLIAVKFGTAGVANISRGYAIVVVLCICVFVSAFAWSWGPLGWLVPSEIFPLEIRSAAQSVVVVFNMAFTFIIAQIFLMMLCHLKFGLFYFFGAMELIMTGFVFFFLPETKGIPIEEMDRIWGKHWYWRRFVGAGAGGKVEITSTV

SEQ ID NO: 8126 - DNA, 1569 bp, Uromyces fabae; identical to SEQ ID NO: 487
  CDS (1)..(1569)

SEQ ID NO: 8127 - protein, 522 aa, Uromyces fabae; identical to SEQ ID NO: 488

SEQ ID NO: 8128 - DNA, 1380 bp, Sulfolobus tokodaii
  CDS (1)..(1380)
atggtaaaaagattagataacgctgaagttataagactacatattttagcaactattataggtgcactagggggatttctatttggatatgatactggaataatagggagcgtgttggtatacgttacacctctttttcatttaacgccgccagaagttgcaatattaacttctggcacatcattattagcaggcatcggtgcacttgcggctggacctataactgataaatatggaagaaaatcactactagttacagatggcataatgtatgctgtcttcgctctgctatctgcgatagctataaactcatttctccttattttatggagaagtttagtaggtttcgctataggtgcagataccgcaatagctactgcttatatatccgaattttcacccaagagatggagagggagattagcgataactcaacaattaatgatattttcgggaattactgcttctttctgggcaggatatctactttctttctcagctaactggagactaatgttaggcttaggagtaattccagcggtaattttagtagctttaagagcgtttttacctgaaagtcccagatggttattacttaatggaatggaagaaaaagcaaagaacatactaagaaaatttggagttaatatcgcagaaaatgaacatattgcagctccatctaaagaattatcatttaaggaaatgttcaacaataaagcaattagaaccgctataatattggtaggtctatggttagcatttcaacaaataacaggtataaatgttatattatattatggtcctactatatataaatatctaggattaaccggaccgagagctattcttaatacagcaatctcagaatcattaggagcaatagaatatgcaatttcattttatcttatagataaatggggaagaagaaagctaggaatttttggatatgctggattagtaggatctttagctataatgttaataggcctaagagcctttacgtcaggtatcgtatttgctggtgtagctttagtttttactgcaatgacattatttctactgttcttccatgtaggtgtaggcggagtaggatgggttctacaaggagaaacaataccaacggaagtaagaggaagaggtgccggtttattagcagcaatagactggttcgcaaattttgtaataatatttatttttccatactggaaggcagcgtttggagtttattcattcttcgcattagaacttgtactatctatattagcaatagcaatagtatacttattcatgccagagaccaaaggagtatcattggaagacatgttaaaagtatttgaaagagggttaagtgtacaaaggcaaaaacagtatgctaaataa

SEQ ID NO: 8129 - protein, 459 aa, Sulfolobus tokodaii
MVKRLDNAEVIRLHILATIIGALGGFLFGYDTGIIGSVLVYVTPLFHLTPPEVAILTSGTSLLAGIGALAAGPITDKYGRKSLLVTDGIMYAVFALLSAIAINSFLLILWRSLVGFAIGADTAIATAYISEFSPKRWRGRLAITQQLMIFSGITASFWAGYLLSFSANWRLMLGLGVIPAVILVALRAFLPESPRWLLLNGMEEKAKNILRKFGVNIAENEHIAAPSKELSFKEMFNNKAIRTAIILVGLWLAFQQITGINVILYYGPTIYKYLGLTGPRAILNTAISESLGAIEYAISFYLIDKWGRRKLGIFGYAGLVGSLAIMLIGLRAFTSGIVFAGVALVFTAMTLFLLFFHVGVGGVGWVLQGETIPTEVRGRGAGLLAAIDWFANFVIIFIFPYWKAAFGVYSFFALELVLSILAIAIVYLFMPETKGVSLEDMLKVFERGLSVQRQKQYAK

SEQ ID NO: 8130 - DNA, 1503 bp, Thermoplasma volcanium
  CDS (1)..(1503)
atggatatatttcatatattttctgacaaaagattaaatacagtctatttatcgaagaatatggaatatcatgaagttatagaaaaacttgacttcagcaaagtcacaaggttctattggctactgaccttactcgcaactatcggtggttttctcttcggttacgatacttctaatatcggcacagcgttggtgtttattccataccctgtgcagggtttcatagaaggatacctagttgcaggtgcatctctgggggctgccgtaggagctttgattgcagctggtctcacggataggtacggcaggaaatatctattgatagcagatgcagctatttatgcggctggtgcaatactatcagcatttaccatagatctcgccatgcttctcctatcaagaacacttataggtttggcggtcggtgctgattctggtatagctacagcttatatatccgagtatgcccctaaagacaggagaggttcactcggaatactgcagcagtggatgataactataggaatacttggtgcttatattgtaggaatggccacactctatgctgcaccaggtctagcttcagttttagactggaggataatgcttggtgttgcggccatacctgctctcattggcctaggctttaggtttatgatgcccgaatctccaagatggttaatgatcaacggaaaatacaaggaagcctcagaggctttcaagaaactcggattaaatctaagtgttgatgagctaaaggaggttaagtttaggcagagagctaagatcacaaacggtgtgaagagagcatttctagttgtcgcccttttctttgtattccaacagattactggcataaatataccgttctattatgggccaatagtaattgaaaaattacacctgtttggctcggcaacgcaatctttagtatttacacaaatatatgctgtagcagctgcaacaatactcgcagtgattaacgtggcagcaacatacataggcttcaggtacatagatacggtcggaagaaggaagttagccctactaggatactccggtatgacgttcttcggtttactgggcgggcttttgctctaccttaaatttgatgttggtttactaattgcatttgccggcttcataatcttctttgcattcggtgtcggtggtacaggttggatgattcagggtgagtacttcccaaccaatatgagaggcctctatgcatctcttggagcttttgtagattggatcgctaactttgccataatagaaatattccctgtactcgaagcattaataacaataaaaaatgtaatgtttgttttcggcatcctttcattaatagcagtattgatcttttattatataatgccagaaaccaaagaattgtccgtggaacaaattagcgacttattcgagaataacggcctatcgtcgttgagaaaagcctctatgagctacaataagagctcatccggatccagcggcaagaaatag

SEQ ID NO: 8131 - protein, 500 aa, Thermoplasma volcanium
MDIFHIFSDKRLNTVYLSKNMEYHEVIEKLDFSKVTRFYWLLTLLATIGGFLFGYDTSNIGTALVFIPYPVQGFIEGYLVAGASLGAAVGALIAAGLTDRYGRKYLLIADAAIYAAGAILSAFTIDLAMLLLSRTLIGLAVGADSGIATAYISEYAPKDRRGSLGILQQWMITIGILGAYIVGMATLYAAPGLASVLDWRIMLGVAAIPALIGLGFRFMMPESPRWLMINGKYKEASEAFKKLGLNLSVDELKEVKFRQRAKITNGVKRAFLVVALFFVFQQITGINIPFYYGPIVIEKLHLFGSATQSLVFTQIYAVAAATILAVINVAATYIGFRYIDTVGRRKLALLGYSGMTFFGLLGGLLLYLKFDVGLLIAFAGFIIFFAFGVGGTGWMIQGEYFPTNMRGLYASLGAFVDWIANFAIIEIFPVLEALITIKNVMFVFGILSLIAVLIFYYIMPETKELSVEQISDLFENNGLSSLRKASMSYNKSSSGSSGKK

SEQ ID NO: 8132 - DNA, 1440 bp, Zymomonas mobilis; identical to SEQ ID NO: 493
  CDS (1)..(1440)

SEQ ID NO: 8133 - protein, 479 aa, Zymomonas mobilis; identical to SEQ ID NO: 494

SEQ ID NO: 8134 - DNA, 1865 bp, Arabidopsis thaliana
  CDS (66)..(1742)
gaagatgagagataagcgaccaaaattagcgggagaatcctcacttgtctcactccgatccgatcatggctttcgctgtctcggttcagtcacatttcgcaatcagagcgttaaaacgagaccacttcaagaacccttctcctcgtactttctgctcgtgttttaaatcgaggcctgactcgtcttaccttagtttaaaggaacgtacttgcttcgtttccaaaccgggtttagtcactactagatacagacatatattccaggtcggagctgagacgggaggagagttcgccgacagtggagaagtagctgattcgcttgcttctgatgcaccagagtcattttcttggtcttctgtgatactcccgtttatcttcccggctttgggaggattattgtttgggtatgacattggggctacctccggtgctacgctctcacttcagtcacctgcgcttagcggaactacatggtttaacttctcacctgttcagctaggacttgtggttagcggatccttgtatggagcccttcttggctcaatttctgtctatggcgttgctgatttccttggaagaaggcgggaacttattatagctgctgttctctatctcctcgggtctctgatcactggctgtgcccctgatcttaatattctcttagttggaaggcttctctatggctttggtattggtttggcaatgcatggggctcccctctatattgctgagacatgcccatctcaaatccgtggaactttgatatctctgaaagaactcttcatcgtattgggaattttgttgggtttttctgttggaagcttccagattgatgtagttggagggtggcgttacatgtatggatttggtacgcctgttgctttgctgatgggactaggcatgtggagtctccctgcatctcctcgctggttgctgcttagagctgtccaaggtaaaggacaattacaagaatacaaagagaaggccatgcttgccctcagcaaattacgtggcagacctccaggtgataaaatctcagagaagttggtagatgatgcctatttatctgtgaaaacggcctatgaagatgagaaatctgggggaaacttcctggaagtattccaagggcctaatttgaaagctttgacaattggtggaggtttagtcctcttccaacagataactggacagcctagtgttctttattatgcgggttcgattcttcagactgctggattctctgctgctgctgatgcaactcgagtctctgttattattggtgttttcaagttactgatgacatgggtagctgttgcgaaagttgatgatctcggcagacgacctttactgattggaggtgtcagcggcattgcgttgtccttgtttctactgtcagcatactacaagtttctcggaggctttccccttgtcgctgttggtgcactgcttctctatgttggttgttaccagatctcatttggacccatcagctggctaatggtgtcagagattttcccgctccgcacaagagggagagggatcagtcttgcagttcttacaaactttggctccaatgctattgtgacatttgcattttcacctttaaaggaatttcttggagccgagaatcttttccttctctttgggggcatagcactggtatcactgctgtttgtaatactagtagttccagagaccaagggtctcagcttggaagaaattgaatcaaaaatcttgaagtgaaacgttgaagaacatatttgttatagttgattctggtgaaatacatgtatgaggatgtgactattctctttgtaacataatatgtttcgtaatcaatgggaaaaccaaacctttttcatgatt

SEQ ID NO: 8135 - protein, 558 aa, Arabidopsis thaliana
MAFAVSVQSHFAIRALKRDHFKNPSPRTFCSCFKSRPDSSYLSLKERTCFVSKPGLVTTRYRHIFQVGAETGGEFADSGEVADSLASDAPESFSWSSVILPFIFPALGGLLFGYDIGATSGATLSLQSPALSGTTWFNFSPVQLGLVVSGSLYGALLGSISVYGVADFLGRRRELIIAAVLYLLGSLITGCAPDLNILLVGRLLYGFGIGLAMHGAPLYIAETCPSQIRGTLISLKELFIVLGILLGFSVGSFQIDVVGGWRYMYGFGTPVALLMGLGMWSLPASPRWLLLRAVQGKGQLQEYKEKAMLALSKLRGRPPGDKISEKLVDDAYLSVKTAYEDEKSGGNFLEVFQGPNLKALTIGGGLVLFQQITGQPSVLYYAGSILQTAGFSAAADATRVSVIIGVFKLLMTWVAVAKVDDLGRRPLLIGGVSGIALSLFLLSAYYKFLGGFPLVAVGALLLYVGCYQISFGPISWLMVSEIFPLRTRGRGISLAVLTNFGSNAIVTFAFSPLKEFLGAENLFLLFGGIALVSLLFVILVVPETKGLSLEEIESKILK

SEQ ID NO: 8136 - DNA, 1545 bp, Arabidopsis thaliana
  CDS (1)..(1545)
atggcaggaggggcatttatagacgagagtggccatggaggagactacgaaggtcgtgtaaccgcgtttgtcatgataacctgcattgtagctgcaatgggtggtctcctctttggttacgacattggtatctcaggaggagtgatatcaatggaggactttctaacgaaattcttccctgacgtgcttcgtcaaatgcaaaacaaaagagggcgtgaaacagaatattgtaaatatgacaatgagcttcttactctcttcacttcctctctttacctcgctgctttgttcgcttctttccttgcctccaccattacaaggctttttggccggaaggtctcaatggttatcgggtctctcgcttttctctctggagctcttctcaacggtttagctatcaacctcgagatgttgatcatcgggcggttatttctcggtgtaggtgtcggattcgctaaccaatctgttcctctttacctctctgagatggctcctgctaagatcagaggagctctcaacattggttttcaattagcaatcacgatcgggatcttagccgcgaacattgtcaattacgtgaccccaaagctccagaacgggatcggatggagattatctctcggtttagctggagttccggccgttatgatgcttgtcggatgctttttcttgccagatacgccaaactcaatccttgaacgtggaaacaaagaaaaggctaaggagatgctgcagaagatcagaggaaccatggaggttgagcatgagtttaatgaactttgcaacgcgtgtgaagccgcgaagaaagttaagcatccatggacgaacataatgcaagctcgttatcgaccgcagctcacgttttgtaccttcatcccattcttccagcagctaaccgggatcaatgtcattatgttctatgcacctgttctgtttaagaccatcggttttggaaatgacgcctctctcatatccgcagttatcaccggtcttgtcaatgtcctttccaccattgtctccatctactccgttgacaaattcggacgaagagctttgtttcttcaaggtggttttcagatgatcgtgacccagatcgcggtcgggtcgatgatcggatggaaatttggattcaacggggaaggaaatttgtcaggggttgatgcggatataatcttggcactgatatgtctctatgtggcgggtttcgcgtggtcatggggaccgttgggatggttagtgccgagtgagatatgtccattggaaattagatcagcaggacaatcgttaaacgtttcggtgaacatgttctttacattcttcattggacaattcttcttgacgatgctttgccatatgaagtttggtttgttctatttcttcgcgggtatggtcttgatcatgaccattttcatttacttcttgttgccggagacaaaaggtgttccgattgaggagatggggaaagtgtggaaagagcatagatattgggggaaatatagtaataatgatgatggtgatgatgttgatgatgatgcttatttttag

SEQ ID NO: 8137 - protein, 514 aa, Arabidopsis thaliana
MAGGAFIDESGHGGDYEGRVTAFVMITCIVAAMGGLLFGYDIGISGGVISMEDFLTKFFPDVLRQMQNKRGRETEYCKYDNELLTLFTSSLYLAALFASFLASTITRLFGRKVSMVIGSLAFLSGALLNGLAINLEMLIIGRLFLGVGVGFANQSVPLYLSEMAPAKIRGALNIGFQLAITIGILAANIVNYVTPKLQNGIGWRLSLGLAGVPAVMMLVGCFFLPDTPNSILERGNKEKAKEMLQKIRGTMEVEHEFNELCNACEAAKKVKHPWTNIMQARYRPQLTFCTFIPFFQQLTGINVIMFYAPVLFKTIGFGNDASLISAVITGLVNVLSTIVSIYSVDKFGRRALFLQGGFQMIVTQIAVGSMIGWKFGFNGEGNLSGVDADIILALICLYVAGFAWSWGPLGWLVPSEICPLEIRSAGQSLNVSVNMFFTFFIGQFFLTMLCHMKFGLFYFFAGMVLIMTIFIYFLLPETKGVPIEEMGKVWKEHRYWGKYSNNDDGDDVDDDAYF

SEQ ID NO: 8138 - DNA, 1766 bp, Apium graveolens var; identical to SEQ ID NO: 495
  CDS (17)..(1558)

SEQ ID NO: 8139 - protein, 513 aa, Apium graveolens var; identical to SEQ ID NO: 496

SEQ ID NO: 8140 - DNA, 2041 bp, Mesembryanthemum crystallinum; identical to SEQ ID NO: 497
  CDS (118)..(1785)

SEQ ID NO: 8141 - protein, 555 aa, Mesembryanthemum crystallinum; identical to SEQ ID NO: 498

SEQ ID NO: 8142 - DNA, 1961 bp, Saccharomyces pastorianus
  CDS (192)..(1904)
ttccggtggtactgactgagatgacaaaaatacattttgttgaaatgtttcgaaaatttgtgatataaaagccagtagaaattgtcttgtttgtcaacttcttgcaattgcagattatgtattagtttgtttaatggaaagatcatcagtgaacaacgtatataaacaaaagaatataaaaagaaataataatgtcacatgttaacgcgtcgtatgcgcattcgcaaggatcctcgacaagcgtttctcgtgtagagatggagaagccagcaacaaaggaagtctttgaagatcctaccccaaaaaagtttgaattggacgatgatgaggccggtaagacatcatctgtattcaatccagacctaaatctagaagaagaagtgagagccttggatgaattaggtgattcattcaaaagagatcgctccttttggggcaaaatgaaagctttggaattcgaagttgaatttgaaaataaaaaaaatatggttttaatgctgggaacttttgcagcatttgctggtattctatctggtatagatcaatctattatctctggtgcttccattggtatgaacaaaatgttgcacctttctacacatgaagcatcactagtttcttctttaatgcctctaggtgctgtcgctggttctatattgctaactccctttagtgaatattttggtcgtaaaaagtctttggctatttcttgtgtcttttacacaattggtgctattgtttgtgcagctgcttctaaccatcacgaaatgtatgctggtagatttttgatcggtgtcggtgttggtttagaaggtggtggtattggtgtatacattgcagaatctgttccgtcttcagttagaggtagtctggtgtccctgtatcaatttaatattgcgctgggcgaattgtttggttatattgttggtgtgattttctttgatgttaagggaggctggagatacatggtcggttcgtcgcttgtgttctcgaccacattgtttattggtttattattcctgcctgaatctccacgttggttgatgcataagggccgtgtcggtgaatcctggaacgtctggaaaagactaagagatgtgaaagaagaaggcaataaaatcgaatttttggaactcagagacgttgcttcgcacgacagagagttacatgcaaacgaatcaagatttcaatcattgtttgatttggtccgtgttccacgtaaccgccgtgctttggtatattcttgtatgatgattggtctgggtcaattaactggtattaatgccatcatgtattacatgtccacgctaatgaagaatattgggttcgatgataaacaatctgtagcaatgtcaatggttggtggtgcagcactattaattggtaccgttcctgctattttatggatggatagatttggtagacgtacatgggcaatgacaatcattatatttatcgttggtttggtgctcgtcggtgtcggctatcaaataaacttgaaaacacacatggcagcagcagaaggtgtgtatttgactggtcaaatcatatataacatggcttttggatcatatgcagcattaacatgggtcctaccttcagagtcattttcattgggaaccagatcagctggtatgacagtgtcttctgctttgctttacttgtttgcctttaccgtgacttacaacttcgaaaaaatgaaagaagcaatgacatatacaggtttaaccttagggttttacggtggtatcgctcttgcaattggtatcccataccaattgctatgtatgccagaaacaaagaatagaactttagaggaaattgatgacatctttgagaagccaacaagtcaaattataaaggagaatattgcatacttgaagaagggccaattgagctattagagagtcaagtttattccacctttttttattgtctaagtaaatgcatatttgcttaga

SEQ ID NO: 8143 - protein, 570 aa, Saccharomyces pastorianus
MSHVNASYAHSQGSSTSVSRVEMEKPATKEVFEDPTPKKFELDDDEAGKTSSVFNPDLNLEEEVRALDELGDSFKRDRSFWGKMKALEFEVEFENKKNMVLMLGTFAAFAGILSGIDQSIISGASIGMNKMLHLSTHEASLVSSLMPLGAVAGSILLTPFSEYFGRKKSLAISCVFYTIGAIVCAAASNHHEMYAGRFLIGVGVGLEGGGIGVYIAESVPSSVRGSLVSLYQFNIALGELFGYIVGVIFFDVKGGWRYMVGSSLVFSTTLFIGLLFLPESPRWLMHKGRVGESWNVWKRLRDVKEEGNKIEFLELRDVASHDRELHANESRFQSLFDLVRVPRNRRALVYSCMMIGLGQLTGINAIMYYMSTLMKNIGFDDKQSVAMSMVGGAALLIGTVPAILWMDRFGRRTWAMTIIIFIVGLVLVGVGYQINLKTHMAAAEGVYLTGQIIYNMAFGSYAALTWVLPSESFSLGTRSAGMTVSSALLYLFAFTVTYNFEKMKEAMTYTGLTLGFYGGIALAIGIPYQLLCMPETKNRTLEEIDDIFEKPTSQIIKENIAYLKKGQLSY

SEQ ID NO: 8144 - DNA, 1458 bp, Thermoplasma acidophilum
  CDS (1)..(1458)
atggaaaatggagtcagatattccgatctcatcgaaaggctagacatgagcagggtaaccaggttttactggttgctgaccattctggccacgataggtggttttctattcggatacgatacctctaacataggctctgcactgccattgcttgaaagaatatacccaggtataagtggttttgttgagggctacttggttgctggggcctcgcttggtgccgctgtaggcgcgataatagctgcgggactaacggacaggtacgggagaaagtacctgctcatagccgatgcggctatttacgcagccggtgcattgctctcagcattcaccgtggatctggtcatgctgctgctttccaggacgctaatagggattgctgtcggcgcagactccggcatagcgacagcttatatagcggaatatgctccaaaggccaggagaggaagcctcggcattctgcagcagtggatgatcaccatcggcattctggcagcttacctaatcggaatggcaaccctgttcttcgcacccggcttggcttatgcagttggttggaggataatgctgggcgttgccgccataccagctatcataggtctcgccttcaggttcatgatgccagaatcgcctaggtggctcctcgttaatggaaaatacaaggaagcatccgcttccctgaagaggctcggcctcaacatgagcgaggaagatctgaaatctgtaaagctatcacagccccacaagatcactcctggcgtaaagcgtgctctcctcatcgtgggcctgttctttgttttccagcagatcaccggaattaacataccgttttactacggcccggttgtgctggagaaccttcacatagttggaaaatcgacatcgctcgtttacagtatatactattcaatcgccgcatccgcaatactggcgatcataaacgtggctgcaacgtatataggcttccgctacatagactccgtcggaaggagaaaactggcgctgatgggatacgctggcatgacattcttcggaatacttggtggaatactgctgtacctcaagttagacataggcctgttcatagccttcgctggcttcataatattctttgccttcggtgttggcggcaccggctggatgatacagggagaatacttcccgaccagcatgagggggctgtatgcttcccttggtgcgttcatagactggatagccaacttcgcaataatagagcttttccctgtcatggactccgccataacgataaagaatgtggagtttgttttcggcgtcctctcgctgatagcgctgatactcttctactatataatgccggagacgaaagggctgtccgtcgagcagatagacacgctttttgaaaacaacagcctcgggcagatgaagcatgcctctatatccatgaagaaggagagcgttccagcagacccgaaatga

SEQ ID NO: 8145 - protein, 485 aa, Thermoplasma acidophilum
MENGVRYSDLIERLDMSRVTRFYWLLTILATIGGFLFGYDTSNIGSALPLLERIYPGISGFVEGYLVAGASLGAAVGAIIAAGLTDRYGRKYLLIADAAIYAAGALLSAFTVDLVMLLLSRTLIGIAVGADSGIATAYIAEYAPKARRGSLGILQQWMITIGILAAYLIGMATLFFAPGLAYAVGWRIMLGVAAIPAIIGLAFRFMMPESPRWLLVNGKYKEASASLKRLGLNMSEEDLKSVKLSQPHKITPGVKRALLIVGLFFVFQQITGINIPFYYGPVVLENLHIVGKSTSLVYSIYYSIAASAILAIINVAATYIGFRYIDSVGRRKLALMGYAGMTFFGILGGILLYLKLDIGLFIAFAGFIIFFAFGVGGTGWMIQGEYFPTSMRGLYASLGAFIDWIANFAIIELFPVMDSAITIKNVEFVFGVLSLIALILFYYIMPETKGLSVEQIDTLFENNSLGQMKHASISMKKESVPADPK

SEQ ID NO: 8146 - DNA, 1413 bp, Lactobacillus casei
  CDS (1)..(1413)
atgtatcaatcaaaaacacacaatcatcgatttaccggtcaccttgcgagtgcgaagacacggttgcggctagtagcattgatttcaacgatgggtggcctgctttttggctatgacactggggtgatcaatggcgcattgccttttatttcttcggaactgaaacttgcccctggatcacagggttgggtcaccagtagcttgacgctgggtgctgcttttggtgctatcttagtcggtcgtttaagtgatcgctatgggcgcaggcggctcatcaccatgttagcgggcttattttttctggcaacggtagcctcgtcactttccccgagtgctggctggctgattggcgcacggctgatccttggattagccgttggcggcgtctctgtgctggttccaagctttttagcagagattgccccaacgagtcatcgtgggcggttagtcacacaaaatgagctgatggtcgtgactggccagttacttgcttttgttctcaatgcctttttaggaaccacttttggtaacgttcctggtatctggcgctggatgattgtattggcagtcattccggcaattatcttaggtatcgggacttattttgttccggaatctcctcgttggttaatgatgaaaggacggccggcagcagcacgttcaagtttggaagtgttgcgatctgctgctgaagtgccagcagagattgaccatttgaaacagaatcttgccgaagatgctaaacataagcaggcgagtgttcgagcattgaaaaccaaatggattcgccgactggttctgattggcatcggcctaggcgtcattcagcaaattgctggtatcaatgtcatgatgtattatggcacctcaattttacaaatgacgggttttgggcgagatagcgccttgatcgccaacattgccaatggggttactgccgttgctgcaacgattgtgacgttgcaattgttgaagcatgttccgcggcggccaatgctgattgtgggattgattggctcaaccgtggcgattactggtgtcaccttcgctagtcgactaccagcgggttcgccattccgggcatttgcgacaatcgggatgatgatgctgttcttggcgttcttccaaggcgctatcagtccaatgacttggctgctgatgtctgaaatcttccctgaacaggttcggggcatagggatgggcgctgcaaccttctgcttgtggttagctaactttggtgttggcgttctgttcccgattggtctggcccaaataggcatgttctggacattcgtttgcttcatcgggacaaatttgatttcattgcttttcgttctgatttttgtgccggaaacggctggacgctccctcgaaactttgcaccgagaggagaaagcccgcttaaatcattaa

SEQ ID NO: 8147 - protein, 470 aa, Lactobacillus casei
MYQSKTHNHRFTGHLASAKTRLRLVALISTMGGLLFGYDTGVINGALPFISSELKLAPGSQGWVTSSLTLGAAFGAILVGRLSDRYGRRRLITMLAGLFFLATVASSLSPSAGWLIGARLILGLAVGGVSVLVPSFLAEIAPTSHRGRLVTQNELMVVTGQLLAFVLNAFLGTTFGNVPGIWRWMIVLAVIPAIILGIGTYFVPESPRWLMMKGRPAAARSSLEVLRSAAEVPAEIDHLKQNLAEDAKHKQASVRALKTKWIRRLVLIGIGLGVIQQIAGINVMMYYGTSILQMTGFGRDSALIANIANGVTAVAATIVTLQLLKHVPRRPMLIVGLIGSTVAITGVTFASRLPAGSPFRAFATIGMMMLFLAFFQGAISPMTWLLMSEIFPEQVRGIGMGAATFCLWLANFGVGVLFPIGLAQIGMFWTFVCFIGTNLISLLFVLIFVPETAGRSLETLHREEKARLNH

SEQ ID NO: 8148 - DNA, 1699 bp, Lycopersicon esculentum
  CDS (24)..(1466)
aaggcctaagaagaaaaaaaattatgaaggaagatatagagcacagtgagaacagagtaaatgaagaaataacaactcctcttataattcaaacaaataaaagagtaaaagaagaaaatggatgttatgagaagaaacaagataggtgcatggtttaccttagcacattagtggctgttaggggttcatattcattgggatcttgtgctggatattcatcaccaacacaatccgccatcagagaggatcttaacttatctatagcacagatctcgctctttggttcaatatggacatttggtgcaatgattggagcaatcacaagtggtccaatcgctgattatattggtcgcaaaggggcaatgagaatgtcaagtggtttctgtgttgctggatggttagctattttcttcgctcagggagcacttgctctggacattggaagattggcaacaggatatggaatgggagttttctcttatgtggtgccggtatttatagctgaaattgcacctaaagatttacgaggagctttgacaaccataaaccagctgatgatatgttgtggagtctcagtttccttcattataggaactatgatgacatggaggacgttggcgttaacaggattaattccatgtgctattctgcttttcggtctatttatcattccagagtcacctaggtggttggcaaaaataggacatcaaaaggagtttgaacttgcactacgtaaacttcgaggcaaagatgctgatatatctgaggaggcagctgaaatcaaggattatatagaaacacttgaaaagcttccgaaagtgaacttgtttgatttgttccaaagaagatactcgagctcacttatagtgggagttggacttatggtgtttcaacagtttggtggaatcaatggaatctgtttctacaccggtagcatatttgagtcctcaggtttctcctctgatattggaactataatctatgcaattatacaggttcccatcaccgcgttgggtgcagccttaatcgacagaactggaagaaaacctcttttattggtttcaggaacaggacttgtcataggctgtatactaacaggaatctcattctatatgaagggacatgaaatggcaataaaggcagcaccgatacttgctgtaacaggcatactggtctatatcggttccttttcagtaggaatgggagcagttccgtgggttgtgatgtcagagatatatcctataaatattaaaggtgctgctgggagccttgcaacactagtgaattggttcggagcatgggcgtgctcctacactttcaacttcctcatgacctggaattcttttggtacgttcgttctgtatgctgcagtgaatgcactgtccatattatttgtgataaaaatagtacctgaaaccaaaggaagaactttggaacaaatccaggctgctatcaatgcatcatgaaataccttagccttcatcgattcatctttcgtactgaaatttactttatcagagagagttgacacaattcatgttgtcgtttgaaactacattcgatctgattctcatcctcaaatttaagacatttgagtgtttgttgtatcatggatcacatattttcatttgtactcattgattcatctcacttaaaaaaggagaattttaaagtttaaaaaaaaaaaaaaaaaaaaaaa

SEQ ID NO: 8149 - protein, 480 aa, Lycopersicon esculentum
MKEDIEHSENRVNEEITTPLIIQTNKRVKEENGCYEKKQDRCMVYLSTLVAVRGSYSLGSCAGYSSPTQSAIREDLNLSIAQISLFGSIWTFGAMIGAITSGPIADYIGRKGAMRMSSGFCVAGWLAIFFAQGALALDIGRLATGYGMGVFSYVVPVFIAEIAPKDLRGALTTINQLMICCGVSVSFIIGTMMTWRTLALTGLIPCAILLFGLFIIPESPRWLAKIGHQKEFELALRKLRGKDADISEEAAEIKDYIETLEKLPKVNLFDLFQRRYSSSLIVGVGLMVFQQFGGINGICFYTGSIFESSGFSSDIGTIIYAIIQVPITALGAALIDRTGRKPLLLVSGTGLVIGCILTGISFYMKGHEMAIKAAPILAVTGILVYIGSFSVGMGAVPWVVMSEIYPINIKGAAGSLATLVNWFGAWACSYTFNFLMTWNSFGTFVLYAAVNALSILFVIKIVPETKGRTLEQIQAAINAS

SEQ ID NO: 8150 - DNA, 2013 bp, Mesembryanthemum crystallinum
  CDS (131)..(1876)
acctcccttcagtagttcccttagtttttctttctactccaagtctcgaaccgcccacagaataagaagacacgggtatcaacaggcgttgagggaagaagttgaatgattaatcatcaacagtgcaaagatggtagaaggtggaattgtgaaggcagataagacagagttcacagaatgtttcagaacaatcgggaaaacaccctatatcttgaggcttgccttctctgctggcattggtggtcttctttttggatatgacactggtgttatctctggcgctcttctttacattaaagaagacttcaaagaggtggaaaggaaaacatggctgcaggaaaccattgtagccatggcagttgcaggggcaattataggagcaggagtcggagggtacctaaacgataagtttgggagaaaacctgcaattataattgctgacattttgttcttcattggtgcaataattatgtcactggcccctgcaccatggatgatcatactcggaagaatcttcgttggtttaggggttggaatggcttccatgacatcacctttgtacatatcagagacttcccctactagaatccgaagtgctcttgttagtacaaatggtttgctgatcacgggaagccagttcttatcctaccttatcaacctcggtttcactagggttaaggggacgtggagatggatgcttggggtagctgcggttccagcattcgtgcagcttctcttgatgctgtccctcccagagtctcctagatggctgtatagaaagaataaagtcgtggaagctgaagcgatcttggctagaatttatcccccagaagaagtggaagaggagatgagagcacttaaggcatcaattgagtacgaaatggcagaggaaggagaaattggtggtgggagtatgttaagcaaagtaaggaaagcttggggtaacaaaatagttcgaagggggctatatgctggcattacagttcaagttgctcaacagtttgtgggtatcaacactgtcatgtattacagccccacaattgtgcaattagcaggatttgcctctaacagcactgccttggctctttctttggtcacctctggcttaaatgcaattgggtccattgttagcatgatgtttgtcgataggcatgggagaagacgacttatgatcatctctatgtttggtattattacgtgcctcattgtcttggctattggattcttccaagctgctgctcatgctccgaagatcagccatgctgaatcgacccattttggactgaactctacatgccctgcttacaccaccactcgaaaccctgcaacttggaactgtatgacatgtttgcaagctgcctcagagtgtgcattttgtaccaataaaggaaaccagctgcttcctggcggatgtgtgtcgcgaacagatgccatgaaggtggcatgccacggagagaaaagagtgtacttcacagaaggttgtcctagcaaattcgggtttttggccgtgatacttctaggggcatacattatatcctactctcctgggatgggcacagtgccatggattgtcaattcagagatttacccattaaggtacagaggagtcggaggagggattgcagccgtgtctaattggacatcaaacctaatagtgagcgaaacatttttgaccttgacggaggctctaggagctgcaggcacgttccttctgtttgccgggttctcagctatcgggctcgtgttcatctacttattggtgcctgagaccaaagggcttcccattgaagaggtggagcatatgctggaaaacggcttcaagcctagcattttcaggggtaacaaggataaggagaccaaagctagtggaacttgagtggttgtgtgatcatcttgaagaccaaagctcttatcacttctgtaagttctattttactttatttggattgaatttggtcattttggggatgattgaacttagccacttgaaagtgaaaaagtgtgaataagaga

SEQ ID NO: 8151 - protein, 581 aa, Mesembryanthemum crystallinum
MVEGGIVKADKTEFTECFRTIGKTPYILRLAFSAGIGGLLFGYDTGVISGALLYIKEDFKEVERKTWLQETIVAMAVAGAIIGAGVGGYLNDKFGRKPAIIIADILFFIGAIIMSLAPAPWMIILGRIFVGLGVGMASMTSPLYISETSPTRIRSALVSTNGLLITGSQFLSYLINLGFTRVKGTWRWMLGVAAVPAFVQLLLMLSLPESPRWLYRKNKVVEAEAILARIYPPEEVEEEMRALKASIEYEMAEEGEIGGGSMLSKVRKAWGNKIVRRGLYAGITVQVAQQFVGINTVMYYSPTIVQLAGFASNSTALALSLVTSGLNAIGSIVSMMFVDRHGRRRLMIISMFGIITCLIVLAIGFFQAAAHAPKISHAESTHFGLNSTCPAYTTTRNPATWNCMTCLQAASECAFCTNKGNQLLPGGCVSRTDAMKVACHGEKRVYFTEGCPSKFGFLAVILLGAYIISYSPGMGTVPWIVNSEIYPLRYRGVGGGIAAVSNWTSNLIVSETFLTLTEALGAAGTFLLFAGFSAIGLVFIYLLVPETKGLPIEEVEHMLENGFKPSIFRGNKDKETKASGT

SEQ ID NO: 8152 - DNA, 2422 bp, Mesembryanthemum crystallinum
  CDS (386)..(2131)
accttacccttagttccttttttttttttctttcatctttctctctctttttttctctctctaacaacccctttttgccagatcccactctgcaccagagagagatcacccacataaccaaaacacacacaagtttaagtgagagaagacgaagaagaagaacaacaacacagaagaagaaaaatacaaaaacagaacaaaataaatataaaaaagggtttttgttcttaatttcgtttactggcggcacgtattctgggcgcaaacttgttcaatcaacgtccaccatattgcttctcctttctttggagagattcggattaatagctttgaacgttgttaatttgatcctttggagaaaaagaaaaaaaaaaacacattgaagatggtggaaggtggtgtagtcaaggtagacaaaactgaatttacagaatgtttcagaactgtagggaagacaccttatatcatgagattggctttttctgcgggaatcggaggacttttatttggctatgacactggtgttatttcgggtgcccttctttacatcaaagaagacttcaaggaagtggcacagaaaacatggctacaggaaaccattgtagctatggcagtggctggagctattgtaggagcagggttgggcgggttcttaaatgacaagtttgggaggaaaccggccatgattgtggcggatattctgtttctaaccggagccataatcatgtcagttgctcctgctccttgggtgattatcatagggcgaattgtcgttggtttaggagttggcatggcgtctatgacagcgcccctgtatatatcggagacttccccagcgaagatccgaggtgcccttggtgcgaccaacggcttgctcattactggtggacagtttgtttcctacctcgtcaatcttggctttactcgggtcaagggaacgtggagatggatgcttggagtagcagctgttccagccgcgattcaagttgttttgatgctcactcttcctgagtctcctagatggctatacagacagaacaagatatcggaggcagaggagatcctaggccggatttatcctccagagcaagtcaaggaagagatggattcattgaagacatccattgaaaatgaaatggccgataggaaagcagttggcgagggcaatgcttttgtgagggcaaagagagcctgggacaataaggtggttcgaaggggtttgattgcaggtatctcagttctagtggcccagcaattcgtaggtatcaacactgtcatgtactatagccccacaatcatccaactggcaggttttgcttctaacagcactgcccttgccctttcattggtcacctctggccttaatgcggtgggatcgattgtgagcatgatgtttgtggacaggtttgggaggcgaaggctcatgatcatctctatgtttgctatcattacttgtcttgttgtcttgtccggcctcttttatggggctgcccaagctgctcccaaaatcagccagcttgaatcttctcactttggggccaactctacttgccctgcttttgcctctgcaacatctcctgatagatggaattgtatgacttgcttgaaggcttccgactgtgctttctgttccaatagtgctagtgagttccatcccggagcatgtgtggcacaaactagcacaatgaaaaatgcatgtttgggagagaagaggatctattttacagaaggatgccctagcaaatttggttttatggccattattgtacttgggctatacatcatcacctactctcctggtatggggacggttccatggatcctcaactctgaaatctatccattaagatacagaggcatatgtggaggaattggagccgtgaccctatggtgtgctaaccttatagtgagcgaaacttttctgaccttgaccgaagctttaggttcctcgggcactttccttctctatgcaggattttcgcttattgggctcatcgtcatattcttgctagtccccgagactaaaggattgccaattgaggacatcgagaaaatgttagagaagggtttttggccgagtttgtgcggtggcaacaaggacaaggacaacaaggaagaacaacaagcataataatacatactatgcctgccttatttttttcttctcgaattttggagtgaagagagggtgaggtttctaataattagctatgtttctagttagttacacacctctgaacaaattattttggtgttgttggatgttttaattttgattgctagtttttgctgctctatgtaatgggtttatattaatcttagattataatatgatgcaatagtaatttcaagaaagattgttgaaaacagctgatgccccataaaacttgtgaatgctaagagcgaacaactcttttgcttt

SEQ ID NO: 8153 - protein, 581 aa, Mesembryanthemum crystallinum
MVEGGVVKVDKTEFTECFRTVGKTPYIMRLAFSAGIGGLLFGYDTGVISGALLYIKEDFKEVAQKTWLQETIVAMAVAGAIVGAGLGGFLNDKFGRKPAMIVADILFLTGAIIMSVAPAPWVIIIGRIVVGLGVGMASMTAPLYISETSPAKIRGALGATNGLLITGGQFVSYLVNLGFTRVKGTWRWMLGVAAVPAAIQVVLMLTLPESPRWLYRQNKISEAEEILGRIYPPEQVKEEMDSLKTSIENEMADRKAVGEGNAFVRAKRAWDNKVVRRGLIAGISVLVAQQFVGINTVMYYSPTIIQLAGFASNSTALALSLVTSGLNAVGSIVSMMFVDRFGRRRLMIISMFAIITCLVVLSGLFYGAAQAAPKISQLESSHFGANSTCPAFASATSPDRWNCMTCLKASDCAFCSNSASEFHPGACVAQTSTMKNACLGEKRIYFTEGCPSKFGFMAIIVLGLYIITYSPGMGTVPWILNSEIYPLRYRGICGGIGAVTLWCANLIVSETFLTLTEALGSSGTFLLYAGFSLIGLIVIFLLVPETKGLPIEDIEKMLEKGFWPSLCGGNKDKDNKEEQQA

SEQ ID NO: 8154 - DNA, 1864 bp, Spinacia oleracea; identical to SEQ ID NO: 501
  CDS (61)..(1716)

SEQ ID NO: 8155 - protein, 551 aa, Spinacia oleracea; identical to SEQ ID NO: 502

SEQ ID NO: 8156 - DNA, 1822 bp, Arabidopsis thaliana; identical to SEQ ID NO: 503
  CDS (65)..(1684)

SEQ ID NO: 8157 - protein, 539 aa, Arabidopsis thaliana; identical to SEQ ID NO: 504

SEQ ID NO: 8158 - DNA, 1545 bp, Arabidopsis thaliana
  CDS (1)..(1545)
atggcaggaggagcttttgtatcagaaggaggaggtggtggaagaagttatgaaggaggagtcaccgcattcgttatcatgacatgtatcgtcgccgccatgggaggtctgctctttggttatgaccttggaatctcaggaggtgttacatcaatggaagagtttcttaccaagttcttccctcaagtagagagccagatgaaaaaggcgaagcacgacacggcttactgtaaatttgataaccaaatgctccaattgttcacttcttctctctacctcgcagctcttgtagcttcctttatggcttcagttatcactaggaagcatggacgtaaagtctctatgtttattggtggacttgctttcctcatcggtgcactttttaacgcatttgccgttaatgtttcaatgctcatcatcggtagactgttgcttggtgttggtgttggatttgctaatcagtctactccggtgtacctatctgaaatggctccagcgaagataagaggagctttaaacatcggttttcagatggctataaccattggaatcctagtggcgaatctgattaactatggaacatcaaagatggctcaacatggatggagggtttctttaggtttagcagctgttccagctgttgttatggtgattggatcatttattttgcccgatacaccaaactcgatgctcgagagaggcaaaaatgaggaagcaaaacaaatgttgaagaagatacgtggagctgacaatgttgatcatgagtttcaagatctcattgatgctgttgaagctgccaaaaaggtggaaaatccatggaagaacatcatggagagtaaatatagaccagctttaatcttctgctcggccattccctttttccaacagatcactggaatcaatgtcattatgttctacgctcctgttctcttcaagactcttggttttggtgatgatgctgctcttatgtctgctgttataaccggtgttgtcaacatgctttcaacctttgtctcaatttacgcggttgatagatatggtagaaggttgcttttcctcgaaggtggcattcaaatgttcatttgtcagcttcttgttggttctttcatcggtgcaagattcggaacctcaggaaccggaacattgacgccagcaacagcagactggattcttgctttcatatgtgtgtacgttgcaggatttgcatggtcatggggtccattgggatggttggtaccgagtgagatatgtccattggaaattagaccagcgggacaagccatcaacgtctcggtcaacatgttcttcacttttctcattggtcaattctttttgacaatgctttgtcacatgaagtttggtctattctacttctttgcaagcatggttgcgatcatgacggttttcatttactttttgttgccggagaccaaaggtgttcctattgaagagatgggaagagtttggaagcaacattggttctggaaaaagtatatcccagaagatgctattattggtggacatgatgacaacaataccaattaa

SEQ ID NO: 8159 - protein, 514 aa, Arabidopsis thaliana
MAGGAFVSEGGGGGRSYEGGVTAFVIMTCIVAAMGGLLFGYDLGISGGVTSMEEFLTKFFPQVESQMKKAKHDTAYCKFDNQMLQLFTSSLYLAALVASFMASVITRKHGRKVSMFIGGLAFLIGALFNAFAVNVSMLIIGRLLLGVGVGFANQSTPVYLSEMAPAKIRGALNIGFQMAITIGILVANLINYGTSKMAQHGWRVSLGLAAVPAVVMVIGSFILPDTPNSMLERGKNEEAKQMLKKIRGADNVDHEFQDLIDAVEAAKKVENPWKNIMESKYRPALIFCSAIPFFQQITGINVIMFYAPVLFKTLGFGDDAALMSAVITGVVNMLSTFVSIYAVDRYGRRLLFLEGGIQMFICQLLVGSFIGARFGTSGTGTLTPATADWILAFICVYVAGFAWSWGPLGWLVPSEICPLEIRPAGQAINVSVNMFFTFLIGQFFLTMLCHMKFGLFYFFASMVAIMTVFIYFLLPETKGVPIEEMGRVWKQHWFWKKYIPEDAIIGGHDDNNTN

SEQ ID NO: 8160 - DNA, 1624 bp, Arabidopsis thaliana
  CDS (73)..(1464)
gatctaaaaacacggtgccttctcatttcctccgggcattttacgaagaaaatggagacaagaaaagacgacatggagaaaaggaacgacaaatccgagccgttgctgctgccggagaatggatccgacgtctcagaagaagcatcatggatggtttatctaagcacgatcattgccgtttgcggttcctacgagtttggaacatgcgtgggatactccgctccaacacagtttgggattatggaagagcttaatttatcatattcccagttttcggttttcggatcgatattgaatatgggagcagtgctcggcgccattacatcggggaagatttctgatttcatcggtcggaaaggggccatgcggttgtcttcagtgatctctgccatcggctggctgataatttacttggccaagggtgacgtacctttggatttcggaagatttctaacgggttatggttgcggtaccctttcctttgtggtaccggtcttcatcgccgaaattagtccgagaaaattgagaggagccttagcgacgcttaaccagctctttatcgtaatcggattagcttctatgttcctcataggcgccgtcgtaaattggagaactcttgcactaaccggagttgcaccgtgcgtggttctattctttgggacttggttcatccctgaatcacccagatggctggaaatggttggccgccacagtgattttgaaattgcgttgcaaaaactgaggggtcctcaggccaatatcacaagagaagccggggaaattcaggagtacttagcgagtcttgctcacctcccgaaagccacattgatggaccttattgacaaaaagaatattcgatttgtgatagttggagttggtttgatgtttttccaacaattcgttggaattaatggcgttatcttctacgcacaacaaatattcgtatcagcaggagcatccccaactcttggaagcattctatactcgatcgaacaagtcgttctcacagcactaggcgcaacattgctaattgatcggcttggaagaaggccacttcttatggcttcagctgttgggatgctgattggatgtttgctcatcggaaattcatttcttttgaaggctcatggtttagcacttgacatcattccggctctggcagttagtggtgtcttggtctacatcggttcgttctctattggaatgggtgcaatcccatgggttataatgtctgagatatttccaataaatttgaaaggaactgccggaggacttgtcactgtagtaaattggctaagttcatggcttgtctcattcactttcaactttctcatgatttggagccctcatggtacattttatgtgtatggtggggtatgtgtattggctattatcttcatagcaaaacttgttcctgaaactaaaggcagaaccttggaagagattcaagcaatgatgatgtaactctgtaaatatataatacatgttaattttttattttttttattaaggtataactatctacatgcaaacgcataccattatcaatataaccgaaaggctttatatgtattttatgaatttaattttggattttcagatttcgtaaatcgaaagaattatg

SEQ ID NO: 8161 - protein, 463 aa, Arabidopsis thaliana
MEKRNDKSEPLLLPENGSDVSEEASWMVYLSTIIAVCGSYEFGTCVGYSAPTQFGIMEELNLSYSQFSVFGSILNMGAVLGAITSGKISDFIGRKGAMRLSSVISAIGWLIIYLAKGDVPLDFGRFLTGYGCGTLSFVVPVFIAEISPRKLRGALATLNQLFIVIGLASMFLIGAVVNWRTLALTGVAPCVVLFFGTWFIPESPRWLEMVGRHSDFEIALQKLRGPQANITREAGEIQEYLASLAHLPKATLMDLIDKKNIRFVIVGVGLMFFQQFVGINGVIFYAQQIFVSAGASPTLGSILYSIEQVVLTALGATLLIDRLGRRPLLMASAVGMLIGCLLIGNSFLLKAHGLALDIIPALAVSGVLVYIGSFSIGMGAIPWVIMSEIFPINLKGTAGGLVTVVNWLSSWLVSFTFNFLMIWSPHGTFYVYGGVCVLAIIFIAKLVPETKGRTLEEIQAMMM

SEQ ID NO: 8162 - DNA, 1578 bp, Arabidopsis thaliana
  CDS (1)..(1434)
atgacgatgtcggagaactcaagaaacttggaagctggtttgctactgaggaagaaccaaaacgacatcaacgaatgtcgtatcactgctgttgtacttttcagtactttcgtttctgtttgtggctctttctgcttcggttgtgcggcaggttattcatcagttgctcaaacagggatcataaatgatttaggtctctctgttgcacaatactccatgtttggttcaatcatgacttttggaggaatgattggtgccatcttcagcgggaaagttgcagatctcatgggtcgaaaagggactatgtggtttgctcaaattttctgcatcttcggttgggttgcagtagcattagcaaaagactccatgtggcttgatattggaagactatccacaggatttgcagttggtttattaagctatgtgataccagtttacattgcagaaataacaccaaaacatgttcgaggagcgtttgtatttgctaatcagctgatgcagagttgtggattgtctttattctacgtcattggaaattttgttcattggcgtaacttggccttaatcggtctcattccatgtgcgttgcaagttgtgactttgttctttattccagagtcccctagactactgggaaaatggggacatgaaaaagaatgtagagcttcattgcaaagtcttcgcggagatgatgcagatatctctgaagaagccaacactatcaaagaaaccatgatcttgtttgatgaaggaccaaaatcgcgggttatggatttgtttcagagaagatatgctccatctgttgttattggtgtgggactaatgcttctacaacaactctctggaagctcaggacttatgtactatgtcggtagcgtatttgataaaggagggtttccaagcagcattggctcaatgattcttgcagtgatcatgataccaaaagctctattgggtctgattttggttgagaaaatgggacgaagaccacttctattgatgaatgatctttatttacaggcctctaccggtggaatgtgctttttcagcttgctcctcagtttttccttctgctttcggtcatatggcatgcttgatgagctcactccgattttcacatgtatcggtgtagtgggtttcatctcttcatttgccgtaggcatgggaggcttaccatggatcatcatgtctgagatattcccaatgaatgttaaagtttctgctgggactctgggtaccttagccaactggtcctttggttggattgttgctttcgcctacaacttcatgctagagtggaacgcatcaggaacgttcttgatcttctttactatatgtggtgcgggtatagtctttatttatgcgatggtacccgaaactaaaggaagaacattggaagatatacaagcttctcttacagattttctacaatgagatcaagtttgacttgtttaaagttattcattttttcttagattacaattggggggaggtttatagttttttgttgtaattgttacctcatttgatgtgcaattgagaaagagatcacttgaacataaaaaaaaaaaaaaaaaa

SEQ ID NO: 8163 - protein, 477 aa, Arabidopsis thaliana
MTMSENSRNLEAGLLLRKNQNDINECRITAVVLFSTFVSVCGSFCFGCAAGYSSVAQTGIINDLGLSVAQYSMFGSIMTFGGMIGAIFSGKVADLMGRKGTMWFAQIFCIFGWVAVALAKDSMWLDIGRLSTGFAVGLLSYVIPVYIAEITPKHVRGAFVFANQLMQSCGLSLFYVIGNFVHWRNLALIGLIPCALQVVTLFFIPESPRLLGKWGHEKECRASLQSLRGDDADISEEANTIKETMILFDEGPKSRVMDLFQRRYAPSVVIGVGLMLLQQLSGSSGLMYYVGSVFDKGGFPSSIGSMILAVIMIPKALLGLILVEKMGRRPLLLMNDLYLQASTGGMCFFSLLLSFSFCFRSYGMLDELTPIFTCIGVVGFISSFAVGMGGLPWIIMSEIFPMNVKVSAGTLGTLANWSFGWIVAFAYNFMLEWNASGTFLIFFTICGAGIVFIYAMVPETKGRTLEDIQASLTDFLQ

SEQ ID NO: 8164 - DNA, 1524 bp, Arabidopsis thaliana
  CDS (1)..(1524)
atggctgttgttgtgtctaatgccaatgctccggcctttgaggccaagatgactgtctatgtattcatctgcgttatgattgccgctgtcggcggtttgatcttcggttacgacatcggaatttccggtggagtaagtgcaatggacgatttcctgaaggaatttttcccagcggtgtgggagaggaagaagcacgtacacgagaacaactactgcaagtacgataaccagttcttgcaactgttcacctcgtctctttacctagctgcactcgtggccagtttcgtcgcgtccgccacctgttctaaacttggacgcaggccgacgatgcagtttgcttctatcttcttcttgattggtgtcggtctcactgcaggagccgttaacctcgtcatgttgatcattggaagactctttcttggctttggtgttggatttggcaatcaggcagtgcctcttttcctgtctgagattgctccagcacagctccgaggaggtctcaacattgtattccaactcatggttacaatcggaatcctaattgccaacattgtcaactacttcactgccacggttcacccttacggatggaggattgctctcggtggagctggaattcccgctgttatcctcctcttcggttcactacttatcattgagactcccacaagtctcatcgagcgcaacaagaacgaagaaggaaaagaagccctaaggaagatcagaggagttgatgatatcaatgacgagtatgagtctatcgtccatgcatgtgacatcgcgagtcaagtcaaggacccttacaggaaactgttgaagcccgcgagtcgcccaccgttcatcatcggaatgcttctccagcttttccaacaatttaccggaatcaatgcgattatgttctatgcgccggtcttattccaaactgttgggttcggaagcgacgcagcccttctctctgcggttatcaccggatcgatcaatgttctcgccacgttcgttgggatttacctcgttgacagaaccggcaggaggttccttcttctccaatcttccgttcacatgctcatctgccagttgatcattggaatcatcctagcaaaggacttgggcgtaacgggaacactcgggaggccacaagccctagtagtggtgatctttgtgtgcgtttacgtgatgggatttgcatggtcatggggacctttgggatggctaattcctagcgagacgtttcctctagaaacacgtagcgcaggattcgctgttgcagtctcatgcaacatgttcttcacttttgtaatcgctcaagccttcctatcgatgctttgcgggatgagatctggaatattcttcttcttcagcggttggatcattgtgatgggactgtttgcgtttttcttcataccagagacaaaaggaatcgccattgatgacatgagggagagtgtgtggaagccacattggttctggaaaaggtatatgcttccagaggacgaccaccatgacatagagaagagaaatgcttga

SEQ ID NO: 8165 - protein, 507 aa, Arabidopsis thaliana
MAVVVSNANAPAFEAKMTVYVFICVMIAAVGGLIFGYDIGISGGVSAMDDFLKEFFPAVWERKKHVHENNYCKYDNQFLQLFTSSLYLAALVASFVASATCSKLGRRPTMQFASIFFLIGVGLTAGAVNLVMLIIGRLFLGFGVGFGNQAVPLFLSEIAPAQLRGGLNIVFQLMVTIGILIANIVNYFTATVHPYGWRIALGGAGIPAVILLFGSLLIIETPTSLIERNKNEEGKEALRKIRGVDDINDEYESIVHACDIASQVKDPYRKLLKPASRPPFIIGMLLQLFQQFTGINAIMFYAPVLFQTVGFGSDAALLSAVITGSINVLATFVGIYLVDRTGRRFLLLQSSVHMLICQLIIGIILAKDLGVTGTLGRPQALVVVIFVCVYVMGFAWSWGPLGWLIPSETFPLETRSAGFAVAVSCNMFFTFVIAQAFLSMLCGMRSGIFFFFSGWIIVMGLFAFFFIPETKGIAIDDMRESVWKPHWFWKRYMLPEDDHHDIEKRNA

SEQ ID NO: 8166 - DNA, 1976 bp, Lycopersicon esculentum
  CDS (87)..(1658)
attttatttttcttatataaaaaacatatcatcttcttattgttattttaactaccacatttgaagccggaaaacttagtaacacgatggccggtggaggatttacgacctccggtaacggaggcacgcatttcgaggctaaaatcacaccaattgttatcatatcttgtattatggctgctaccggaggtctcatgtttggttatgatgttggagtttctggtggtgttacatcaatggatccatttttaaaaaaattctttccaacagtttataagagaacaaaggagccaggattagacagtaattactgtaaatacgataatcaagggttacaattatttacttcatcgttatacctagctggtttaacggcgacgttttttgcttcttacactacaagaaaacttggccggagattaactatgttaatcgccggttgttttttcattattggagttgtactaaatgctgctgctcaagatttagctatgcttattattggaagaattctccttggttgtggcgttggtttcgccaatcaggctgttccattatttttatcagaaatagcacctacaagaattcgtggaggacttaacattttgttccaacttaacgtaactattggtattctttttgccaatctcgtcaactacggaacagccaagattagtggaggatggggatggagattatcattagggttagctggatttccagcagtattgttgactttgggcgcattatttgttgttgaaaccccaaacagtttgattgaaagaggttacttagaagaaggcaaagaagtacttcgaaaaatcagaggtaccgacaacattgaacctgaattcttggaacttgttgaggctagtcgtgttgctaaacaagtcaaacaccctttcagaaatttactccaacgtaaaaatagacctcaattaatcatctctgttgccctccagatattccaacaatttacaggaatcaacgctattatgttctacgcacctgttttattttcaacactagggtttggaaacagcgcagctctttactcagctgtcatcaccggagcagtcaacgttctctccaccgttgtctcagtctactccgttgacaagctcggacgacgagtcctcctcctggaagctggggtccaaatgttactatctcaaataataatcgctataatcctaggtatcaaagttactgatcattcagacaaccttagccatggttggggaatcttcgtagtagttctgatctgtacatatgtatcggctttcgcatggtcatggggcccacttggatggttaattcctagcgagacgttccctttggaaactcgttcagctggtcaaagtgtaacagtgtgtgttaacttgcttttcacgtttgttatggcacaagcatttctctcaatgctttgtcatttcaagtatgggatattcttgttcttctcggggtggatttttgtgatgtcgttgttcgttttcttcttgttgcctgagacgaagaatgttcctattgaggagatgacggagagggtgtggaagcaacattggctgtggaagaggtttatggtggatgaagatgatgttgatatgattaaaaagaatggacatgctaacggatatgatcccacttctcggttgtaaaataaaaaataaaagaatattagcggtgttttacgttgattttatcatagtaaagatgcgtagaaataaatcaaacatgcaagagagagatcagagtctactgtctagtctagtgatatcgataagtgtttctcacaaaataggtgtgcatttggattttttttactgcttgttttcctcctttatatcgttcaatgtagtagaaattgtttagccaaagtgtaagagatgcaatatggtgataatttatgtaaccatatagcctatgtatattagagatttggtataattcattttgggaaaaaaaaaaaaaaaaaa

SEQ ID NO: 8167 - protein, 523 aa, Lycopersicon esculentum
MAGGGFTTSGNGGTHFEAKITPIVIISCIMAATGGLMFGYDVGVSGGVTSMDPFLKKFFPTVYKRTKEPGLDSNYCKYDNQGLQLFTSSLYLAGLTATFFASYTTRKLGRRLTMLIAGCFFIIGVVLNAAAQDLAMLIIGRILLGCGVGFANQAVPLFLSEIAPTRIRGGLNILFQLNVTIGILFANLVNYGTAKISGGWGWRLSLGLAGFPAVLLTLGALFVVETPNSLIERGYLEEGKEVLRKIRGTDNIEPEFLELVEASRVAKQVKHPFRNLLQRKNRPQLIISVALQIFQQFTGINAIMFYAPVLFSTLGFGNSAALYSAVITGAVNVLSTVVSVYSVDKLGRRVLLLEAGVQMLLSQIIIAIILGIKVTDHSDNLSHGWGIFVVVLICTYVSAFAWSWGPLGWLIPSETFPLETRSAGQSVTVCVNLLFTFVMAQAFLSMLCHFKYGIFLFFSGWIFVMSLFVFFLLPETKNVPIEEMTERVWKQHWLWKRFMVDEDDVDMIKKNGHANGYDPTSRL

SEQ ID NO: 8168 - DNA, 1653 bp, Pichia stipitis; identical to SEQ ID NO: 505
  CDS (1)..(1653)

SEQ ID NO: 8169 - protein, 550 aa, Pichia stipitis; identical to SEQ ID NO: 506

SEQ ID NO: 8170 - DNA, 2169 bp, Drosophila melanogaster
  CDS (579)..(2024)
cagttttatctggaactttgccgccgtcagtcatttccaacttccatgcggcgtgtttcgggtttatttttcgtctaggtgtaaacatttctaattagtgttgtgtttggtgcagtagttcttccttccaatctttgttatcagtcgcgtagtgctaatcgactctatctcaagtgcgctggtaccgtaaaaggtctccgttctttttttggccaatcacttgtatcaataaataattaggggctatcgctccgtgtttatttcgagacataatttaattccagaaagcagtgaggcggcacataagagctctccggtgctcggcaaacgacaaaactaatttatggcattaaaaatgcatattttctagcagtgcgtcgacagtttttatcatttgccagaaaggcaaaaggcgctatccaccagcagctgtgccagaaaaggaagctaggaagacacgtcggtcgagaattggatttgactgcggaggattttgaatccgagtccgaaagttctttagtcagcaaccgaagaagcgtaggataattcacatttttctcacggcaactggcaacgaaatggctttcctatgtgcaccgggtctcaccttcttcctcacctactcgattttctcggcggtgctgggcatgctgcaattcggctacaacaccggcgtcatcaacgcgcccgaaaagaatatcgagaacttcatgaaggacgtctacaaggaccgctacggcgaggacatcagcgaggagttcatccagcagctctactcggtggcggtatccattttcgccatcggcggcatgctgggcggtttcagcggaggctggatggccaaccgctttggcagaaaaggcggcctactgttgaacaatgtgctcggaattgccggcgcctgtttgatgggatttaccaaagttagtcattcctatgaaatgttattccttggccgatttataattggtgttaattgcggcctcaacacttcgctggtgcccatgtacatctcggagatagcgccactgaatctgcgcggtggcttaggaactgttaatcaattggctgtgactgtaggtttactattatcccaagtgctgggcatcgagcaaatcctcggcaccaacgagggctggcccatcctcctgggcctggccatctgcccggcgatcctgcagctgatcctgctgcccgtctgcccggaatcgcccagatatctgctcattaccaagcagtgggaggaggaggcgcgaaaagccctgcgccgactgcgagcctctgggtccgtggaggaggacatcgaggagatgcgggccgaggagcgcgcccagcagtccgagagccacatatcgaccatggagctgatatgctcgcccaccctgcgccctccgctgatcatcggcatcgtgatgcagctgagccagcaattcagcggcatcaacgccgtcttctactattccacgtcgctgttcatgagctcgggattgactgaggagagcgccaagttcgctacgataggcatcggcgccataatggttgttatgacgctcgtgtccattccgctaatggatcgcacgggtcgccggaccctgcatctctatggtctgggcggaatgttcatcttctcaatcttcatcaccatttcgttcctgatcaaggaaatgatcgactggatgtcctacctctctgtggtggccactctcggattcgtcgtcttctttgcggtgggacccggttcgataccctggatgattaccgcggagctcttctcccagggaccccggcccagtgccatggctattgcggtgctggtcaactggatggccaactttgtggtcggcattggtttccccagcatgaagactgccctggagaactacacgttcttgccgttcagcgtattcctggccatcttctggatattcacgtacaagaaggtgcccgagacgaagaacaagacgttcgaggagatcctggccctcttccggcacaacaatggcaggtatgtgtccttgcactagctcattctacgctcaaattctgcacacaaatcatggcaatatgtcgaatagttatccagctcataacttaaactcaactttcttaactgacacaagaaatgcgaactataaatactataaaatacaatacagaatctttgtacta

SEQ ID NO: 8171 - protein, 481 aa, Drosophila melanogaster
MAFLCAPGLTFFLTYSIFSAVLGMLQFGYNTGVINAPEKNIENFMKDVYKDRYGEDISEEFIQQLYSVAVSIFAIGGMLGGFSGGWMANRFGRKGGLLLNNVLGIAGACLMGFTKVSHSYEMLFLGRFIIGVNCGLNTSLVPMYISEIAPLNLRGGLGTVNQLAVTVGLLLSQVLGIEQILGTNEGWPILLGLAICPAILQLILLPVCPESPRYLLITKQWEEEARKALRRLRASGSVEEDIEEMRAEERAQQSESHISTMELICSPTLRPPLIIGIVMQLSQQFSGINAVFYYSTSLFMSSGLTEESAKFATIGIGAIMVVMTLVSIPLMDRTGRRTLHLYGLGGMFIFSIFITISFLIKEMIDWMSYLSVVATLGFVVFFAVGPGSIPWMITAELFSQGPRPSAMAIAVLVNWMANFVVGIGFPSMKTALENYTFLPFSVFLAIFWIFTYKKVPETKNKTFEEILALFRHNNGRYVSLH

SEQ ID NO: 8172 - DNA, 1587 bp, Drosophila melanogaster
  CDS (47)..(1444)
caaggaaacacctataaaaaccaatttaaaaaaaaaacccctcgccatgtccaagggatcggtgttgccacaatatattgctggcttgtcggccagctttggtgccctctgcatgggcgcctccattggttggtcctcgcccgtggagaatatgataacggtgaacacggaatacggctttcccattagctccagtcagttcggctgggtatcctcgctgctgaccctgggcgccactgtgatctgcattcccattggtttcgccatcgattggatcggcaggagacccactatgttagccctaattccaccgtacatggtgggctgggtgctgatgctgttcgccaaaaacgtgaccatgctctacttcggacgattcattcttggcatgtgcggcggagccttttgcgtaacagctcccatgtactgtacagagattacggcgacagcactacgaggcaccatcggatcctttttccagctgctgattgtgtcgggcgtgctgtacggctatttggtgggcgccttcctgcccctgctcaccatcaatatcctgtgcgctattctgcccgtaatctttgctatcatacacttcttcatgccggagtcacccgtctacctggccatgaagggacgcaacgatgatgccgccaaggccttgcagtggctgcgcggcaaggatgccgatatcgatgacgagctcaaggagatcctggaggagtcccagaagcagattgatatgccacaggtcaacattctgtcctcccttcgtcgacccatcgtcctgaagggtcttggaatcgctgtgctcctgcaggtcttccagcagtggacgggaatcaacgccgttctcttctactccgcctccattttcgaggatacgggctctgacataagtggcagcgatgccacgcttatcattggagtcacccaagtgaccagcacgctggttgccgtggccattatcgacaaggctggccgtcgcatcctgctccttatctctggcgttctgatggccgtgtccactgcactgatgggcgtgtactttcagctaaaggagaacgatccggcttcaatggacaatttcggttggttgccgatcagcagtatctgcattttcataatcttcttctcgattggattcggaccggtgccgtggctggtgatggcggaactcttctcggaggatgtgaagagtgtggcaggatcgattgccggcaccagcaactggctgtcggccttcgtggtcacgctgctcttcccaatcctcaagagctcgatcgggccgggtccgaccttttggatctttaccgcgatcgcggtcatcgccttcttctactctctgttcttcgtgccggagaccaagggcaagacaataatcgaaatccaggacctgctgtccggaggaaagggtgtcaaaagtgatgacaagagccagacgtgatgatgtcgcgtagtcttagtcgtagcgatactttttcatattctccttaagccaataagaaaatgttatgtataagaagtgaagagcataatcaataaagtagaatcaccatgtatataaactaaaaaaaaaaaaaaaaaaaa

SEQ ID NO: 8173 - protein, 465 aa, Drosophila melanogaster
MSKGSVLPQYIAGLSASFGALCMGASIGWSSPVENMITVNTEYGFPISSSQFGWVSSLLTLGATVICIPIGFAIDWIGRRPTMLALIPPYMVGWVLMLFAKNVTMLYFGRFILGMCGGAFCVTAPMYCTEITATALRGTIGSFFQLLIVSGVLYGYLVGAFLPLLTINILCAILPVIFAIIHFFMPESPVYLAMKGRNDDAAKALQWLRGKDADIDDELKEILEESQKQIDMPQVNILSSLRRPIVLKGLGIAVLLQVFQQWTGINAVLFYSASIFEDTGSDISGSDATLIIGVTQVTSTLVAVAIIDKAGRRILLLISGVLMAVSTALMGVYFQLKENDPASMDNFGWLPISSICIFIIFFSIGFGPVPWLVMAELFSEDVKSVAGSIAGTSNWLSAFVVTLLFPILKSSIGPGPTFWIFTAIAVIAFFYSLFFVPETKGKTIIEIQDLLSGGKGVKSDDKSQT

SEQ ID NO: 8174 - DNA, 2514 bp, Drosophila melanogaster
  CDS (463)..(2082)
tgcggttaaagatacaaagatactcccggcgcacaaataagatactcgcgagtggcactgcggaaacatcgatgagccaaccgatacatatccaaaaatatccatatatcttaaacgaaactcgtgtcatatcgcccagtttactggctaattagaggggcaaagaagggccaaaataatacattttttggccagcaacatgtttgattgttgatgcgcatgcgccctaaagtattccatgctacgtgggtggccgacgtgttaaaggacaaaaaacgcaagccaaaggacatttcacagacattgacgcattgctcaacattatcacatcgccaaagctaaagtgcagttccaagtgagaaaagcgggcagaagttaacggataatcgccgaagaatattgaaatacatatcccccatcgtaactgtgcaatcctaccgaagtttacataatcccttcgatatgtccaccgcatcgtcgagcaactccagcggcgaggaggccaacaaaaagtccggctccaacaacgaggagagctcccacctgctggaatccgccgaaaatggagccaagtacggctccagacagccggtcaaaatcgtcaaagccagcgataatggacgcaccagctccacaccacatgatcaggagaatctactgggcaacatggtgcacacgtctacttcgaataactcccagaagtggccacaatatgtggccgcattggccgctgctggtggcgccttcgccgccggtaccgtcctgggttggacatcgccggccgaaacggagatcgtggatcgcggcgaaggatacgatttccctgtcgacaaggatcagttttcgtgggtaggatctgccatgaccctgggtgccgcctgtgtgtgcattcccattggcttcctgatcaacatgattggccgaaagtggaccatgctgtttctggtgctgcccttcattctcggttggaccatgctcatctgggcggtcaatgtcagtatgctgtatgcctcgcgcttcatcctcggtatcgccggtggagctttctgtgtgaccgctcccatgtacacgggtgagattgctcagaaggagattcgcggaacgctgggcagcttcttccagttgatgataaccattggtatcctgttcgtctatgccgtcggagctggtgtgaaaatattctggttgagcatcatttgcggcattctgcccctcatctttggcgccatcttctttttcatgccggaatcgcccacctacttggtttccaaagatcggtcggagaacgccatcaagtccattcaatggctgcgtggcaaggaatacgattacgagccagagctggcggagctgcgtgaaaccgaccgggaaaccaaggccaacaaggtcaacgtgtgggctgctctgaaccgacccgtcacccggaaggctttggccatcagcatgggtcttatgttcttccagcaggtctgcggaatcaatgctgttattttctacgcttcgaggatctttttggaagccaacactggcatcgaggctgagtgggcaacgatcctgatcggtatcatgcaagtggtggccaccttcgtctccaccctggtagtagacaagctgggccgtcgcatcctgctgttggcctcaggaatttccatggccatttccaccaccgccatcggagtgtacttcttcctccagaaacaggacgcggcacaagtggtgagtctgggctggctcccagtggccagtctgtgcctgttcatcatcatgttctcgatcggctatggaccggtgccatggctgatgatgggagagctcttcgccaccgacatcaagggatttgctggatcgctggccggaacatccaactggcttttggcattcgtggtgaccaagacgtttgtgaacttgaacgatggcctgggaattggcggaaccttctggctattcgctggtctgactgttgtgggtgtgatattcgtttatttcgccgtgccggaaaccaagggcaagagtctcaacgagattcagcaggagctggctggcaaccggtcgactccacaagctattcccgcggaaaagtaaaggggcaatgtccacctgaggagcccgaaaggcaaatcgcgattcgcaatccggaaggcgaaagacggaccggaaatcactgttaacttgctgttaatatacgttcgatttaagttcgcgtttagtgcaagtcttttggcgttttcgatggatgaatttgtttatagaatttaatatgcgcatagattttcgtttaagcatagcaagattcagatgaagatgaagaaaattgcaggaaactataactaagagcgaagactgaaggtcaactgcagaaaagccgcgataatatttttttgcagccatagaaaagacaacagcaatttaagaaaaaacatatatacctatatatatatccatataatgtatgtatgcttatttagtgttattcattcaaccaacgaaatctgttttacaaaattttaagccata

SEQ ID NO: 8175 - protein, 539 aa, Drosophila melanogaster
MSTASSSNSSGEEANKKSGSNNEESSHLLESAENGAKYGSRQPVKIVKASDNGRTSSTPHDQENLLGNMVHTSTSNNSQKWPQYVAALAAAGGAFAAGTVLGWTSPAETEIVDRGEGYDFPVDKDQFSWVGSAMTLGAACVCIPIGFLINMIGRKWTMLFLVLPFILGWTMLIWAVNVSMLYASRFILGIAGGAFCVTAPMYTGEIAQKEIRGTLGSFFQLMITIGILFVYAVGAGVKIFWLSIICGILPLIFGAIFFFMPESPTYLVSKDRSENAIKSIQWLRGKEYDYEPELAELRETDRETKANKVNVWAALNRPVTRKALAISMGLMFFQQVCGINAVIFYASRIFLEANTGIEAEWATILIGIMQVVATFVSTLVVDKLGRRILLLASGISMAISTTAIGVYFFLQKQDAAQVVSLGWLPVASLCLFIIMFSIGYGPVPWLMMGELFATDIKGFAGSLAGTSNWLLAFVVTKTFVNLNDGLGIGGTFWLFAGLTVVGVIFVYFAVPETKGKSLNEIQQELAGNRSTPQAIPAEK

SEQ ID NO: 8176 - DNA, 1560 bp, Vitis vinifera
  CDS (1)..(1560)
atgccggctgtcggaggctttgataagggtaccgggaaggcctatcccggtaaccttactccttacgtgactgtgacatgtgttgttgcagccatgggtggtttgatctttggttacgatattggaatttctggtggggtcacgtccatggctccgttcttgcagaagttcttcccttctgtgtaccggaaggaggctttggacaagtccacgaatcagtactgtaagtttgatagtgagacactgacgttgttcacatcgtcgctttatctggctgctcttctctcgtcgctggtggccgcgacggtgacccgaaagttcgggagaaagctgtcaatgctattcggaggactgctcttttgtgccggtgccatcatcaatggcgctgctaaagctgtttggatgttgattgtcggtcgtatactgctgggttttggtattgggtttgccaatcagtctgtgccgctctacctctctgagatggctccatacaaatacagaggagccctcaacattggcttccaattatccatcacaattggtattcttgtggccaatatattgaactacttctttgcaaagatcaaggggggttggggatggaggttgagcttgggtggcgctgtggtccctgcgctcatcatcaccgtcgggtcccttgtcctcccggacacacccaactccatgatcgagcgtgggcagcacgagggagcgaaaacaaaactgagaagaatccggggtgtcgatgatgttgaagaggaattcaatgaccttgttgtagccagtgaagcctccaagcttgttgagcacccctggagaaatctcttgcagaggaagtacaggccacacctcacaatggccatcctcattcccttcttccagcagcttaccgggattaatgtcattatgttttatgcccctgttctcttcaaaaccattggctttgcggatgatgcttccctgatgtctgctgtgataaccggcggggttaatgttcttgcaaccatagtttcaatctacggtgttgataagtggggaagaaggtttcttttccttgagggtggcactcaaatgctcatatgtcaggttattgtggcaacgtgcattggtgttaaattcggagtggatggagaacctggtgctttgcccaagtggtatgccatagttgtggtgctgttcatttgcgtctatgtttcagggtttgcatggtcctggggtcctctaggttggttggtccctagtgaaattttccccctggaaatccgatctgctgcacagagtgtaaacgtctccgttaacatgtttttcacattcatcatagcccaaatcttcttaaatatgctgtgtcacatgaagtttggtttgttcctcttctttgccttctttgtggtggtgatgtccttcttcatttacttcttcttgcctgagaccaagggcatcccaattgaagagatggctgaagtatggaaaagtcactggttctggtcccggtatgtcaacgatggttcttacagcggcgtcgaactggtcaaggaaaactaccctgttaagaatgtatga

SEQ ID NO: 8177 - protein, 519 aa, Vitis vinifera
MPAVGGFDKGTGKAYPGNLTPYVTVTCVVAAMGGLIFGYDIGISGGVTSMAPFLQKFFPSVYRKEALDKSTNQYCKFDSETLTLFTSSLYLAALLSSLVAATVTRKFGRKLSMLFGGLLFCAGAIINGAAKAVWMLIVGRILLGFGIGFANQSVPLYLSEMAPYKYRGALNIGFQLSITIGILVANILNYFFAKIKGGWGWRLSLGGAVVPALIITVGSLVLPDTPNSMIERGQHEGAKTKLRRIRGVDDVEEEFNDLVVASEASKLVEHPWRNLLQRKYRPHLTMAILIPFFQQLTGINVIMFYAPVLFKTIGFADDASLMSAVITGGVNVLATIVSIYGVDKWGRRFLFLEGGTQMLICQVIVATCIGVKFGVDGEPGALPKWYAIVVVLFICVYVSGFAWSWGPLGWLVPSEIFPLEIRSAAQSVNVSVNMFFTFIIAQIFLNMLCHMKFGLFLFFAFFVVVMSFFIYFFLPETKGIPIEEMAEVWKSHWFWSRYVNDGSYSGVELVKENYPVKNV

SEQ ID NO: 8178 - DNA, 1686 bp, Arabidopsis thaliana
  CDS (130)..(1521)
gtcctccgcttttccattttactcttcttgtatgtttctgtcttcttactcaacttttgcttcaggcttcgtctcttttgcaatttttgagttagccaagtgctcaagggagatacataatacctgaagatgtccaaggcaagtgatgccgtcagagaaccattggtggacaagaatatggctggatcaaaaccagaccagccgtggatggtttatctcagcacattcgttgcggtctgtggttcttttgcgttcggttcttgtgcgggatactcttcacctgctcaggctgcaattaggaatgacctttcattgactatagctgagttttcactctttggttctttactaacttttggcgcaatgatcggtgctataacaagcgggcctatagctgatttagttggaagaaagggggcgatgagagtttcctctgcattttgtgtagtcgggtggctagcaatcatctttgccaagggagtagtggctctggaccttggaagactggcaacgggatatggaatgggagcattttcctatgtggtgccaatctttatagcagaaattgcacctaaaactttcagaggggctctaaccacactgaaccagattctgatctgcactggagtgtcggtttccttcatcataggcacactagtgacgtggagagtcttggcattaataggaatcatcccatgcgctgcctccttccttggcctcttttttatccctgagtctccaagatggctggcaaaagtggggcgtgatacggagtttgaagctgcactgaggaagctccgtgggaagaaggctgatatttcggaggaggcagcagagatccaggattatatcgaaactctggaaaggctaccgaaagccaagatgctggatttgtttcagaggagatacatacgctctgttcttatagctttcgggttgatggtgtttcagcagtttggaggaatcaacggaatatgtttctacacaagctcgatatttgagcaagcaggttttcccacaagacttgggatgataatatatgctgttcttcaggtggtaatcactgcgcttaatgcaccgatagttgacagagccggaagaaaaccattgctactggtttctgcaacagggttagtgataggctgtttgatagcagcggtttctttctatctcaaggttcacgacatggcgcacgaagcagtcccagtcctggctgttgttggtataatggtgtacataggatcgttttcagcaggaatgggagcaatgccgtgggtggtcatgtctgagatatttcccataaacataaaaggagtagcaggaggcatggcgacgctggtgaactggtttggagcgtgggctgtttcttacactttcaacttcctcatgtcctggagctcttacggaactttcctcatttacgctgccatcaacgcgctggccattgtcttcgtcattgccatcgtgcctgagacaaaagggaagacattggagcagatccaagctatagtcaatccatagctcaaacacttcctagatgttcgtttctattagccagctgggacataaattgcaatcttggatctctttgcttttatgattctttactgagttcaattgttatcactctctctatttctaatctcttcttaatgaactttggacttcaatttgatgtttttccat

SEQ ID NO: 8179 - protein, 463 aa, Arabidopsis thaliana
MSKASDAVREPLVDKNMAGSKPDQPWMVYLSTFVAVCGSFAFGSCAGYSSPAQAAIRNDLSLTIAEFSLFGSLLTFGAMIGAITSGPIADLVGRKGAMRVSSAFCVVGWLAIIFAKGVVALDLGRLATGYGMGAFSYVVPIFIAEIAPKTFRGALTTLNQILICTGVSVSFIIGTLVTWRVLALIGIIPCAASFLGLFFIPESPRWLAKVGRDTEFEAALRKLRGKKADISEEAAEIQDYIETLERLPKAKMLDLFQRRYIRSVLIAFGLMVFQQFGGINGICFYTSSIFEQAGFPTRLGMIIYAVLQVVITALNAPIVDRAGRKPLLLVSATGLVIGCLIAAVSFYLKVHDMAHEAVPVLAVVGIMVYIGSFSAGMGAMPWVVMSEIFPINIKGVAGGMATLVNWFGAWAVSYTFNFLMSWSSYGTFLIYAAINALAIVFVIAIVPETKGKTLEQIQAIVNP

SEQ ID NO: 8180 - DNA, 2468 bp, Mus musculus; identical to SEQ ID NO: 515
  CDS (34)..(1605)

SEQ ID NO: 8181 - protein, 523 aa, Mus musculus; identical to SEQ ID NO: 516

SEQ ID NO: 8182 - DNA, 2355 bp, Canis familiaris; identical to SEQ ID NO: 517
  CDS (201)..(1688)

SEQ ID NO: 8183 - protein, 495 aa, Canis familiaris; identical to SEQ ID NO: 518

SEQ ID NO: 8184 - DNA, 1485 bp, Ovis aries; identical to SEQ ID NO: 519
  CDS (1)..(1485)

SEQ ID NO: 8185 - protein, 494 aa, Ovis aries; identical to SEQ ID NO: 520

SEQ ID NO: 8186 - DNA, 2425 bp, Kluyveromyces lactis; identical to SEQ ID NO: 523
  CDS (539)..(2194)

SEQ ID NO: 8187 - protein, 551 aa, Kluyveromyces lactis; identical to SEQ ID NO: 524

SEQ ID NO: 8188 - DNA, 2353 bp, Chlorella kessleri
  CDS (57)..(1679)
cccggccttgcagcaatccacatacccctcatcgacgcgacatccataaagggaccatggcagggggcggaccagtagcgagcaccacaaccaaccgcgcgagccagtatggctacgccaggggcggcctcaactggtacatcttcattgtggccttgaccgcaggcagcggcggcctgctgttcggctatgacattggtgtgactggcggcgtcacctccatgcctgagttcctgcagaagttcttcccctccatctatgaccgcacacagcagcccagcgacagcaaggacccctactgcacctatgacgaccagaagctgcagctcttcacctcctccttcttcctggccggcatgtttgtctccttctttgccggctccgtggtccgccgctggggccgcaagcccaccatgctcatcgcctccgtcctcttcctggctggcgccggcctcaacgccggtgcccaggaccttgccatgctcgtcatcggccgtgtgctgctcggttttggcgtcggcggcggcaacaacgccgtgcctctgtacctatcagagtgcgccccccccaagtaccgcggcggcctcaacatgatgttccagctggctgtcaccattggcatcatcgttgcccagctggtcaactacggcacccagaccatgaacaacggctggcgcctgtccctgggccttgccggcgtgcccgccatcatcctgctgattggctccctgctgctccctgagacccccaactccctcattgagcgcggccaccgccgcaggggccgcgctgtgctggcacgcctgcgccgcactgaggctgtcgacaccgagtttgaggacatttgcgccgcagctgaggagtccacccgctacaccctgcgccagtcctgggccgccctgttctcccgccagtactcgcccatgctcatcgtgacctccctcatcgccatgctgcagcagctgaccggcattaacgcgatcatgttctacgtgcccgtcctcttcagctcctttggcactgctcgccacgccgccctgctgaacaccgtcatcatcggcgctgtcaatgtggccgccacctttgtttccatcttctccgttgacaagtttggccgccgcggcctcttcctggagggtggcattcagatgttcatcggccaggtggtgaccgctgctgtgctgggcgtggagctgaacaagtacggcaccaacctgccctcctccactgccgctggcgtgctggtggtcatctgcgtttacgtggccgcctttgcctggtcctgggggcccctgggctggctggtgccttctgagatccagacgctggagacccgcggtgccggcatgtccatggccgtcattgtcaacttcctattctcattcgtgattggccaagcgttcctgtccatgatgtgcgccatgcgctggggcgtgttcctcttctttgccggctgggtggtcatcatgaccttctttgtctacttctgcctaccagagaccaagggtgtgcctgtggagaccgtgcccaccatgtttgcccgccactggctgtggggccgcgtcatgggagagaagggccgcgcactggtggctgctgacgaggcccgcaaggctggcaccgtggcatttaaggtggagagcggctctgaggacggcaagcctgcctctgaccagtaagcttgggctgtctgtccccaagctgccaactaacgtcttccttcttttttccctctgaaacgctagcaactaggaatgtcgtgcaaactctctcgcttgcagccgtctttcttgcgctgagctgtcagcaggcagaattttgaagcgcagactgtttctccctgccagtctgccctctgcctgcttttgatcgtgtgatggtgaactggactgaacccgtcttgcccgcccttccccactggaaaggagcttgaatgccgttgcacctgggacaggtgtttttatagcctgcattgcagcgctcttggcaatttttatgctggaagctcaccgcttgcacctggacaggtgtttttatagcctgctctgcagcgctgttggcattttttttcctgagtgcgcaccgttgattgagccctacagcagttttcttagcgctaggcaggcgtctttctgccactgttttgctgtggcgcttccacgctgagatgacggggaggagtgttagcgaggtagttgcttctgggtaccttattcattcatacacttggctgcgtgcctttcatgagtctggctaccttcttcatttggcatgaggttgtcacctacatagccacatattgaatgatcttgggtttatatacatggccagccttgcagcagtctacattgcc

SEQ ID NO: 8189 - protein, 540 aa, Chlorella kessleri
MAGGGPVASTTTNRASQYGYARGGLNWYIFIVALTAGSGGLLFGYDIGVTGGVTSMPEFLQKFFPSIYDRTQQPSDSKDPYCTYDDQKLQLFTSSFFLAGMFVSFFAGSVVRRWGRKPTMLIASVLFLAGAGLNAGAQDLAMLVIGRVLLGFGVGGGNNAVPLYLSECAPPKYRGGLNMMFQLAVTIGIIVAQLVNYGTQTMNNGWRLSLGLAGVPAIILLIGSLLLPETPNSLIERGHRRRGRAVLARLRRTEAVDTEFEDICAAAEESTRYTLRQSWAALFSRQYSPMLIVTSLIAMLQQLTGINAIMFYVPVLFSSFGTARHAALLNTVIIGAVNVAATFVSIFSVDKFGRRGLFLEGGIQMFIGQVVTAAVLGVELNKYGTNLPSSTAAGVLVVICVYVAAFAWSWGPLGWLVPSEIQTLETRGAGMSMAVIVNFLFSFVIGQAFLSMMCAMRWGVFLFFAGWVVIMTFFVYFCLPETKGVPVETVPTMFARHWLWGRVMGEKGRALVAADEARKAGTVAFKVESGSEDGKPASDQ

SEQ ID NO: 8190 - DNA, 1731 bp, Saccharomyces cerevisiae
  CDS (1)..(1731)
atgtctgaagaagctgcctatcaagaggatacagcagtccaaaatactccagctgatgctttgtcgccagttgaatccgattctaattccgctttgtctactccatccaacaaagctgaaagagatgacatgaaagatttcgacgagaatcacgaagaatctaataactacgttgaaattccaaagaagcccgcctccgcctacgttacagtttccatctgttgtttaatggttgctttcggtggttttgttttcggttgggatactggtaccatttctggttttgttgctcaaactgattttatcagaagatttggtatgaagcaccacgatggtacttattatttgtctaaggttagaactggtttaattgtctccattttcaacattggttgtgccattggtggtattattttagcaaaattaggtgatatgtatggtcgtaaaatgggtttgattgtcgttgttgtcatctacattatcggtatcattatccaaattgcctcaatcaacaagtggtaccaatatttcattggtagaattatctctggtttaggtgtcggtggtattgccgttttatctcctatgttgatttctgaagtctctccaaagcatattagaggtactttggtttcatgttaccaacttatgattactttgggtattttcttgggttactgtacaaactacggtaccaagacctacaccaattctgtccaatggagagttccattaggtctaggtttcgcttgggctttgtttatgattggtggtatgacattcgttccagaatctccacgttatttagttgaagtcggtaaaattgaagaagctaagcgttctattgctctttcaaataaggtcagcgcagacgatccagctgttatggctgaagtcgaagttgttcaagctacagttgaagctgaaaaattagctggtaatgcctcctggggtgaaatatttagcactaagactaaggttttccaacgtttgatcatgggtgctatgattcaatcattgcaacaattgacaggtgataactatttcttctattacggtactaccgttttcactgctgtcggtttggaagattcttttgaaacttctattgtcttgggtattgtcaactttgcttccacctttgttggtattttcttagtcgaaagatatggtcgtcgtagatgtttattatggggtgctgcttccatgacagcttgtatggttgttttcgcttctgttggtgttacaagattgtggccaaatggtaagaagaacgggtcttctaagggtgctggtaactgtatgattgtcttcacatgtttctacttattctgttttgccactacctgggctccaattccatttgttgttaactctgaaactttcccattgagagttaagtccaagtgtatggctattgctcaagcttgtaactggatctggggtttcttgattggtttctttactccatttatttcaggtgctattgatttctactacggttatgttttcatgggctgtttggtcttttcttacttctacgtcttcttcttcgttccagaaactaaaggtttgactttagaagaagttaacaccttatgggaagaaggtgttttgccatggaaatcaccttcttgggttccaccaaacaagagaggtactgactacaacgctgatgatctaatgcatgatgatcaaccattttacaagaagatgttcggaaaaaagtag

SEQ ID NO: 8191 - protein, 576 aa, Saccharomyces cerevisiae; identical to SEQ ID NO: 526

SEQ ID NO: 8192 - DNA, 3261 bp, Homo sapiens
  CDS (109)..(1998): Xaa of translated CDS can stand for any naturally occuring amino acid which can be translated from respective CDS-codon
ctgccggcccgcggagccgcgtccccccgggcagccccgggcccctgccctatgtcccgcaaggcaagcgagaatgtggagtacacgctgcggagcctgagcagcctgatgggcgagcggcgcaggaagcagccggagccggacgcggcgagcgcggccggggagtgcagcctcctggctgccgccgaatcgagcaccagcctgcagagcgcgggcgcgggcggcggcggcgtcggggacctggagcgcgcggcgcggcggcagttccagcaggacgagacccccgccttcgtgtacgtggtggccgtcttctccgcgctgggcggcttcctgtttggctatgacaccggggtggtgtcaggggccatgctgctgctcaagcggcagctcagtctggacgcgctgtggcaggagctgctggtgtccagcacggtgggggcggctgccgtctcggcgctggccggaggcgccctcaacggcgtcttcggccgccgcgctgccatcctcctggccagtgccctcttcaccgccggctccgcggtgctggctgcggccaacaacaaggagacactgctcgccggccgcctggtcgtgggactcggcatcggcattgcttctatgacagtgccagtgtacattgcggaggtctcaccacccaatttaagaggccgattagtcaccattaataccctcttcatcacaggagggcagttctttgcaagtgttgttgatggagccttcagttatctccagaaggatggatggaggtacatgttgggacttgcarcagttccggcggttatacagttttttggctttctctttttgcctgaaagccctcgatggcttattcagaaaggacagactcagaaggcccgtagaattttatctcagatgcgtggtaaccagaccattgatgaggaatatgatagcatcaaaaacaacattgaagaggaggaaaaagaggttggctcagctggacctgtgatctgcagaatgctgagttatcccccaactcgccgagctttaattgtgggttgtggcctacaaatgttccagcagctctcaggcattaacaccatcatgtactacagtgcaaccattctgcagatgtctggtgttgaagatgatagacttgcaatatggctggcttcagttacagccttcacaaatttcattttcacacttgtgggagtctggcttgttgagaaggtgggccgcagaaagcttacctttggtagtttagcaggtaccaccgtagcactcattattcttgccttgggatttgtgctatcagcccaagtttccccacgcatcacttttaagccaatagctccgtcaggtcagaacgccacttgcacaagatacagttactgtaatgaatgtatgttggatccagactgcggtttctgctwcaagatgaacaaatcaactgtcattgactcctcctgtgttccagttaataaagcatctacaaatgaggcagcctggggcaggtgtgaaaatgaaaccaagttcaaaacagaagatatattttgggcttacaatttctgccctactccatactcctggactgcacttctgggccttattttatatcttgtcttctttgcacctggaatgggaccaatgccttggactgtgaattctgaaatatatcccctttgggcaagaagtacaggaaatgcatgttcatctggaataaactggattttcaatgtcctggtttcactaacatttttacacacagcagagtatcttacatactatggagctttcttcctctatgctggatttgctgctgtgggactccttttcatctatggctgtcttcctgagaccaaaggcaaaaaattagaggaaattgaatcactctttgacaacaggctatgtacatgtggcacttcagattctgatgaagggagatatattgaatatattcgggtaaagggaagtaactatcatctttctgacaatgatgcttctgatgtggaataattttcagctgctcatatatttagttatttaaacaaactggggggagaagaacagcaattggtgacttcactgccctgcttctaatctggttctttccacagcctagttttgattgacttcatattctagaatacttgattaggaggaagatacaaccatgatgactttttttttccacaaggaacaatattttaaaaaatatttacagagattttaatctaataattcttaagcaaatgtgtgtaatgccttcctgaaatagtctaaaatgaatattgtacccagtgacttcagtggtatccttttttcctaagaccatttataattattagtggcaacagagtcagtgctaatctagccaaattacatatgtataatatatttataaaggattctgggagatggtccaagggtgttctgtgtcaaaagatggcctattggccctcagttttcctacagagtagtggcttatctctgatcagctgttacaaactaaattccatgtaagctttcatcaacaaattccaaagtgcctcctacaagggcacagctgtccgtatctcctttggattccatatttttgtttctctccaattcagatattgggagttcttcagatactgactctgcacactatcttttgaacattatgaaaatataatctgtcgggttgttttcatacttcctttttttgcatcagtgataaggcatacatttgcgcagatgagctaggaagttttgagaagtaccttttatgttcagaaagtaacagattaaaggtttttatgggttccaaattggttagtcacttaggtatgcaattataaatgcaaaatagtgccagatctttaactgtatatcagggtcagtttttgttcatgcccaaatcactacaccttcctcattggccttggagtcctactattttgtgccttcatttgtgttacatacatagctgcaagcaaaccatttttcccctttcttttattcaaacaataatttttgaaacaaaaaagaggaaggaaatcagtggcagaaataatcctgctgttattggtgtttgtttaataaaaataatgggacttttttcttaactttttattagctcttcctaagggaaatgtcacatattattatttaattgtacttgtctttttttactttaagagcataaactcgtttttattttgcacacttttctcattttcctgagaatttaccagaaaaaaaaagatacatagatttgtctctgtgtttttctta

SEQ ID NO: 8193 - protein, 629 aa, Homo sapiens
  misc_feature (227)..(227): Xaa can be any naturally occuring amino acid
  misc_feature (436)..(436): Xaa can be any naturally occuring amino acid
MGERRRKQPEPDAASAAGECSLLAAAESSTSLQSAGAGGGGVGDLERAARRQFQQDETPAFVYVVAVFSALGGFLFGYDTGVVSGAMLLLKRQLSLDALWQELLVSSTVGAAAVSALAGGALNGVFGRRAAILLASALFTAGSAVLAAANNKETLLAGRLVVGLGIGIASMTVPVYIAEVSPPNLRGRLVTINTLFITGGQFFASVVDGAFSYLQKDGWRYMLGLAXVPAVIQFFGFLFLPESPRWLIQKGQTQKARRILSQMRGNQTIDEEYDSIKNNIEEEEKEVGSAGPVICRMLSYPPTRRALIVGCGLQMFQQLSGINTIMYYSATILQMSGVEDDRLAIWLASVTAFTNFIFTLVGVWLVEKVGRRKLTFGSLAGTTVALIILALGFVLSAQVSPRITFKPIAPSGQNATCTRYSYCNECMLDPDCGFCXKMNKSTVIDSSCVPVNKASTNEAAWGRCENETKFKTEDIFWAYNFCPTPYSWTALLGLILYLVFFAPGMGPMPWTVNSEIYPLWARSTGNACSSGINWIFNVLVSLTFLHTAEYLTYYGAFFLYAGFAAVGLLFIYGCLPETKGKKLEEIESLFDNRLCTCGTSDSDEGRYIEYIRVKGSNYHLSDNDASDVE

SEQ ID NO: 8194 - DNA, 2504 bp, Rattus norvegicus
  CDS (145)..(2001)
ggcacgaggcggctcagcagctggcagcgagtgcgcggcgccccacggaacttccccgcagccgcccgggcggcgtccgtctgtcccatgtcccgcaaggcgagcgaggacgtggagtacacgctgcgcagcctgagcagcctgatgggcgagaggcgccgccggcagccggagcccggggcgccgggcggggagcgcagcctcctggccgccgagtcggccgccagcctgcagggcgcggagctggagcgcgcggcgcgcaggcagttccagcgcgacgagacccccgccttcgtgtacgcggccgccgccttctccgctctcggcggcttcctgttcggctacgacaccggcgtggtgtcgggggccatgctgctgctgcggcgccagatgcgcctgggcgcgatgtggcaggagctgctggtgtcgggcgcggtgggcgcggccgccgtcgcggcgctggccggaggggccctgaacggcgccctcggtcggcgaagcgccatcctgctggccagcgccctgtgcaccgtgggctccgccgtgctggccgccgccgccaacaaggagacgctgctggccggccgcctggtcgtggggctcggcatcggcatcgcatccatgacagtgcccgtgtacatcgccgaggtctctccacccaacctgagaggtcgcttggtcaccatcaacaccctcttcatcaccggcggacagttctttgcgagcgttgttgatggagcctttagttacctgcagaaggatggatggaggtacatgttgggacttgcggccattccagccgttatacaattcctcggattcctctttttgcccgaaagtcctcggtggctgatacagaaaggacagactcagaaggcccgccgaattttgtcccagatgcgtgggaatcagaccattgacgaggagtatgacagcatcaggaacagcatcgaggaggaggagaaggaagccagcgcagctggacctataatctgcagaatgctgagttaccccccaactcgccgagcgttagctgtgggatgtggcttacagatgttccagcagctctcgggcatcaacactatcatgtactacagcgcgaccatcctgcagatgtccggcgtggaagatgatagacttgcaatatggctggcttccattacagcgttcaccaatttcattttcacactggtgggcgtctggctcgtggagaaggtgggccgcaggaagctcacctttggcagtttggcaggtaccacagtagcacttacaattcttgccttgggatttctgctctcagctcaggtctcaccacgggtcactttcagaccaacggctccctcgggtcaaaatgccacctgcacagaatacagttactgtaatgagtgtatgctggatccagactgcggtttctgctacaagatcaacagttcggctgtcattgattcctcctgtgttccggtgaacaaagcttccaccaatgaagcagcctggggcaggtgtgaaaacgaaaccaagttcaaagcagaagatgttcactgggcttacagtttctgccctaccccatactcctggacagcactcgtgggcctggtgttatatcttgttttctttgcacccggaatgggaccaatgccctggaccgtgaactctgaaatctatcctctctgggcaagaagtacaggaaatgcgtgctcagctggaataaactggattttcaacgtgctggtttcactgacctttttacacacagcggagtatcttacatactatggagcgttcttcctctacgccggattcgccgctgtgggactgcttttcgtctatggctgtcttcctgaaaccaaagggaaaaaactagaggaaatcgaatcgctcttcgaccaccggctgtgcacctgcggcaccgcggactcggacgagggcaggtacatcgagtacatccgcgtgaagggaagtaactaccatctctccgacaacgacgcctcggacgtggagtgacttccacccgatggctttccagttactgaagtgaacgtgtcgggaaggccagcggttggtcactgccctgctcacaagccgagtctccccaccgtccttgccaatgactccatattccagaagacttgatgagcagaaaaatacaactctggtgatgtttattttcatacacagaaatgctaaaaaaaaaaaataaataaataaccacagatttttcttaggcaaatgtgtacaagcccttcccgagacaatctaaacactactgttgtacccagcgacttcagttggggtccctttctccttaaaccacacataattagtggcaatacagtcagtgcttacctaggcagattatttacgtatatttataaaggattatttaaaacgatctaagaatatttaatgtcaaaacacggcctattgaccctaaattttcatatcaggtagtggcttttctctgatcagtacagagtgaatcccatctaaacttccccctcgtgccg

SEQ ID NO: 8195 - protein, 618 aa, Rattus norvegicus
MGERRRRQPEPGAPGGERSLLAAESAASLQGAELERAARRQFQRDETPAFVYAAAAFSALGGFLFGYDTGVVSGAMLLLRRQMRLGAMWQELLVSGAVGAAAVAALAGGALNGALGRRSAILLASALCTVGSAVLAAAANKETLLAGRLVVGLGIGIASMTVPVYIAEVSPPNLRGRLVTINTLFITGGQFFASVVDGAFSYLQKDGWRYMLGLAAIPAVIQFLGFLFLPESPRWLIQKGQTQKARRILSQMRGNQTIDEEYDSIRNSIEEEEKEASAAGPIICRMLSYPPTRRALAVGCGLQMFQQLSGINTIMYYSATILQMSGVEDDRLAIWLASITAFTNFIFTLVGVWLVEKVGRRKLTFGSLAGTTVALTILALGFLLSAQVSPRVTFRPTAPSGQNATCTEYSYCNECMLDPDCGFCYKINSSAVIDSSCVPVNKASTNEAAWGRCENETKFKAEDVHWAYSFCPTPYSWTALVGLVLYLVFFAPGMGPMPWTVNSEIYPLWARSTGNACSAGINWIFNVLVSLTFLHTAEYLTYYGAFFLYAGFAAVGLLFVYGCLPETKGKKLEEIESLFDHRLCTCGTADSDEGRYIEYIRVKGSNYHLSDNDASDVE

SEQ ID NO: 8196 - DNA, 3642 bp, Saccharomyces cerevisiae; identical to SEQ ID NO: 7728
  CDS (749)..(3205)

SEQ ID NO: 8197 - protein, 818 aa, Saccharomyces cerevisiae
MTSVFTDDISTIDDNSILFSEPPQKQSMMMSICVGVFVAVGGFLFGYDTGLINSITSMNYVKSHVAPNHDSFTAQQMSILVSFLSLGTFFGALTAPFISDSYGRKPTIIFSTIFIFSIGNSLQVGAGGITLLIVGRVISGIGIGAISAVVPLYQAEATHKSLRGAIISTYQWAITWGLLVSSAVSQGTHARNDASSYRIPIGLQYVWSSFLAIGMFFLPESPRYYVLKDKLDEAAKSLSFLRGVPVHDSGLLEELVEIKATYDYEASFGSSNFIDCFISSKSRPKQTLRMFTGIALQAFQQFSGINFIFYYGVNFFNKTGVSNSYLVSFITYAVNVVFNVPGLFFVEFFGRRKVLVVGGVIMTIANFIVAIVGCSLKTVAAAKVMIAFICLFIAAFSATWGGVVWVISAELYPLGVRSKCTAICAAANWLVNFICALITPYIVDTGSHTSSLGAKIFFIWGSLNAMGVIVVYLTVYETKGLTLEEIDELYIKSSTGVVSPKFNKDIRERALKFQYDPLQRLEDGKNTFVAKRNNFDDETPRNDFRNTISGEIDHSPNQKEVHSIPERVDIPTSTEILESPNKSSGMTVPVSPSLQDVPIPQTTEPAEIRTKYVDLGNGLGLNTYNRGPPSLSSDSSEDYTEDEIGGPSSQGDQSNRSTMNDINDYMARLIHSTSTASNTTDKFSGNQSTLRYHTASSHSDTTEEDSNLMDLGNGLALNAYNRGPPSILMNSSDEEANGGETSDNLNTAQDLAGMKERMAQFAQSYIDKRGGLEPETQSNILSTSLSVMADTNEHNNEILHSSEENATNQPVNENNDLK

SEQ ID NO: 8198 - DNA, 1374 bp, Lactobacillus brevis
  CDS (1)..(1374)
atgcgaaaagtttcgaccggatttgtttacttcttcggagcgctgggtgggttactttttgggtatgacactggggttatttccggagctattctctttattcagaaacagatgaacttaggatcttggcaacaaggctgggtcgttagtgcggttttgttaggggccattttaggggctgccatcattgggccttcgtctgaccgatttggtcggcggaaattattactgctttctgctattattttcttcgttggggcgttaggttccgccttttcaccagagttttggacgttaattatctcccgaattatcctggggatggccgttggggctgcttcagcattgattccgacgtatttggctgaattggcaccgtctgataagcgaggaacggtttccagtctatttcagttaatggttatgactgggattctcttggcctacatcacgaactacagtttctcaggtttctataccggctggcggtggatgttaggtttcgcggcaattcctgctgctttgctgttcttgggtgggctaattctccccgagagtccccggttcttggttaagagtgggcatctggatgaagctcggcacgtgctagacaccatgaacaagcatgaccaagtggcggtcaataaagaaattaatgatattcaagaatccgctaaaattgtgagcggtggttggtcagagttatttggtaagatggttcggccttcattgatcatcgggattggtttagccattttccaacaggtgatgggctgtaacacggtactgtactacgcaccaacaatcttcacggatgttggcttcggagtttcagccgcactgttagcgcatattggaattgggatctttaacgtgattgtgaccgcgattgcggtagccatcatggataagatcgaccggaaaaagatcgtaaatattggtgctgttgggatgggaatctccctgttcgttatgagcatcgggatgaagttctcaggtgggtcacagaccgcggcaatcatctctgtgattgctttgacagtttacatcgccttcttctccgcaacttggggtcctgtaatgtgggtcatgattggggaagtcttcccattgaacattcggggcttaggtaactcctttgctagtgtgatcaactggacagcaaacatgattgtttccttgacgttcccatctctgttggacttctttggaaccgggagcttgttcattggttacgggattctctgctttgcttccatctggttcgtccaaaagaaagtgttcgaaacacggaatcggtctttggaagatatcgaagccaccttacgtgctaagacaggcgaagatgctgctgaactaagcacgaccaaataa

SEQ ID NO: 8199 - protein, 457 aa, Lactobacillus brevis
MRKVSTGFVYFFGALGGLLFGYDTGVISGAILFIQKQMNLGSWQQGWVVSAVLLGAILGAAIIGPSSDRFGRRKLLLLSAIIFFVGALGSAFSPEFWTLIISRIILGMAVGAASALIPTYLAELAPSDKRGTVSSLFQLMVMTGILLAYITNYSFSGFYTGWRWMLGFAAIPAALLFLGGLILPESPRFLVKSGHLDEARHVLDTMNKHDQVAVNKEINDIQESAKIVSGGWSELFGKMVRPSLIIGIGLAIFQQVMGCNTVLYYAPTIFTDVGFGVSAALLAHIGIGIFNVIVTAIAVAIMDKIDRKKIVNIGAVGMGISLFVMSIGMKFSGGSQTAAIISVIALTVYIAFFSATWGPVMWVMIGEVFPLNIRGLGNSFASVINWTANMIVSLTFPSLLDFFGTGSLFIGYGILCFASIWFVQKKVFETRNRSLEDIEATLRAKTGEDAAELSTTK

SEQ ID NO: 8200 - DNA, 1500 bp, Xenopus laevis
  CDS (1)..(1500)
atggacgggaaaatgaaacagcaaaagaacctgactgggaccctgttgtttgctgtctttacagctgtgttggcctcactgcagttcggatatggtattggtgtcatcaatgctcctcaaaagattattgagaatcactatacacgggttttactagaaggcagtgcaaatgagaccgatacaaaatctgtacaaccgtctgtcaaaatgtactggtccctctctgtatctgtgttctccttgggagggatggtgtcttcattctttgttggatggattgcagataaactgggaaggataaaagccatgatggctgtaaacagtctggcagttattggggctattctgatggggctggctcccttaggtcaagcacatgctcttgtcattgctggcagattaattacaggtctttactgcggtctggcatcaggactggttcccatgtatgtcggagagatctccccaacagcacttcgaggagctttaggaacgttgcatcagttggctattgtcacagggattctcattagtcaggtggtcggacttgaatttattttgggtagtgagactctttggcctgttctgttaggcttgtcgggagtccctgctattgtgcagaccatcctgctgttcttttgccctgaaagccccagatttctgttaatcaaacttgggaagatggaagcagctaaaagaaacttaataaggctcagaggagactatgatccaacaaaagacattgaagagatgaaaaaggaaaaggaagaagtcgaaagtgaaaaaaaagtgtctatcatacagttattcaagtcttctaattaccgccagcctctaattgtttctcttgtgcttcatatctctcagcagttttccggaatcaatgggatcttttactactctacaagcatctttactagagcgggtattagccaaccagtatatgcaactattggagtcggcgctgttaacacagttttcacagtggtttcggtgttccttatagagaaggcaggtagaagatccctctatctggttggcttagccggcatgggcatctgcgctattgttatgactattgcgttggcacttctgactcagcatgcttggatgagttacctaagtatggtcgccattttccttttcgtggttttctttgaagttggcccaggtcctattccttggttcattgtcgcagaattgttcagtcaaggtccacgacctgcagctatggcagtgtctgggtgctgtaactggacatgcaactttatcattgggatgtgttttgaatacatagctgatgcctgtgggccatatgtattcatcatttttgctgtactcctttttatattcaccattttcacatactttaaagtcccggagactaagggcaagtcatttgatgagatagctgccgagttccgaaagaagaaacttgcatcccgcaaaggacttaaatcgactgaaatggagtatctgggaaccagttcggaagcataa

SEQ ID NO: 8201 - protein, 499 aa, Xenopus laevis
MDGKMKQQKNLTGTLLFAVFTAVLASLQFGYGIGVINAPQKIIENHYTRVLLEGSANETDTKSVQPSVKMYWSLSVSVFSLGGMVSSFFVGWIADKLGRIKAMMAVNSLAVIGAILMGLAPLGQAHALVIAGRLITGLYCGLASGLVPMYVGEISPTALRGALGTLHQLAIVTGILISQVVGLEFILGSETLWPVLLGLSGVPAIVQTILLFFCPESPRFLLIKLGKMEAAKRNLIRLRGDYDPTKDIEEMKKEKEEVESEKKVSIIQLFKSSNYRQPLIVSLVLHISQQFSGINGIFYYSTSIFTRAGISQPVYATIGVGAVNTVFTVVSVFLIEKAGRRSLYLVGLAGMGICAIVMTIALALLTQHAWMSYLSMVAIFLFVVFFEVGPGPIPWFIVAELFSQGPRPAAMAVSGCCNWTCNFIIGMCFEYIADACGPYVFIIFAVLLFIFTIFTYFKVPETKGKSFDEIAAEFRKKKLASRKGLKSTEMEYLGTSSEA

SEQ ID NO: 8202 - DNA, 1470 bp, Gadus morhua
  CDS (1)..(1470)
atggcggagggaaagaaagtgaccttccagctgatgctggccgtgggagccgctgtgattggctctctccagttcggctacaacaccggcgtcatcaacgcccctcagaaggtgatcgagaacttcatcaacgagacctggtcggaacggaacgagcagcccatcgaccagaccaccctcaccaccatctggtcggtgtccgtggccatcttctccgtcgggggcatcttcgggtccttctcagtcggcctgttcgtcaaccgcttcgggaggaagaactccatgctgatggccaacatcctggccttcgcctcggccgcgctgatgggcttctcccagatggccaagtcgtacgagatgctgatcatcggccgcttcgtggtggggctctactccggcctctccaccggcttcgtgcccatgtacgtgggcgaggtggcccccacagccctgcggggggcgctgggcacgctgcaccagctgggcatcgtcctggggatcctcatggctcaggtgtttggcatcgagtccttcatggggaacaaggccctctggcccctcctgctgggcttcaccttcttcccggccgtggtgcagtgcgccgtcctccccttctgtccagagagcccccgcttcctgctgctcaacaagaacgaggagaacaaggccaagagcgtgctgaagaagctccgggggtccgcggacgtgagcgccgacatgcaggagatgaagagcgagcaccggcagatgatgagggagaagaaggtgaccatccccgagctgttccgctcgccgctgtaccgccagcccatcttcatcgccatcgtgctgcagctgtcccagcagctgtcgggcatcaacgccgtcttctactactccaccagtatctttgagaaggcgggcgtggcccagcccgtctacgccaccatcggcgccggcgtggtgaacaccgccttcaccgtggtctcgctgttcgtggtggagcgcgccggccgccgctcgctgcacatgatcggcctggcgggcatggccttctctgccgtcctgatgaccatcgccctctccctgctggagaagctgccgtggatgtcgtacgtcagcatcgtggccatcttcggcttcgtggcgttcttcgagatcggcccgggccccatcccctggttcatcgtggccgagctcttctcccaggggccgcggccctccgccttcgccgtggccggcttctccaactggacggccaacttcatcgtgggaatgggcttccagtatgtcgagatggtgtgtgggccctacgtcttcatcatcttcacggtgctgctgctcttcttcctcgtcttcacgtacttcaaggtcccggagacgcgcggccgcaccttcgacgagatctcctcgggcttccggcagagcgccgggggggagaagcactcccccgaggagctggcccacagcctgggcgactcccagctctga

SEQ ID NO: 8203 - protein, 489 aa, Gadus morhua
MAEGKKVTFQLMLAVGAAVIGSLQFGYNTGVINAPQKVIENFINETWSERNEQPIDQTTLTTIWSVSVAIFSVGGIFGSFSVGLFVNRFGRKNSMLMANILAFASAALMGFSQMAKSYEMLIIGRFVVGLYSGLSTGFVPMYVGEVAPTALRGALGTLHQLGIVLGILMAQVFGIESFMGNKALWPLLLGFTFFPAVVQCAVLPFCPESPRFLLLNKNEENKAKSVLKKLRGSADVSADMQEMKSEHRQMMREKKVTIPELFRSPLYRQPIFIAIVLQLSQQLSGINAVFYYSTSIFEKAGVAQPVYATIGAGVVNTAFTVVSLFVVERAGRRSLHMIGLAGMAFSAVLMTIALSLLEKLPWMSYVSIVAIFGFVAFFEIGPGPIPWFIVAELFSQGPRPSAFAVAGFSNWTANFIVGMGFQYVEMVCGPYVFIIFTVLLLFFLVFTYFKVPETRGRTFDEISSGFRQSAGGEKHSPEELAHSLGDSQL

SEQ ID NO: 8204 - DNA, 25 bp, Artificial sequence
  Primer sequence
atgggaatacacataccatatctca

SEQ ID NO: 8205 - DNA, 26 bp, Artificial sequence
  Primer sequence
ctatatatcctctataatctcttgag

SEQ ID NO: 8206 - DNA, 1164 bp, Saccharomyces cerevisiae; identical to SEQ ID NO: 1121
  CDS (1)..(1164)

SEQ ID NO: 8207 - protein, 387 aa, Saccharomyces cerevisiae; identical to SEQ ID NO: 1122

SEQ ID NO: 8208 - DNA, 1041 bp, Pseudomonas aeruginosa; identical to SEQ ID NO: 1123
  CDS (1)..(1041)

SEQ ID NO: 8209 - protein, 346 aa, Pseudomonas aeruginosa; identical to SEQ ID NO: 1124

SEQ ID NO: 8210 - DNA, 1077 bp, Listeria monocytogenes; identical to SEQ ID NO: 1125
  CDS (1)..(1077)

SEQ ID NO: 8211 - protein, 358 aa, Listeria monocytogenes; identical to SEQ ID NO: 1126

SEQ ID NO: 8212 - DNA, 1053 bp, Agrobacterium tumefaciens; identical to SEQ ID NO: 1127
  CDS (1)..(1053)

SEQ ID NO: 8213 - protein, 350 aa, Agrobacterium tumefaciens; identical to SEQ ID NO: 1128

SEQ ID NO: 8214 - DNA, 1002 bp, Salmonella enterica subsp. enterica serovar Typhi; identical to SEQ ID NO: 1129
  CDS (1)..(1002)

SEQ ID NO: 8215 - protein, 333 aa, Salmonella enterica subsp. enterica serovar Typhi; identical to SEQ ID NO: 1130

SEQ ID NO: 8216 - DNA, 1038 bp, Nostoc sp. PCC 7120; identical to SEQ ID NO: 1131
  CDS (1)..(1038)

SEQ ID NO: 8217 - protein, 345 aa, Nostoc sp. PCC 7120; identical to SEQ ID NO: 1132

SEQ ID NO: 8218 - DNA, 1032 bp, Thermotoga maritima; identical to SEQ ID NO: 1133
  CDS (1)..(1032)

SEQ ID NO: 8219 - protein, 343 aa, Thermotoga maritima; identical to SEQ ID NO: 1134

SEQ ID NO: 8220 - DNA, 978 bp, Bacillus halodurans; identical to SEQ ID NO: 1135
  CDS (1)..(978)

SEQ ID NO: 8221 - protein, 325 aa, Bacillus halodurans; identical to SEQ ID NO: 1136

SEQ ID NO: 8222 - DNA, 1032 bp, Caulobacter crescentus; identical to SEQ ID NO: 1137
  CDS (1)..(1032)

SEQ ID NO: 8223 - protein, 343 aa, Caulobacter crescentus; identical to SEQ ID NO: 1138

SEQ ID NO: 8224 - DNA, 1035 bp, Clostridium acetobutylicum; identical to SEQ ID NO: 1139
  CDS (1)..(1035)

SEQ ID NO: 8225 - protein, 344 aa, Clostridium acetobutylicum; identical to SEQ ID NO: 1140

SEQ ID NO: 8226 - DNA, 1074 bp, Halobacterium sp. NRC-1; identical to SEQ ID NO: 1141
  CDS (1)..(1074)

SEQ ID NO: 8227 - protein, 357 aa, Halobacterium sp. NRC-1; identical to SEQ ID NO: 1142

SEQ ID NO: 8228 - DNA, 1029 bp, Deinococcus radiodurans; identical to SEQ ID NO: 1143
  CDS (1)..(1029)

SEQ ID NO: 8229 - protein, 342 aa, Deinococcus radiodurans; identical to SEQ ID NO: 1144

SEQ ID NO: 8230 - DNA, 1032 bp, Vibrio cholerae; identical to SEQ ID NO: 1145
  CDS (1)..(1032)

SEQ ID NO: 8231 - protein, 343 aa, Vibrio cholerae; identical to SEQ ID NO: 1146

SEQ ID NO: 8232 - DNA, 1280 bp, Escherichia coli; identical to SEQ ID NO: 1147
  CDS (61)..(1062)

SEQ ID NO: 8233 - protein, 333 aa, Escherichia coli; identical to SEQ ID NO: 1148

SEQ ID NO: 8234 - DNA, 1005 bp, Pseudomonas aeruginosa; identical to SEQ ID NO: 1149
  CDS (1)..(1005)

SEQ ID NO: 8235 - protein, 334 aa, Pseudomonas aeruginosa; identical to SEQ ID NO: 1150

SEQ ID NO: 8236 - DNA, 1080 bp, Leishmania major; identical to SEQ ID NO: 1151
  CDS (1)..(1080)

SEQ ID NO: 8237 - protein, 359 aa, Leishmania major; identical to SEQ ID NO: 1152

SEQ ID NO: 8238 - DNA, 1302 bp, Caenorhabditis elegans; identical to SEQ ID NO: 1153
  CDS (1)..(1302)

SEQ ID NO: 8239 - protein, 433 aa, Caenorhabditis elegans; identical to SEQ ID NO: 1154

SEQ ID NO: 8240 - DNA, 1212 bp, Streptomyces coelicolor; identical to SEQ ID NO: 1155
  CDS (1)..(1212)

SEQ ID NO: 8241 - protein, 403 aa, Streptomyces coelicolor; identical to SEQ ID NO: 1156

SEQ ID NO: 8242 - DNA, 1131 bp, Schizosaccharomyces pombe; identical to SEQ ID NO: 1157
  CDS (1)..(1131)

SEQ ID NO: 8243 - protein, 376 aa, Schizosaccharomyces pombe; identical to SEQ ID NO: 1158

SEQ ID NO: 8244 - DNA, 1017 bp, Aeromonas jandaei; identical to SEQ ID NO: 1159
  CDS (1)..(1017)

SEQ ID NO: 8245 - protein, 338 aa, Aeromonas jandaei; identical to SEQ ID NO: 1160

SEQ ID NO: 8246 - DNA, 1152 bp, Tolypocladium inflatum; identical to SEQ ID NO: 1161
  CDS (1)..(1152)

SEQ ID NO: 8247 - protein, 383 aa, Tolypocladium inflatum; identical to SEQ ID NO: 1162

SEQ ID NO: 8248 - DNA, 1104 bp, Debaryomyces hansenii; identical to SEQ ID NO: 1163
  CDS (1)..(1104)

SEQ ID NO: 8249 - protein, 367 aa, Debaryomyces hansenii; identical to SEQ ID NO: 1164

SEQ ID NO: 8250 - DNA, 1128 bp, Debaryomyces hansenii; identical to SEQ ID NO: 1165
  CDS (1)..(1128)

SEQ ID NO: 8251 - protein, 375 aa, Debaryomyces hansenii; identical to SEQ ID NO: 1166

SEQ ID NO: 8252 - DNA, 1071 bp, Yarrowia lipolytica; identical to SEQ ID NO: 1167
  CDS (1)..(1071)

SEQ ID NO: 8253 - protein, 356 aa, Yarrowia lipolytica; identical to SEQ ID NO: 1168

SEQ ID NO: 8254 - DNA, 1188 bp, Kluyveromyces lactis; identical to SEQ ID NO: 1169
  CDS (1)..(1188)

SEQ ID NO: 8255 - protein, 395 aa, Kluyveromyces lactis; identical to SEQ ID NO: 1170

SEQ ID NO: 8256 - DNA, 1182 bp, Kluyveromyces lactis; identical to SEQ ID NO: 1171
  CDS (1)..(1182)

SEQ ID NO: 8257 - protein, 393 aa, Kluyveromyces lactis; identical to SEQ ID NO: 1172

SEQ ID NO: 8258 - DNA, 1161 bp, Candida glabrata; identical to SEQ ID NO: 1173
  CDS (1)..(1161)

SEQ ID NO: 8259 - protein, 386 aa, Candida glabrata; identical to SEQ ID NO: 1174

SEQ ID NO: 8260 - DNA, 1026 bp, Staphylococcus aureus subsp; identical to SEQ ID NO: 1175
  CDS (1)..(1026)

SEQ ID NO: 8261 - protein, 341 aa, Staphylococcus aureus subsp; identical to SEQ ID NO: 1176

SEQ ID NO: 8262 - DNA, 1008 bp, Photobacterium profundum; identical to SEQ ID NO: 1177
  CDS (1)..(1008)

SEQ ID NO: 8263 - protein, 335 aa, Photobacterium profundum; identical to SEQ ID NO: 1178

SEQ ID NO: 8264 - DNA, 1026 bp, Bdellovibrio bacteriovorus; identical to SEQ ID NO: 1179
  CDS (1)..(1026)

SEQ ID NO: 8265 - protein, 341 aa, Bdellovibrio bacteriovorus; identical to SEQ ID NO: 1180

SEQ ID NO: 8266 - DNA, 1101 bp, Rhodopseudomonas palustris; identical to SEQ ID NO: 1181
  CDS (1)..(1101)

SEQ ID NO: 8267 - protein, 366 aa, Rhodopseudomonas palustris; identical to SEQ ID NO: 1182

SEQ ID NO: 8268 - DNA, 1083 bp, Rhodopseudomonas palustris; identical to SEQ ID NO: 1183
  CDS (1)..(1083)

SEQ ID NO: 8269 - protein, 360 aa, Rhodopseudomonas palustris; identical to SEQ ID NO: 1184

SEQ ID NO: 8270 - DNA, 1855 bp, Mus musculus; identical to SEQ ID NO: 1185
  CDS (128)..(1330)

SEQ ID NO: 8271 - protein, 400 aa, Mus musculus; identical to SEQ ID NO: 1186

SEQ ID NO: 8272 - DNA, 1080 bp, Listeria monocytogenes; identical to SEQ ID NO: 1187
  CDS (1)..(1080)

SEQ ID NO: 8273 - protein, 359 aa, Listeria monocytogenes; identical to SEQ ID NO: 1188

SEQ ID NO: 8274 - DNA, 1023 bp, Desulfovibrio vulgaris; identical to SEQ ID NO: 1189
  CDS (1)..(1023)

SEQ ID NO: 8275 - protein, 340 aa, Desulfovibrio vulgaris; identical to SEQ ID NO: 1190

SEQ ID NO: 8276 - DNA, 1023 bp, Thermus thermophilus; identical to SEQ ID NO: 1191
  CDS (1)..(1023)

SEQ ID NO: 8277 - protein, 340 aa, Thermus thermophilus; identical to SEQ ID NO: 1192

SEQ ID NO: 8278 - DNA, 1053 bp, Wolbachia pipientis wMel; identical to SEQ ID NO: 1193
  CDS (1)..(1053)

SEQ ID NO: 8279 - protein, 350 aa, Wolbachia pipientis wMel; identical to SEQ ID NO: 1194

SEQ ID NO: 8280 - DNA, 1050 bp, Wolbachia pipientis wMel; identical to SEQ ID NO: 1195
  CDS (1)..(1050)

SEQ ID NO: 8281 - protein, 349 aa, Wolbachia pipientis wMel; identical to SEQ ID NO: 1196

SEQ ID NO: 8282 - DNA, 1056 bp, Treponema denticola; identical to SEQ ID NO: 1197
  CDS (1)..(1056)

SEQ ID NO: 8283 - protein, 351 aa, Treponema denticola; identical to SEQ ID NO: 1198

SEQ ID NO: 8284 - DNA, 1056 bp, Geobacter sulfurreducens; identical to SEQ ID NO: 1199
  CDS (1)..(1056)

SEQ ID NO: 8285 - protein, 351 aa, Geobacter sulfurreducens; identical to SEQ ID NO: 1200

SEQ ID NO: 8286 - DNA, 1047 bp, Geobacter sulfurreducens; identical to SEQ ID NO: 1201
  CDS (1)..(1047)

SEQ ID NO: 8287 - protein, 348 aa, Geobacter sulfurreducens; identical to SEQ ID NO: 1202

SEQ ID NO: 8288 - DNA, 1056 bp, Yersinia pestis; identical to SEQ ID NO: 1203
  CDS (1)..(1056)

SEQ ID NO: 8289 - protein, 351 aa, Yersinia pestis; identical to SEQ ID NO: 1204

SEQ ID NO: 8290 - DNA, 1140 bp, Ashbya gossypii; identical to SEQ ID NO: 1205
  CDS (1)..(1140)

SEQ ID NO: 8291 - protein, 379 aa, Ashbya gossypii; identical to SEQ ID NO: 1206

SEQ ID NO: 8292 - DNA, 1008 bp, Vibrio vulnificus; identical to SEQ ID NO: 1207
  CDS (1)..(1008)

SEQ ID NO: 8293 - protein, 335 aa, Vibrio vulnificus; identical to SEQ ID NO: 1208

SEQ ID NO: 8294 - DNA, 1038 bp, Porphyromonas gingivalis; identical to SEQ ID NO: 1209
  CDS (1)..(1038)

SEQ ID NO: 8295 - protein, 345 aa, Porphyromonas gingivalis; identical to SEQ ID NO: 1210

SEQ ID NO: 8296 - DNA, 1035 bp, Gloeobacter violaceus; identical to SEQ ID NO: 1211
  CDS (1)..(1035)

SEQ ID NO: 8297 - protein, 344 aa, Gloeobacter violaceus; identical to SEQ ID NO: 1212

SEQ ID NO: 8298 - DNA, 1029 bp, Chromobacterium violaceum; identical to SEQ ID NO: 1213
  CDS (1)..(1029)

SEQ ID NO: 8299 - protein, 342 aa, Chromobacterium violaceum; identical to SEQ ID NO: 1214

SEQ ID NO: 8300 - DNA, 1047 bp, Fusobacterium nucleatum subsp; identical to SEQ ID NO: 1215
  CDS (1)..(1047)

SEQ ID NO: 8301 - protein, 348 aa, Fusobacterium nucleatum subsp; identical to SEQ ID NO: 1216

SEQ ID NO: 8302 - DNA, 1083 bp, Neurospora crassa; identical to SEQ ID NO: 1217
  CDS (1)..(1083)

SEQ ID NO: 8303 - protein, 360 aa, Neurospora crassa; identical to SEQ ID NO: 1218

SEQ ID NO: 8304 - DNA, 1020 bp, Bordetella pertussis; identical to SEQ ID NO: 1219
  CDS (1)..(1020)

SEQ ID NO: 8305 - protein, 339 aa, Bordetella pertussis; identical to SEQ ID NO: 1220

SEQ ID NO: 8306 - DNA, 1376 bp, Oryza sativa; identical to SEQ ID NO: 1221
  CDS (115)..(1233)

SEQ ID NO: 8307 - protein, 372 aa, Oryza sativa; identical to SEQ ID NO: 1222

SEQ ID NO: 8308 - DNA, 1242 bp, Streptomyces avermitilis; identical to SEQ ID NO: 1223
  CDS (1)..(1242)

SEQ ID NO: 8309 - protein, 413 aa, Streptomyces avermitilis; identical to SEQ ID NO: 1224

SEQ ID NO: 8310 - DNA, 1071 bp, Streptomyces avermitilis; identical to SEQ ID NO: 1225
  CDS (1)..(1071)

SEQ ID NO: 8311 - protein, 356 aa, Streptomyces avermitilis; identical to SEQ ID NO: 1226

SEQ ID NO: 8312 - DNA, 1005 bp, Vibrio parahaemolyticus; identical to SEQ ID NO: 1227
  CDS (1)..(1005)

SEQ ID NO: 8313 - protein, 334 aa, Vibrio parahaemolyticus; identical to SEQ ID NO: 1228

SEQ ID NO: 8314 - DNA, 1077 bp, Vibrio parahaemolyticus; identical to SEQ ID NO: 1229
  CDS (1)..(1077)

SEQ ID NO: 8315 - protein, 358 aa, Vibrio parahaemolyticus; identical to SEQ ID NO: 1230

SEQ ID NO: 8316 - DNA, 1005 bp, Pseudomonas syringae; identical to SEQ ID NO: 1231
  CDS (1)..(1005)

SEQ ID NO: 8317 - protein, 334 aa, Pseudomonas syringae; identical to SEQ ID NO: 1232

SEQ ID NO: 8318 - DNA, 1041 bp, Pseudomonas syringae; identical to SEQ ID NO: 1233
  CDS (1)..(1041)

SEQ ID NO: 8319 - protein, 346 aa, Pseudomonas syringae; identical to SEQ ID NO: 1234

SEQ ID NO: 8320 - DNA, 1041 bp, Pseudomonas putida; identical to SEQ ID NO: 1235
  CDS (1)..(1041)

SEQ ID NO: 8321 - protein, 346 aa, Pseudomonas putida; identical to SEQ ID NO: 1236

SEQ ID NO: 8322 - DNA, 1026 bp, Clostridium tetani; identical to SEQ ID NO: 1237
  CDS (1)..(1026)

SEQ ID NO: 8323 - protein, 341 aa, Clostridium tetani; identical to SEQ ID NO: 1238

SEQ ID NO: 8324 - DNA, 1083 bp, Bradyrhizobium japonicum; identical to SEQ ID NO: 1239
  CDS (1)..(1083)

SEQ ID NO: 8325 - protein, 360 aa, Bradyrhizobium japonicum; identical to SEQ ID NO: 1240

SEQ ID NO: 8326 - DNA, 1044 bp, Bradyrhizobium japonicum; identical to SEQ ID NO: 1241
  CDS (1)..(1044)

SEQ ID NO: 8327 - protein, 347 aa, Bradyrhizobium japonicum; identical to SEQ ID NO: 1242

SEQ ID NO: 8328 - DNA, 1014 bp, Bacteroides thetaiotaomicron; identical to SEQ ID NO: 1243
  CDS (1)..(1014)

SEQ ID NO: 8329 - protein, 337 aa, Bacteroides thetaiotaomicron; identical to SEQ ID NO: 1244

SEQ ID NO: 8330 - DNA, 1077 bp, Vibrio vulnificus; identical to SEQ ID NO: 1245
  CDS (1)..(1077)

SEQ ID NO: 8331 - protein, 358 aa, Vibrio vulnificus; identical to SEQ ID NO: 1246

SEQ ID NO: 8332 - DNA, 1026 bp, Streptococcus agalactiae; identical to SEQ ID NO: 1247
  CDS (1)..(1026)

SEQ ID NO: 8333 - protein, 341 aa, Streptococcus agalactiae; identical to SEQ ID NO: 1248

SEQ ID NO: 8334 - DNA, 1014 bp, Shewanella oneidensis; identical to SEQ ID NO: 1249
  CDS (1)..(1014)

SEQ ID NO: 8335 - protein, 337 aa, Shewanella oneidensis; identical to SEQ ID NO: 1250

SEQ ID NO: 8336 - DNA, 1002 bp, Escherichia coli O6; identical to SEQ ID NO: 1251
  CDS (1)..(1002)

SEQ ID NO: 8337 - protein, 333 aa, Escherichia coli O6; identical to SEQ ID NO: 1252

SEQ ID NO: 8338 - DNA, 1026 bp, Bifidobacterium longum; identical to SEQ ID NO: 1253
  CDS (1)..(1026)

SEQ ID NO: 8339 - protein, 341 aa, Bifidobacterium longum; identical to SEQ ID NO: 1254

SEQ ID NO: 8340 - DNA, 1116 bp, Rhizobium loti; identical to SEQ ID NO: 1255
  CDS (1)..(1116)

SEQ ID NO: 8341 - protein, 371 aa, Rhizobium loti; identical to SEQ ID NO: 1256

SEQ ID NO: 8342 - DNA, 1074 bp, Xanthomonas campestris; identical to SEQ ID NO: 1257
  CDS (1)..(1074)

SEQ ID NO: 8343 - protein, 357 aa, Xanthomonas campestris; identical to SEQ ID NO: 1258

SEQ ID NO: 8344 - DNA, 1065 bp, Xanthomonas axonopodis; identical to SEQ ID NO: 1259
  CDS (1)..(1065)

SEQ ID NO: 8345 - protein, 354 aa, Xanthomonas axonopodis; identical to SEQ ID NO: 1260

SEQ ID NO: 8346 - DNA, 1041 bp, Thermoanaerobacter tengcongensis; identical to SEQ ID NO: 1261
  CDS (1)..(1041)

SEQ ID NO: 8347 - protein, 346 aa, Thermoanaerobacter tengcongensis; identical to SEQ ID NO: 1262

SEQ ID NO: 8348 - DNA, 1023 bp, Fusobacterium nucleatum; identical to SEQ ID NO: 1263
  CDS (1)..(1023)

SEQ ID NO: 8349 - protein, 340 aa, Fusobacterium nucleatum; identical to SEQ ID NO: 1264

SEQ ID NO: 8350 - DNA, 1533 bp, Arabidopsis thaliana; identical to SEQ ID NO: 1265
  CDS (303)..(1379)

SEQ ID NO: 8351 - protein, 358 aa, Arabidopsis thaliana; identical to SEQ ID NO: 1266

SEQ ID NO: 8352 - DNA, 1098 bp, Ralstonia solanacearum; identical to SEQ ID NO: 1267
  CDS (1)..(1098)

SEQ ID NO: 8353 - protein, 365 aa, Ralstonia solanacearum; identical to SEQ ID NO: 1268

SEQ ID NO: 8354 - DNA, 1038 bp, Ralstonia solanacearum; identical to SEQ ID NO: 1269
  CDS (1)..(1038)

SEQ ID NO: 8355 - protein, 345 aa, Ralstonia solanacearum; identical to SEQ ID NO: 1270

SEQ ID NO: 8356 - DNA, 1002 bp, Salmonella typhimurium; identical to SEQ ID NO: 1271
  CDS (1)..(1002)

SEQ ID NO: 8357 - protein, 333 aa, Salmonella typhimurium; identical to SEQ ID NO: 1272

SEQ ID NO: 8358 - DNA, 1047 bp, Rhizobium meliloti; identical to SEQ ID NO: 1273
  CDS (1)..(1047)

SEQ ID NO: 8359 - protein, 348 aa, Rhizobium meliloti; identical to SEQ ID NO: 1274

SEQ ID NO: 8360 - DNA, 1092 bp, Rhizobium loti; identical to SEQ ID NO: 1275
  CDS (1)..(1092)

SEQ ID NO: 8361 - protein, 363 aa, Rhizobium loti; identical to SEQ ID NO: 1276

SEQ ID NO: 8362 - DNA, 1313 bp, Arabidopsis thaliana; identical to SEQ ID NO: 1277
  CDS (91)..(1158)

SEQ ID NO: 8363 - protein, 355 aa, Arabidopsis thaliana; identical to SEQ ID NO: 1278

SEQ ID NO: 8364 - DNA, 1059 bp, Arabidopsis thaliana; identical to SEQ ID NO: 1279
  CDS (1)..(1059)

SEQ ID NO: 8365 - protein, 352 aa, Arabidopsis thaliana; identical to SEQ ID NO: 1280

SEQ ID NO: 8366 - DNA, 1071 bp, Streptomyces coelicolor; identical to SEQ ID NO: 1281
  CDS (1)..(1071)

SEQ ID NO: 8367 - protein, 356 aa, Streptomyces coelicolor; identical to SEQ ID NO: 1282

SEQ ID NO: 8368 - DNA, 1113 bp, Arabidopsis thaliana; identical to SEQ ID NO: 1283
  CDS (1)..(1113)

SEQ ID NO: 8369 - protein, 370 aa, Arabidopsis thaliana; identical to SEQ ID NO: 1284

SEQ ID NO: 8370 - DNA, 1327 bp, Drosophila melanogaster; identical to SEQ ID NO: 1285
  CDS (79)..(1230)

SEQ ID NO: 8371 - protein, 383 aa, Drosophila melanogaster; identical to SEQ ID NO: 1286

SEQ ID NO: 8372 - DNA, 1014 bp, Zymomonas mobilis; identical to SEQ ID NO: 1287
  CDS (1)..(1014)

SEQ ID NO: 8373 - protein, 337 aa, Zymomonas mobilis; identical to SEQ ID NO: 1288

SEQ ID NO: 8374 - DNA, 1149 bp, Ashbya gossypii; identical to SEQ ID NO: 1289
  CDS (1)..(1149)

SEQ ID NO: 8375 - protein, 382 aa, Ashbya gossypii; identical to SEQ ID NO: 1290

SEQ ID NO: 8376 - DNA, 1530 bp, Candida albicans; identical to SEQ ID NO: 1291
  CDS (117)..(1241)

SEQ ID NO: 8377 - protein, 374 aa, Candida albicans; identical to SEQ ID NO: 1292

SEQ ID NO: 8378 - DNA, 1041 bp, Pseudomonas sp; identical to SEQ ID NO: 1293
  CDS (1)..(1041)

SEQ ID NO: 8379 - protein, 346 aa, Pseudomonas sp; identical to SEQ ID NO: 1294

SEQ ID NO: 8380 - DNA, 1170 bp, Cochliobolus carbonum; identical to SEQ ID NO: 1295
  CDS (1)..(1170)

SEQ ID NO: 8381 - protein, 389 aa, Cochliobolus carbonum; identical to SEQ ID NO: 1296

SEQ ID NO: 8382 - DNA, 25 bp, Artificial sequence
  Primer sequence
atgactgaattcgaattgcctccaa

SEQ ID NO: 8383 - DNA, 26 bp, Artificial sequence
  Primer sequence
tcagtatttgtaggtttttatttcgc

SEQ ID NO: 8384 - DNA, 2772 bp, Saccharomyces cerevisiae; identical to SEQ ID NO: 2477
  CDS (1)..(2772)

SEQ ID NO: 8385 - protein, 923 aa, Saccharomyces cerevisiae; identical to SEQ ID NO: 2478

SEQ ID NO: 8386 - DNA, 2296 bp, Rattus norvegicus (Norway rat); identical to SEQ ID NO: 2479
  CDS (63)..(2039)

SEQ ID NO: 8387 - protein, 658 aa, Rattus norvegicus (Norway rat); identical to SEQ ID NO: 2480

SEQ ID NO: 8388 - DNA, 2255 bp, Homo sapiens (man); identical to SEQ ID NO: 2481
  CDS (102)..(2078)

SEQ ID NO: 8389 - protein, 658 aa, Homo sapiens (man); identical to SEQ ID NO: 2482

SEQ ID NO: 8390 - DNA, 4377 bp, Rattus norvegicus (Norway rat); identical to SEQ ID NO: 2483
  CDS (103)..(2424)

SEQ ID NO: 8391 - protein, 773 aa, Rattus norvegicus (Norway rat); identical to SEQ ID NO: 2484

SEQ ID NO: 8392 - DNA, 2300 bp, Mus musculus (house mouse); identical to SEQ ID NO: 2485
  CDS (69)..(2045)

SEQ ID NO: 8393 - protein, 658 aa, Mus musculus (house mouse); identical to SEQ ID NO: 2486

SEQ ID NO: 8394 - DNA, 2013 bp, Saccharomyces cerevisiae; identical to SEQ ID NO: 2487
  CDS (1)..(2013)

SEQ ID NO: 8395 - protein, 670 aa, Saccharomyces cerevisiae; identical to SEQ ID NO: 2488

SEQ ID NO: 8396 - DNA, 2064 bp, Saccharomyces cerevisiae; identical to SEQ ID NO: 2489
  CDS (1)..(2064)

SEQ ID NO: 8397 - protein, 687 aa, Saccharomyces cerevisiae; identical to SEQ ID NO: 2490

SEQ ID NO: 8398 - DNA, 1941 bp, Caenorhabditis elegans; identical to SEQ ID NO: 2491
  CDS (1)..(1941)

SEQ ID NO: 8399 - protein, 646 aa, Caenorhabditis elegans; identical to SEQ ID NO: 2492

SEQ ID NO: 8400 - DNA, 2415 bp, Emericella nidulans; identical to SEQ ID NO: 2493
  CDS (1)..(2415)

SEQ ID NO: 8401 - protein, 804 aa, Emericella nidulans; identical to SEQ ID NO: 2494

SEQ ID NO: 8402 - DNA, 2601 bp, Debaryomyces hansenii; identical to SEQ ID NO: 2495
  CDS (1)..(2601)

SEQ ID NO: 8403 - protein, 866 aa, Debaryomyces hansenii; identical to SEQ ID NO: 2496

SEQ ID NO: 8404 - DNA, 1899 bp, Debaryomyces hansenii; identical to SEQ ID NO: 2497
  CDS (1)..(1899)

SEQ ID NO: 8405 - protein, 632 aa, Debaryomyces hansenii; identical to SEQ ID NO: 2498

SEQ ID NO: 8406 - DNA, 2259 bp, Debaryomyces hansenii; identical to SEQ ID NO: 2499
  CDS (1)..(2259)

SEQ ID NO: 8407 - protein, 752 aa, Debaryomyces hansenii; identical to SEQ ID NO: 2500

SEQ ID NO: 8408 - DNA, 2244 bp, Yarrowia lipolytica; identical to SEQ ID NO: 2501
  CDS (1)..(2244)

SEQ ID NO: 8409 - protein, 747 aa, Yarrowia lipolytica; identical to SEQ ID NO: 2502

SEQ ID NO: 8410 - DNA, 2598 bp, Kluyveromyces lactis; identical to SEQ ID NO: 2503
  CDS (1)..(2598)

SEQ ID NO: 8411 - protein, 865 aa, Kluyveromyces lactis; identical to SEQ ID NO: 2504

SEQ ID NO: 8412 - DNA, 2079 bp, Kluyveromyces lactis; identical to SEQ ID NO: 2505
  CDS (1)..(2079)

SEQ ID NO: 8413 - protein, 692 aa, Kluyveromyces lactis; identical to SEQ ID NO: 2506

SEQ ID NO: 8414 - DNA, 2034 bp, Kluyveromyces lactis; identical to SEQ ID NO: 2507
  CDS (1)..(2034)

SEQ ID NO: 8415 - protein, 677 aa, Kluyveromyces lactis; identical to SEQ ID NO: 2508

SEQ ID NO: 8416 - DNA, 1989 bp, Candida glabrata; identical to SEQ ID NO: 2509
  CDS (1)..(1989)

SEQ ID NO: 8417 - protein, 662 aa, Candida glabrata; identical to SEQ ID NO: 2510

SEQ ID NO: 8418 - DNA, 2856 bp, Candida glabrata; identical to SEQ ID NO: 2511
  CDS (1)..(2856)

SEQ ID NO: 8419 - protein, 951 aa, Candida glabrata; identical to SEQ ID NO: 2512

SEQ ID NO: 8420 - DNA, 2052 bp, Ashbya gossypii; identical to SEQ ID NO: 2513
  CDS (1)..(2052)

SEQ ID NO: 8421 - protein, 683 aa, Ashbya gossypii; identical to SEQ ID NO: 2514

SEQ ID NO: 8422 - DNA, 2535 bp, Ashbya gossypii; identical to SEQ ID NO: 2515
  CDS (1)..(2535)

SEQ ID NO: 8423 - protein, 844 aa, Ashbya gossypii; identical to SEQ ID NO: 2516

SEQ ID NO: 8424 - DNA, 1830 bp, Neurospora crassa; identical to SEQ ID NO: 2517
  CDS (1)..(1830)

SEQ ID NO: 8425 - protein, 609 aa, Neurospora crassa; identical to SEQ ID NO: 2518

SEQ ID NO: 8426 - DNA, 2388 bp, Candida albicans; identical to SEQ ID NO: 2519
  CDS (1)..(2388)

SEQ ID NO: 8427 - protein, 795 aa, Candida albicans; identical to SEQ ID NO: 2520

SEQ ID NO: 8428 - DNA, 2418 bp, Aspergillus fumigatus; identical to SEQ ID NO: 2521
  CDS (1)..(2418)

SEQ ID NO: 8429 - protein, 805 aa, Aspergillus fumigatus; identical to SEQ ID NO: 2522

SEQ ID NO: 8430 - DNA, 2757 bp, Neurospora crassa; identical to SEQ ID NO: 2523
  CDS (1)..(2757)

SEQ ID NO: 8431 - protein, 918 aa, Neurospora crassa; identical to SEQ ID NO: 2524

SEQ ID NO: 8432 - DNA, 2239 bp, Drosophila melanogaster; identical to SEQ ID NO: 2525
  CDS (76)..(2079)

SEQ ID NO: 8433 - protein, 667 aa, Drosophila melanogaster; identical to SEQ ID NO: 2526

SEQ ID NO: 8434 - DNA, 3100 bp, Saccharomyces cerevisiae; identical to SEQ ID NO: 2527
  CDS (821)..(2887)

SEQ ID NO: 8435 - protein, 688 aa, Saccharomyces cerevisiae; identical to SEQ ID NO: 2528

SEQ ID NO: 8436 - DNA, 2266 bp, Xenopus tropicalis; identical to SEQ ID NO: 2529
  CDS (36)..(2012)

SEQ ID NO: 8437 - protein, 658 aa, Xenopus tropicalis; identical to SEQ ID NO: 2530

SEQ ID NO: 8438 - DNA, 25 bp, Artificial sequence
  Primer sequence
atgtcaagcggcagtactattgttt

SEQ ID NO: 8439 - DNA, 25 bp, Artificial sequence
  Primer sequence
ttattgatctaaggtcgccaccttt

SEQ ID NO: 8440 - DNA, 1390 bp, Saccharomyces cerevisiae; identical to SEQ ID NO: 531
  CDS (303)..(1118)

SEQ ID NO: 8441 - protein, 271 aa, Saccharomyces cerevisiae; identical to SEQ ID NO: 532

SEQ ID NO: 8442 - DNA, 714 bp, Deinococcus radiodurans; identical to SEQ ID NO: 533
  CDS (1)..(714)

SEQ ID NO: 8443 - protein, 237 aa, Deinococcus radiodurans; identical to SEQ ID NO: 534

SEQ ID NO: 8444 - DNA, 1350 bp, Nostoc sp. PCC 7120; identical to SEQ ID NO: 535
  CDS (1)..(1350)

SEQ ID NO: 8445 - protein, 449 aa, Nostoc sp. PCC 7120; identical to SEQ ID NO: 536

SEQ ID NO: 8446 - DNA, 636 bp, Listeria monocytogenes; identical to SEQ ID NO: 537
  CDS (1)..(636)

SEQ ID NO: 8447 - protein, 211 aa, Listeria monocytogenes; identical to SEQ ID NO: 538

SEQ ID NO: 8448 - DNA, 636 bp, Listeria innocua; identical to SEQ ID NO: 539
  CDS (1)..(636)

SEQ ID NO: 8449 - protein, 211 aa, Listeria innocua; identical to SEQ ID NO: 540

SEQ ID NO: 8450 - DNA, 654 bp, Brucella melitensis; identical to SEQ ID NO: 541
  CDS (1)..(654)

SEQ ID NO: 8451 - protein, 217 aa, Brucella melitensis; identical to SEQ ID NO: 542

SEQ ID NO: 8452 - DNA, 813 bp, Nostoc sp. PCC 7120; identical to SEQ ID NO: 543
  CDS (1)..(813)

SEQ ID NO: 8453 - protein, 270 aa, Nostoc sp. PCC 7120; identical to SEQ ID NO: 544

SEQ ID NO: 8454 - DNA, 615 bp, Deinococcus radiodurans; identical to SEQ ID NO: 545
  CDS (1)..(615)

SEQ ID NO: 8455 - protein, 204 aa, Deinococcus radiodurans; identical to SEQ ID NO: 546

SEQ ID NO: 8456 - DNA, 714 bp, Caulobacter crescentus; identical to SEQ ID NO: 547
  CDS (1)..(714)

SEQ ID NO: 8457 - protein, 237 aa, Caulobacter crescentus; identical to SEQ ID NO: 548

SEQ ID NO: 8458 - DNA, 756 bp, Treponema pallidum subsp. pallidum (syphilis spirochete); identical to SEQ ID NO: 549
  CDS (1)..(756)

SEQ ID NO: 8459 - protein, 251 aa, Treponema pallidum subsp. pallidum (syphilis spirochete); identical to SEQ ID NO: 550

SEQ ID NO: 8460 - DNA, 645 bp, Xylella fastidiosa; identical to SEQ ID NO: 551
  CDS (1)..(645)

SEQ ID NO: 8461 - protein, 214 aa, Xylella fastidiosa; identical to SEQ ID NO: 552

SEQ ID NO: 8462 - DNA, 2034 bp, Arabidopsis thaliana (mouse-ear cress); identical to SEQ ID NO: 553
  CDS (1)..(2034)

SEQ ID NO: 8463 - protein, 677 aa, Arabidopsis thaliana (mouse-ear cress); identical to SEQ ID NO: 554

SEQ ID NO: 8464 - DNA, 582 bp, Bacillus subtilis; identical to SEQ ID NO: 555
  CDS (1)..(582)

SEQ ID NO: 8465 - protein, 193 aa, Bacillus subtilis; identical to SEQ ID NO: 556

SEQ ID NO: 8466 - DNA, 606 bp, Thermotoga maritima; identical to SEQ ID NO: 557
  CDS (1)..(606)

SEQ ID NO: 8467 - protein, 201 aa, Thermotoga maritima; identical to SEQ ID NO: 558

SEQ ID NO: 8468 - DNA, 660 bp, Clostridium acetobutylicum; identical to SEQ ID NO: 559
  CDS (1)..(660)

SEQ ID NO: 8469 - protein, 219 aa, Clostridium acetobutylicum; identical to SEQ ID NO: 560

SEQ ID NO: 8470 - DNA, 744 bp, Saccharomyces cerevisiae; identical to SEQ ID NO: 561
  CDS (1)..(744)

SEQ ID NO: 8471 - protein, 247 aa, Saccharomyces cerevisiae; identical to SEQ ID NO: 562

SEQ ID NO: 8472 - DNA, 1050 bp, Synechocystis sp; identical to SEQ ID NO: 563
  CDS (1)..(1050)

SEQ ID NO: 8473 - protein, 349 aa, Synechocystis sp; identical to SEQ ID NO: 564

SEQ ID NO: 8474 - DNA, 875 bp, Arabidopsis thaliana (mouse-ear cress); identical to SEQ ID NO: 565
  CDS (30)..(722)

SEQ ID NO: 8475 - protein, 230 aa, Arabidopsis thaliana (mouse-ear cress); identical to SEQ ID NO: 566

SEQ ID NO: 8476 - DNA, 741 bp, Debaryomyces hansenii; identical to SEQ ID NO: 567
  CDS (1)..(741)

SEQ ID NO: 8477 - protein, 246 aa, Debaryomyces hansenii; identical to SEQ ID NO: 568

SEQ ID NO: 8478 - DNA, 741 bp, Yarrowia lipolytica; identical to SEQ ID NO: 569
  CDS (1)..(741)

SEQ ID NO: 8479 - protein, 246 aa, Yarrowia lipolytica; identical to SEQ ID NO: 570

SEQ ID NO: 8480 - DNA, 816 bp, Kluyveromyces lactis; identical to SEQ ID NO: 571
  CDS (1)..(816)

SEQ ID NO: 8481 - protein, 271 aa, Kluyveromyces lactis; identical to SEQ ID NO: 572

SEQ ID NO: 8482 - DNA, 687 bp, Kluyveromyces lactis; identical to SEQ ID NO: 573
  CDS (1)..(687)

SEQ ID NO: 8483 - protein, 228 aa, Kluyveromyces lactis; identical to SEQ ID NO: 574

SEQ ID NO: 8484 - DNA, 651 bp, Erwinia carotovora subsp; identical to SEQ ID NO: 575
  CDS (1)..(651)

SEQ ID NO: 8485 - protein, 216 aa, Erwinia carotovora subsp; identical to SEQ ID NO: 576

SEQ ID NO: 8486 - DNA, 840 bp, Candida glabrata; identical to SEQ ID NO: 577
  CDS (1)..(840)

SEQ ID NO: 8487 - protein, 279 aa, Candida glabrata; identical to SEQ ID NO: 578

SEQ ID NO: 8488 - DNA, 744 bp, Candida glabrata; identical to SEQ ID NO: 579
  CDS (1)..(744)

SEQ ID NO: 8489 - protein, 247 aa, Candida glabrata; identical to SEQ ID NO: 580

SEQ ID NO: 8490 - DNA, 621 bp, Bartonella quintana; identical to SEQ ID NO: 581
  CDS (1)..(621)

SEQ ID NO: 8491 - protein, 206 aa, Bartonella quintana; identical to SEQ ID NO: 582

SEQ ID NO: 8492 - DNA, 648 bp, Parachlamydia sp; identical to SEQ ID NO: 583
  CDS (1)..(648)

SEQ ID NO: 8493 - protein, 215 aa, Parachlamydia sp; identical to SEQ ID NO: 584

SEQ ID NO: 8494 - DNA, 636 bp, Listeria monocytogenes; identical to SEQ ID NO: 585
  CDS (1)..(636)

SEQ ID NO: 8495 - protein, 211 aa, Listeria monocytogenes; identical to SEQ ID NO: 586

SEQ ID NO: 8496 - DNA, 633 bp, Thermus thermophilus; identical to SEQ ID NO: 587
  CDS (1)..(633)

SEQ ID NO: 8497 - protein, 210 aa, Thermus thermophilus; identical to SEQ ID NO: 588

SEQ ID NO: 8498 - DNA, 654 bp, Mycobacterium paratuberculosis; identical to SEQ ID NO: 589
  CDS (1)..(654)

SEQ ID NO: 8499 - protein, 217 aa, Mycobacterium paratuberculosis; identical to SEQ ID NO: 590

SEQ ID NO: 8500 - DNA, 1134 bp, Mycobacterium paratuberculosis; identical to SEQ ID NO: 591
  CDS (1)..(1134)

SEQ ID NO: 8501 - protein, 377 aa, Mycobacterium paratuberculosis; identical to SEQ ID NO: 592

SEQ ID NO: 8502 - DNA, 627 bp, Lactobacillus johnsonii; identical to SEQ ID NO: 593
  CDS (1)..(627)

SEQ ID NO: 8503 - protein, 208 aa, Lactobacillus johnsonii; identical to SEQ ID NO: 594

SEQ ID NO: 8504 - DNA, 807 bp, Ashbya gossypii; identical to SEQ ID NO: 595
  CDS (1)..(807)

SEQ ID NO: 8505 - protein, 268 aa, Ashbya gossypii; identical to SEQ ID NO: 596

SEQ ID NO: 8506 - DNA, 687 bp, Mycobacterium tuberculosis; identical to SEQ ID NO: 597
  CDS (1)..(687)

SEQ ID NO: 8507 - protein, 228 aa, Mycobacterium tuberculosis; identical to SEQ ID NO: 598

SEQ ID NO: 8508 - DNA, 618 bp, Photorhabdus luminescens; identical to SEQ ID NO: 599
  CDS (1)..(618)

SEQ ID NO: 8509 - protein, 205 aa, Photorhabdus luminescens; identical to SEQ ID NO: 600

SEQ ID NO: 8510 - DNA, 588 bp, Anopheles gambiae str; identical to SEQ ID NO: 601
  CDS (1)..(588)

SEQ ID NO: 8511 - protein, 195 aa, Anopheles gambiae str; identical to SEQ ID NO: 602

SEQ ID NO: 8512 - DNA, 3762 bp, Neurospora crassa; identical to SEQ ID NO: 603
  CDS (1)..(3762)

SEQ ID NO: 8513 - protein, 1253 aa, Neurospora crassa; identical to SEQ ID NO: 604

SEQ ID NO: 8514 - DNA, 567 bp, Synechococcus sp; identical to SEQ ID NO: 605
  CDS (1)..(567)

SEQ ID NO: 8515 - protein, 188 aa, Synechococcus sp; identical to SEQ ID NO: 606

SEQ ID NO: 8516 - DNA, 612 bp, Rhodopirellula baltica; identical to SEQ ID NO: 607
  CDS (1)..(612)

SEQ ID NO: 8517 - protein, 203 aa, Rhodopirellula baltica; identical to SEQ ID NO: 608

SEQ ID NO: 8518 - DNA, 1329 bp, Prochlorococcus marinus subsp; identical to SEQ ID NO: 609
  CDS (1)..(1329)

SEQ ID NO: 8519 - protein, 442 aa, Prochlorococcus marinus subsp; identical to SEQ ID NO: 610

SEQ ID NO: 8520 - DNA, 1332 bp, Prochlorococcus marinus; identical to SEQ ID NO: 611
  CDS (1)..(1332)

SEQ ID NO: 8521 - protein, 443 aa, Prochlorococcus marinus; identical to SEQ ID NO: 612

SEQ ID NO: 8522 - DNA, 591 bp, Prochlorococcus marinus; identical to SEQ ID NO: 613
  CDS (1)..(591)

SEQ ID NO: 8523 - protein, 196 aa, Prochlorococcus marinus; identical to SEQ ID NO: 614

SEQ ID NO: 8524 - DNA, 618 bp, Streptomyces avermitilis; identical to SEQ ID NO: 615
  CDS (1)..(618)

SEQ ID NO: 8525 - protein, 205 aa, Streptomyces avermitilis; identical to SEQ ID NO: 616

SEQ ID NO: 8526 - DNA, 600 bp, Streptomyces avermitilis; identical to SEQ ID NO: 617
  CDS (1)..(600)

SEQ ID NO: 8527 - protein, 199 aa, Streptomyces avermitilis; identical to SEQ ID NO: 618

SEQ ID NO: 8528 - DNA, 612 bp, Streptomyces avermitilis; identical to SEQ ID NO: 619
  CDS (1)..(612)

SEQ ID NO: 8529 - protein, 203 aa, Streptomyces avermitilis; identical to SEQ ID NO: 620

SEQ ID NO: 8530 - DNA, 645 bp, Enterococcus faecalis; identical to SEQ ID NO: 621
  CDS (1)..(645)

SEQ ID NO: 8531 - protein, 214 aa, Enterococcus faecalis; identical to SEQ ID NO: 622

SEQ ID NO: 8532 - DNA, 666 bp, Lactobacillus plantarum; identical to SEQ ID NO: 623
  CDS (1)..(666)

SEQ ID NO: 8533 - protein, 221 aa, Lactobacillus plantarum; identical to SEQ ID NO: 624

SEQ ID NO: 8534 - DNA, 642 bp, Clostridium tetani; identical to SEQ ID NO: 625
  CDS (1)..(642)

SEQ ID NO: 8535 - protein, 213 aa, Clostridium tetani; identical to SEQ ID NO: 626

SEQ ID NO: 8536 - DNA, 600 bp, Bradyrhizobium japonicum; identical to SEQ ID NO: 627
  CDS (1)..(600)

SEQ ID NO: 8537 - protein, 199 aa, Bradyrhizobium japonicum; identical to SEQ ID NO: 628

SEQ ID NO: 8538 - DNA, 1407 bp, Synechococcus elongatus; identical to SEQ ID NO: 629
  CDS (1)..(1407)

SEQ ID NO: 8539 - protein, 468 aa, Synechococcus elongatus; identical to SEQ ID NO: 630

SEQ ID NO: 8540 - DNA, 582 bp, Oceanobacillus iheyensis; identical to SEQ ID NO: 631
  CDS (1)..(582)

SEQ ID NO: 8541 - protein, 193 aa, Oceanobacillus iheyensis; identical to SEQ ID NO: 632

SEQ ID NO: 8542 - DNA, 648 bp, Bifidobacterium longum; identical to SEQ ID NO: 633
  CDS (1)..(648)

SEQ ID NO: 8543 - protein, 215 aa, Bifidobacterium longum; identical to SEQ ID NO: 634

SEQ ID NO: 8544 - DNA, 1005 bp, Arabidopsis thaliana; identical to SEQ ID NO: 635
  CDS (1)..(1005)

SEQ ID NO: 8545 - protein, 334 aa, Arabidopsis thaliana; identical to SEQ ID NO: 636

SEQ ID NO: 8546 - DNA, 645 bp, Xanthomonas campestris; identical to SEQ ID NO: 637
  CDS (1)..(645)

SEQ ID NO: 8547 - protein, 214 aa, Xanthomonas campestris; identical to SEQ ID NO: 638

SEQ ID NO: 8548 - DNA, 645 bp, Xanthomonas axonopodis; identical to SEQ ID NO: 639
  CDS (1)..(645)

SEQ ID NO: 8549 - protein, 214 aa, Xanthomonas axonopodis; identical to SEQ ID NO: 640

SEQ ID NO: 8550 - DNA, 621 bp, Thermoanaerobacter tengcongensis; identical to SEQ ID NO: 641
  CDS (1)..(621)

SEQ ID NO: 8551 - protein, 206 aa, Thermoanaerobacter tengcongensis; identical to SEQ ID NO: 642

SEQ ID NO: 8552 - DNA, 582 bp, Rhizobium loti; identical to SEQ ID NO: 643
  CDS (1)..(582)

SEQ ID NO: 8553 - protein, 193 aa, Rhizobium loti; identical to SEQ ID NO: 644

SEQ ID NO: 8554 - DNA, 651 bp, Pasteurella multocida; identical to SEQ ID NO: 645
  CDS (1)..(651)

SEQ ID NO: 8555 - protein, 216 aa, Pasteurella multocida; identical to SEQ ID NO: 646

SEQ ID NO: 8556 - DNA, 597 bp, Streptomyces coelicolor; identical to SEQ ID NO: 647
  CDS (1)..(597)

SEQ ID NO: 8557 - protein, 198 aa, Streptomyces coelicolor; identical to SEQ ID NO: 648

SEQ ID NO: 8558 - DNA, 600 bp, Streptomyces coelicolor; identical to SEQ ID NO: 649
  CDS (1)..(600)

SEQ ID NO: 8559 - protein, 199 aa, Streptomyces coelicolor; identical to SEQ ID NO: 650

SEQ ID NO: 8560 - DNA, 660 bp, Gloeobacter violaceus; identical to SEQ ID NO: 651
  CDS (1)..(660)

SEQ ID NO: 8561 - protein, 219 aa, Gloeobacter violaceus; identical to SEQ ID NO: 652

SEQ ID NO: 8562 - DNA, 621 bp, Bartonella henselae; identical to SEQ ID NO: 653
  CDS (1)..(621)

SEQ ID NO: 8563 - protein, 206 aa, Bartonella henselae; identical to SEQ ID NO: 654

SEQ ID NO: 8564 - DNA, 681 bp, Parachlamydia sp; identical to SEQ ID NO: 655
  CDS (1)..(681)

SEQ ID NO: 8565 - protein, 226 aa, Parachlamydia sp; identical to SEQ ID NO: 656

SEQ ID NO: 8566 - DNA, 636 bp, Rhizobium meliloti; identical to SEQ ID NO: 657
  CDS (1)..(636)

SEQ ID NO: 8567 - protein, 211 aa, Rhizobium meliloti; identical to SEQ ID NO: 658

SEQ ID NO: 8568 - DNA, 648 bp, Escherichia coli O6; identical to SEQ ID NO: 659
  CDS (1)..(648)

SEQ ID NO: 8569 - protein, 215 aa, Escherichia coli O6; identical to SEQ ID NO: 660

SEQ ID NO: 8570 - DNA, 648 bp, Photorhabdus luminescens; identical to SEQ ID NO: 661
  CDS (1)..(648)

SEQ ID NO: 8571 - protein, 215 aa, Photorhabdus luminescens; identical to SEQ ID NO: 662

SEQ ID NO: 8572 - DNA, 648 bp, Salmonella typhimurium; identical to SEQ ID NO: 663
  CDS (1)..(648)

SEQ ID NO: 8573 - protein, 215 aa, Salmonella typhimurium; identical to SEQ ID NO: 664

SEQ ID NO: 8574 - DNA, 22 bp, Artificial sequence
  Primer sequence
atgccttcgctaacccccagat

SEQ ID NO: 8575 - DNA, 23 bp, Artificial sequence
  Primer sequence
ttacacatcgccatgctgggatt

SEQ ID NO: 8576 - DNA, 1239 bp, Saccharomyces cerevisiae; identical to SEQ ID NO: 5653
  CDS (1)..(1239)

SEQ ID NO: 8577 - protein, 412 aa, Saccharomyces cerevisiae; identical to SEQ ID NO: 5654

SEQ ID NO: 8578 - DNA, 1719 bp, Rattus norvegicus (Norway rat); identical to SEQ ID NO: 5655
  CDS (30)..(1274)

SEQ ID NO: 8579 - protein, 414 aa, Rattus norvegicus (Norway rat); identical to SEQ ID NO: 5656

SEQ ID NO: 8580 - DNA, 1212 bp, Caulobacter crescentus; identical to SEQ ID NO: 5657
  CDS (1)..(1212)

SEQ ID NO: 8581 - protein, 403 aa, Caulobacter crescentus; identical to SEQ ID NO: 5658

SEQ ID NO: 8582 - DNA, 1551 bp, Arabidopsis thaliana (mouse-ear cress); identical to SEQ ID NO: 5659
  CDS (21)..(1271)

SEQ ID NO: 8583 - protein, 416 aa, Arabidopsis thaliana (mouse-ear cress); identical to SEQ ID NO: 5660

SEQ ID NO: 8584 - DNA, 1368 bp, Agrobacterium tumefaciens; identical to SEQ ID NO: 5661
  CDS (1)..(1368)

SEQ ID NO: 8585 - protein, 455 aa, Agrobacterium tumefaciens; identical to SEQ ID NO: 5662

SEQ ID NO: 8586 - DNA, 1230 bp, Mycobacterium tuberculosis; identical to SEQ ID NO: 5663
  CDS (1)..(1230)

SEQ ID NO: 8587 - protein, 409 aa, Mycobacterium tuberculosis; identical to SEQ ID NO: 5664

SEQ ID NO: 8588 - DNA, 1608 bp, Saccharomyces cerevisiae; identical to SEQ ID NO: 5665
  CDS (111)..(1397)

SEQ ID NO: 8589 - protein, 428 aa, Saccharomyces cerevisiae; identical to SEQ ID NO: 5666

SEQ ID NO: 8590 - DNA, 1242 bp, Sulfolobus solfataricus; identical to SEQ ID NO: 5667
  CDS (1)..(1242)

SEQ ID NO: 8591 - protein, 413 aa, Sulfolobus solfataricus; identical to SEQ ID NO: 5668

SEQ ID NO: 8592 - DNA, 1200 bp, Thermotoga maritima; identical to SEQ ID NO: 5669
  CDS (1)..(1200)

SEQ ID NO: 8593 - protein, 399 aa, Thermotoga maritima; identical to SEQ ID NO: 5670

SEQ ID NO: 8594 - DNA, 1221 bp, Sphingomonas yanoikuyae; identical to SEQ ID NO: 5671
  CDS (1)..(1221)

SEQ ID NO: 8595 - protein, 406 aa, Sphingomonas yanoikuyae; identical to SEQ ID NO: 5672

SEQ ID NO: 8596 - DNA, 1740 bp, Bos primigenius taurus (cattle); identical to SEQ ID NO: 5673
  CDS (67)..(1425)

SEQ ID NO: 8597 - protein, 452 aa, Bos primigenius taurus (cattle); identical to SEQ ID NO: 5674

SEQ ID NO: 8598 - DNA, 1569 bp, Solanum tuberosum (potato); identical to SEQ ID NO: 5675
  CDS (69)..(1319)

SEQ ID NO: 8599 - protein, 416 aa, Solanum tuberosum (potato); identical to SEQ ID NO: 5676

SEQ ID NO: 8600 - DNA, 1850 bp, Saccharomyces cerevisiae; identical to SEQ ID NO: 5677
  CDS (461)..(1723)

SEQ ID NO: 8601 - protein, 420 aa, Saccharomyces cerevisiae; identical to SEQ ID NO: 5678

SEQ ID NO: 8602 - DNA, 1584 bp, Nicotiana tabacum (common tobacco); identical to SEQ ID NO: 5679
  CDS (85)..(1332)

SEQ ID NO: 8603 - protein, 415 aa, Nicotiana tabacum (common tobacco); identical to SEQ ID NO: 5680

SEQ ID NO: 8604 - DNA, 1722 bp, Nicotiana tabacum (common tobacco); identical to SEQ ID NO: 5681
  CDS (76)..(1524)

SEQ ID NO: 8605 - protein, 482 aa, Nicotiana tabacum (common tobacco); identical to SEQ ID NO: 5682

SEQ ID NO: 8606 - DNA, 1308 bp, Caenorhabditis elegans; identical to SEQ ID NO: 5683
  CDS (1)..(1308)

SEQ ID NO: 8607 - protein, 435 aa, Caenorhabditis elegans; identical to SEQ ID NO: 5684

SEQ ID NO: 8608 - DNA, 1239 bp, Caenorhabditis elegans; identical to SEQ ID NO: 5685
  CDS (1)..(1239)

SEQ ID NO: 8609 - protein, 412 aa, Caenorhabditis elegans; identical to SEQ ID NO: 5686

SEQ ID NO: 8610 - DNA, 1257 bp, Schizosaccharomyces pombe; identical to SEQ ID NO: 5687
  CDS (1)..(1257)

SEQ ID NO: 8611 - protein, 418 aa, Schizosaccharomyces pombe; identical to SEQ ID NO: 5688

SEQ ID NO: 8612 - DNA, 1827 bp, Glycine max; identical to SEQ ID NO: 5689
  CDS (289)..(1539)

SEQ ID NO: 8613 - protein, 416 aa, Glycine max; identical to SEQ ID NO: 5690

SEQ ID NO: 8614 - DNA, 1645 bp, Eucalyptus globulus; identical to SEQ ID NO: 5691
  CDS (161)..(1411)

SEQ ID NO: 8615 - protein, 416 aa, Eucalyptus globulus; identical to SEQ ID NO: 5692

SEQ ID NO: 8616 - DNA, 1596 bp, Homo sapiens; identical to SEQ ID NO: 5693
  CDS (44)..(1303)

SEQ ID NO: 8617 - protein, 419 aa, Homo sapiens [sequence omitted]

SEQ ID NO: 8618 - DNA, 1233 bp, Debaryomyces hansenii; identical to SEQ ID NO: 5695
  CDS (1)..(1233)

SEQ ID NO: 8619 - protein, 410 aa, Debaryomyces hansenii; identical to SEQ ID NO: 5696

SEQ ID NO: 8620 - DNA, 1296 bp, Debaryomyces hansenii; identical to SEQ ID NO: 5697
  CDS (1)..(1296)

SEQ ID NO: 8621 - protein, 431 aa, Debaryomyces hansenii; identical to SEQ ID NO: 5698

SEQ ID NO: 8622 - DNA, 1326 bp, Yarrowia lipolytica; identical to SEQ ID NO: 5699
  CDS (1)..(1326)

SEQ ID NO: 8623 - protein, 441 aa, Yarrowia lipolytica; identical to SEQ ID NO: 5700

SEQ ID NO: 8624 - DNA, 1248 bp, Kluyveromyces lactis; identical to SEQ ID NO: 5701
  CDS (1)..(1248)

SEQ ID NO: 8625 - protein, 415 aa, Kluyveromyces lactis; identical to SEQ ID NO: 5702

SEQ ID NO: 8626 - DNA, 1290 bp, Kluyveromyces lactis; identical to SEQ ID NO: 5703
  CDS (1)..(1290)

SEQ ID NO: 8627 - protein, 429 aa, Kluyveromyces lactis; identical to SEQ ID NO: 5704

SEQ ID NO: 8628 - DNA, 1257 bp, Candida glabrata; identical to SEQ ID NO: 5705
  CDS (1)..(1257)

SEQ ID NO: 8629 - protein, 418 aa, Candida glabrata; identical to SEQ ID NO: 5706

SEQ ID NO: 8630 - DNA, 1272 bp, Candida glabrata; identical to SEQ ID NO: 5707
  CDS (1)..(1272)

SEQ ID NO: 8631 - protein, 423 aa, Candida glabrata; identical to SEQ ID NO: 5708

SEQ ID NO: 8632 - DNA, 1236 bp, Candida glabrata; identical to SEQ ID NO: 5709
  CDS (1)..(1236)

SEQ ID NO: 8633 - protein, 411 aa, Candida glabrata; identical to SEQ ID NO: 5710

SEQ ID NO: 8634 - DNA, 1215 bp, Bartonella quintana; identical to SEQ ID NO: 5711
  CDS (1)..(1215)

SEQ ID NO: 8635 - protein, 404 aa, Bartonella quintana; identical to SEQ ID NO: 5712

SEQ ID NO: 8636 - DNA, 1215 bp, Bartonella henselae; identical to SEQ ID NO: 5713
  CDS (1)..(1215)

SEQ ID NO: 8637 - protein, 404 aa, Bartonella henselae; identical to SEQ ID NO: 5714

SEQ ID NO: 8638 - DNA, 1212 bp, Rhizobium leguminosarum; identical to SEQ ID NO: 5715
  CDS (1)..(1212)

SEQ ID NO: 8639 - protein, 403 aa, Rhizobium leguminosarum; identical to SEQ ID NO: 5716

SEQ ID NO: 8640 - DNA, 1230 bp, Bdellovibrio bacteriovorus; identical to SEQ ID NO: 5717
  CDS (1)..(1230)

SEQ ID NO: 8641 - protein, 409 aa, Bdellovibrio bacteriovorus; identical to SEQ ID NO: 5718

SEQ ID NO: 8642 - DNA, 1227 bp, Rhodopseudomonas palustris; identical to SEQ ID NO: 5719
  CDS (1)..(1227)

SEQ ID NO: 8643 - protein, 408 aa, Rhodopseudomonas palustris; identical to SEQ ID NO: 5720

SEQ ID NO: 8644 - DNA, 1564 bp, Pisum sativum; identical to SEQ ID NO: 5721
  CDS (79)..(1317)

SEQ ID NO: 8645 - protein, 412 aa, Pisum sativum; identical to SEQ ID NO: 5722

SEQ ID NO: 8646 - DNA, 2254 bp, Ovis aries; identical to SEQ ID NO: 5723
  CDS (167)..(1411)

SEQ ID NO: 8647 - protein, 414 aa, Ovis aries; identical to SEQ ID NO: 5724

SEQ ID NO: 8648 - DNA, 1197 bp, Leptospira interrogans; identical to SEQ ID NO: 5725
  CDS (1)..(1197)

SEQ ID NO: 8649 - protein, 398 aa, Leptospira interrogans; identical to SEQ ID NO: 5726

SEQ ID NO: 8650 - DNA, 1239 bp, Mycobacterium paratuberculosis; identical to SEQ ID NO: 5727
  CDS (1)..(1239)

SEQ ID NO: 8651 - protein, 412 aa, Mycobacterium paratuberculosis; identical to SEQ ID NO: 5728

SEQ ID NO: 8652 - DNA, 1278 bp, Ashbya gossypii; identical to SEQ ID NO: 5729
  CDS (1)..(1278)

SEQ ID NO: 8653 - protein, 425 aa, Ashbya gossypii; identical to SEQ ID NO: 5730

SEQ ID NO: 8654 - DNA, 1248 bp, Ashbya gossypii; identical to SEQ ID NO: 5731
  CDS (1)..(1248)

SEQ ID NO: 8655 - protein, 415 aa, Ashbya gossypii; identical to SEQ ID NO: 5732

SEQ ID NO: 8656 - DNA, 1287 bp, Dictyostelium discoideum; identical to SEQ ID NO: 5733
  CDS (1)..(1287)

SEQ ID NO: 8657 - protein, 428 aa, Dictyostelium discoideum; identical to SEQ ID NO: 5734

SEQ ID NO: 8658 - DNA, 1594 bp, Oryza sativa; identical to SEQ ID NO: 5735
  CDS (66)..(1304)

SEQ ID NO: 8659 - protein, 412 aa, Oryza sativa; identical to SEQ ID NO: 5736

SEQ ID NO: 8660 - DNA, 1230 bp, Gloeobacter violaceus; identical to SEQ ID NO: 5737
  CDS (1)..(1230)

SEQ ID NO: 8661 - protein, 409 aa, Gloeobacter violaceus; identical to SEQ ID NO: 5738

SEQ ID NO: 8662 - DNA, 1410 bp, Plasmodium yoelii yoelii; identical to SEQ ID NO: 5739
  CDS (1)..(1410)

SEQ ID NO: 8663 - protein, 469 aa, Plasmodium yoelii yoelii; identical to SEQ ID NO: 5740

SEQ ID NO: 8664 - DNA, 1389 bp, Neurospora crassa; identical to SEQ ID NO: 5741
  CDS (1)..(1389)

SEQ ID NO: 8665 - protein, 462 aa, Neurospora crassa; identical to SEQ ID NO: 5742

SEQ ID NO: 8666 - DNA, 1765 bp, Oryza sativa; identical to SEQ ID NO: 5743
  CDS (83)..(1489)

SEQ ID NO: 8667 - protein, 468 aa, Oryza sativa; identical to SEQ ID NO: 5744

SEQ ID NO: 8668 - DNA, 1794 bp, Lupinus albus; identical to SEQ ID NO: 5745
  CDS (58)..(1515)

SEQ ID NO: 8669 - protein, 485 aa, Lupinus albus; identical to SEQ ID NO: 5746

SEQ ID NO: 8670 - DNA, 1583 bp, Lupinus albus; identical to SEQ ID NO: 5747
  CDS (43)..(1281)

SEQ ID NO: 8671 - protein, 412 aa, Lupinus albus; identical to SEQ ID NO: 5748

SEQ ID NO: 8672 - DNA, 1627 bp, Lupinus albus; identical to SEQ ID NO: 5749
  CDS (79)..(1317)

SEQ ID NO: 8673 - protein, 412 aa, Lupinus albus; identical to SEQ ID NO: 5750

SEQ ID NO: 8674 - DNA, 2305 bp, Homo sapiens; identical to SEQ ID NO: 5751
  CDS (196)..(1440)

SEQ ID NO: 8675 - protein, 414 aa, Homo sapiens [sequence omitted]

SEQ ID NO: 8676 - DNA, 1215 bp, Bradyrhizobium japonicum; identical to SEQ ID NO: 5753
  CDS (1)..(1215)

SEQ ID NO: 8677 - protein, 404 aa, Bradyrhizobium japonicum; identical to SEQ ID NO: 5754

SEQ ID NO: 8678 - DNA, 1215 bp, Brucella suis; identical to SEQ ID NO: 5755
  CDS (1)..(1215)

SEQ ID NO: 8679 - protein, 404 aa, Brucella suis; identical to SEQ ID NO: 5756

SEQ ID NO: 8680 - DNA, 1221 bp, Bifidobacterium longum; identical to SEQ ID NO: 5757
  CDS (1)..(1221)

SEQ ID NO: 8681 - protein, 406 aa, Bifidobacterium longum; identical to SEQ ID NO: 5758

SEQ ID NO: 8682 - DNA, 1407 bp, Plasmodium falciparum; identical to SEQ ID NO: 5759
  CDS (1)..(1407)

SEQ ID NO: 8683 - protein, 468 aa, Plasmodium falciparum; identical to SEQ ID NO: 5760

SEQ ID NO: 8684 - DNA, 1514 bp, Arabidopsis thaliana; identical to SEQ ID NO: 5761
  CDS (1)..(1458)

SEQ ID NO: 8685 - protein, 485 aa, Arabidopsis thaliana; identical to SEQ ID NO: 5762

SEQ ID NO: 8686 - DNA, 1212 bp, Thermoanaerobacter tengcongensis; identical to SEQ ID NO: 5763
  CDS (1)..(1212)

SEQ ID NO: 8687 - protein, 403 aa, Thermoanaerobacter tengcongensis; identical to SEQ ID NO: 5764

SEQ ID NO: 8688 - DNA, 1551 bp, Cucumis sativus; identical to SEQ ID NO: 5765
  CDS (62)..(1294)

SEQ ID NO: 8689 - protein, 410 aa, Cucumis sativus; identical to SEQ ID NO: 5766

SEQ ID NO: 8690 - DNA, 1610 bp, Arabidopsis thaliana; identical to SEQ ID NO: 5767
  CDS (165)..(1397)

SEQ ID NO: 8691 - protein, 410 aa, Arabidopsis thaliana; identical to SEQ ID NO: 5768

SEQ ID NO: 8692 - DNA, 1215 bp, Rhizobium meliloti; identical to SEQ ID NO: 5769
  CDS (1)..(1215)

SEQ ID NO: 8693 - protein, 404 aa, Rhizobium meliloti; identical to SEQ ID NO: 5770

SEQ ID NO: 8694 - DNA, 1561 bp, Prunus persica; identical to SEQ ID NO: 5771
  CDS (1)..(1245)

SEQ ID NO: 8695 - protein, 414 aa, Prunus persica; identical to SEQ ID NO: 5772

SEQ ID NO: 8696 - DNA, 1242 bp, Emericella nidulans; identical to SEQ ID NO: 5773
  CDS (1)..(1242)

SEQ ID NO: 8697 - protein, 413 aa, Emericella nidulans; identical to SEQ ID NO: 5774

SEQ ID NO: 8698 - DNA, 1212 bp, Rhizobium loti; identical to SEQ ID NO: 5775
  CDS (1)..(1212)

SEQ ID NO: 8699 - protein, 403 aa, Rhizobium loti; identical to SEQ ID NO: 5776

SEQ ID NO: 8700 - DNA, 1679 bp, Mus musculus; identical to SEQ ID NO: 5777
  CDS (46)..(1404)

SEQ ID NO: 8701 - protein, 452 aa, Mus musculus; identical to SEQ ID NO: 5778

SEQ ID NO: 8702 - DNA, 1227 bp, Oryza sativa; identical to SEQ ID NO: 5779
  CDS (1)..(1227)

SEQ ID NO: 8703 - protein, 408 aa, Oryza sativa; identical to SEQ ID NO: 5780

SEQ ID NO: 8704 - DNA, 1554 bp, Solanum tuberosum; identical to SEQ ID NO: 5781
  CDS (61)..(1473)

SEQ ID NO: 8705 - protein, 470 aa, Solanum tuberosum; identical to SEQ ID NO: 5782

SEQ ID NO: 8706 - DNA, 1708 bp, Citrus limon; identical to SEQ ID NO: 5783
  misc_feature (1533)..(1533): n is a, c, g, or t
  CDS (155)..(1399)

SEQ ID NO: 8707 - protein, 414 aa, Citrus limon; identical to SEQ ID NO: 5784

SEQ ID NO: 8708 - DNA, 1782 bp, Drosophila melanogaster; identical to SEQ ID NO: 5785
  CDS (430)..(1782)

SEQ ID NO: 8709 - protein, 450 aa, Drosophila melanogaster; identical to SEQ ID NO: 5786

SEQ ID NO: 8710 - DNA, 1503 bp, Oryza sativa; identical to SEQ ID NO: 5787
  CDS (84)..(1322)

SEQ ID NO: 8711 - protein, 412 aa, Oryza sativa; identical to SEQ ID NO: 5788

SEQ ID NO: 8712 - DNA, 1859 bp, Oryza sativa; identical to SEQ ID NO: 5789
  CDS (201)..(1445)

SEQ ID NO: 8713 - protein, 414 aa, Oryza sativa; identical to SEQ ID NO: 5790

SEQ ID NO: 8714 - DNA, 1488 bp, Daucus carota; identical to SEQ ID NO: 5791
  CDS (91)..(1341)

SEQ ID NO: 8715 - protein, 416 aa, Daucus carota; identical to SEQ ID NO: 5792

SEQ ID NO: 8716 - DNA, 1512 bp, Daucus carota; identical to SEQ ID NO: 5793
  CDS (93)..(1331)

SEQ ID NO: 8717 - protein, 412 aa, Daucus carota; identical to SEQ ID NO: 5794

SEQ ID NO: 8718 - DNA, 1600 bp, Candida tropicalis; identical to SEQ ID NO: 5795
  CDS (201)..(1493)

SEQ ID NO: 8719 - protein, 430 aa, Candida tropicalis; identical to SEQ ID NO: 5796

SEQ ID NO: 8720 - DNA, 1560 bp, Glycine max; identical to SEQ ID NO: 5797
  CDS (87)..(1328)

SEQ ID NO: 8721 - protein, 413 aa, Glycine max; identical to SEQ ID NO: 5798

SEQ ID NO: 8722 - DNA, 1985 bp, Aspergillus niger; identical to SEQ ID NO: 5799
  CDS (288)..(1784)

SEQ ID NO: 8723 - protein, 498 aa, Aspergillus niger; identical to SEQ ID NO: 5800

SEQ ID NO: 8724 - DNA, 1727 bp, Homo sapiens; identical to SEQ ID NO: 5801
  CDS (67)..(1425)

SEQ ID NO: 8725 - protein, 452 aa, Homo sapiens; identical to SEQ ID NO: 5802

SEQ ID NO: 8726 - DNA, 1863 bp, Mus musculus; identical to SEQ ID NO: 5803
  CDS (24)..(1595)

SEQ ID NO: 8727 - protein, 523 aa, Mus musculus; identical to SEQ ID NO: 5804

SEQ ID NO: 8728 - DNA, 1740 bp, Brachydanio rerio; identical to SEQ ID NO: 5805
  CDS (80)..(1429)

SEQ ID NO: 8729 - protein, 449 aa, Brachydanio rerio; identical to SEQ ID NO: 5806

SEQ ID NO: 8730 - DNA, 25 bp, Artificial sequence
  Primer sequence
atgacaaagattaaggtagctaacc

SEQ ID NO: 8731 - DNA, 23 bp, Artificial sequence
  Primer sequence
ttacaatgcagctgcctcgaact

SEQ ID NO: 8732 - DNA, 1518 bp, Saccharomyces cerevisiae; identical to SEQ ID NO: 2533
  CDS (1)..(1518)

SEQ ID NO: 8733 - protein, 505 aa, Saccharomyces cerevisiae; identical to SEQ ID NO: 2534

SEQ ID NO: 8734 - DNA, 1548 bp, Mus musculus (house mouse); identical to SEQ ID NO: 2535
  CDS (1)..(1548)

SEQ ID NO: 8735 - protein, 515 aa, Mus musculus (house mouse); identical to SEQ ID NO: 2536

SEQ ID NO: 8736 - DNA, 1593 bp, Fugu rubripes (Japanese pufferfish); identical to SEQ ID NO: 2537
  CDS (1)..(1593)

SEQ ID NO: 8737 - protein, 530 aa, Fugu rubripes (Japanese pufferfish); identical to SEQ ID NO: 2538

SEQ ID NO: 8738 - DNA, 1506 bp, Vibrio cholerae; identical to SEQ ID NO: 2539
  CDS (1)..(1506)

SEQ ID NO: 8739 - protein, 501 aa, Vibrio cholerae; identical to SEQ ID NO: 2540

SEQ ID NO: 8740 - DNA, 1470 bp, Pseudomonas aeruginosa; identical to SEQ ID NO: 2541
  CDS (1)..(1470)

SEQ ID NO: 8741 - protein, 489 aa, Pseudomonas aeruginosa; identical to SEQ ID NO: 2542

SEQ ID NO: 8742 - DNA, 1485 bp, Staphylococcus aureus; identical to SEQ ID NO: 2543
  CDS (1)..(1485)

SEQ ID NO: 8743 - protein, 494 aa, Staphylococcus aureus; identical to SEQ ID NO: 2544

SEQ ID NO: 8744 - DNA, 1488 bp, Streptococcus pneumoniae; identical to SEQ ID NO: 2545
  CDS (1)..(1488)

SEQ ID NO: 8745 - protein, 495 aa, Streptococcus pneumoniae; identical to SEQ ID NO: 2546

SEQ ID NO: 8746 - DNA, 1476 bp, Salmonella enterica subsp. enterica serovar Typhi; identical to SEQ ID NO: 2547
  CDS (1)..(1476)

SEQ ID NO: 8747 - protein, 491 aa, Salmonella enterica subsp. enterica serovar Typhi; identical to SEQ ID NO: 2548

SEQ ID NO: 8748 - DNA, 1476 bp, Agrobacterium tumefaciens; identical to SEQ ID NO: 2549
  CDS (1)..(1476)

SEQ ID NO: 8749 - protein, 491 aa, Agrobacterium tumefaciens; identical to SEQ ID NO: 2550

SEQ ID NO: 8750 - DNA, 1530 bp, Nostoc sp. PCC 7120; identical to SEQ ID NO: 2551
  CDS (1)..(1530)

SEQ ID NO: 8751 - protein, 509 aa, Nostoc sp. PCC 7120; identical to SEQ ID NO: 2552

SEQ ID NO: 8752 - DNA, 1386 bp, Agrobacterium tumefaciens; identical to SEQ ID NO: 2553
  CDS (1)..(1386)

SEQ ID NO: 8753 - protein, 461 aa, Agrobacterium tumefaciens; identical to SEQ ID NO: 2554

SEQ ID NO: 8754 - DNA, 1476 bp, Brucella melitensis; identical to SEQ ID NO: 2555
  CDS (1)..(1476)

SEQ ID NO: 8755 - protein, 491 aa, Brucella melitensis; identical to SEQ ID NO: 2556

SEQ ID NO: 8756 - DNA, 1458 bp, Zymomonas mobilis; identical to SEQ ID NO: 2557
  CDS (1)..(1458)

SEQ ID NO: 8757 - protein, 485 aa, Zymomonas mobilis; identical to SEQ ID NO: 2558

SEQ ID NO: 8758 - DNA, 1470 bp, Bacillus subtilis; identical to SEQ ID NO: 2559
  CDS (1)..(1470)

SEQ ID NO: 8759 - protein, 489 aa, Bacillus subtilis; identical to SEQ ID NO: 2560

SEQ ID NO: 8760 - DNA, 1401 bp, Mycobacterium tuberculosis; identical to SEQ ID NO: 2561
  CDS (1)..(1401)

SEQ ID NO: 8761 - protein, 466 aa, Mycobacterium tuberculosis; identical to SEQ ID NO: 2562

SEQ ID NO: 8762 - DNA, 1545 bp, Mycobacterium tuberculosis; identical to SEQ ID NO: 2563
  CDS (1)..(1545)

SEQ ID NO: 8763 - protein, 514 aa, Mycobacterium tuberculosis; identical to SEQ ID NO: 2564

SEQ ID NO: 8764 - DNA, 1320 bp, Chlamydia trachomatis; identical to SEQ ID NO: 2565
  CDS (1)..(1320)

SEQ ID NO: 8765 - protein, 439 aa, Chlamydia trachomatis; identical to SEQ ID NO: 2566

SEQ ID NO: 8766 - DNA, 1773 bp, Deinococcus radiodurans; identical to SEQ ID NO: 2567
  CDS (1)..(1773)

SEQ ID NO: 8767 - protein, 590 aa, Deinococcus radiodurans; identical to SEQ ID NO: 2568

SEQ ID NO: 8768 - DNA, 1467 bp, Pseudomonas aeruginosa; identical to SEQ ID NO: 2569
  CDS (1)..(1467)

SEQ ID NO: 8769 - protein, 488 aa, Pseudomonas aeruginosa; identical to SEQ ID NO: 2570

SEQ ID NO: 8770 - DNA, 1422 bp, Caulobacter crescentus; identical to SEQ ID NO: 2571
  CDS (1)..(1422)

SEQ ID NO: 8771 - protein, 473 aa, Caulobacter crescentus; identical to SEQ ID NO: 2572

SEQ ID NO: 8772 - DNA, 1437 bp, Borrelia burgdorferi (Lyme disease spirochete); identical to SEQ ID NO: 2573
  CDS (1)..(1437)

SEQ ID NO: 8773 - protein, 478 aa, Borrelia burgdorferi (Lyme disease spirochete); identical to SEQ ID NO: 2574

SEQ ID NO: 8774 - DNA, 1539 bp, Chlamydophila pneumoniae, Chlamydia pneumoniae; identical to SEQ ID NO: 2575
  CDS (1)..(1539)

SEQ ID NO: 8775 - protein, 512 aa, Chlamydophila pneumoniae, Chlamydia pneumoniae; identical to SEQ ID NO: 2576

SEQ ID NO: 8776 - DNA, 1476 bp, Escherichia coli; identical to SEQ ID NO: 2577
  CDS (1)..(1476)

SEQ ID NO: 8777 - protein, 491 aa, Escherichia coli; identical to SEQ ID NO: 2578

SEQ ID NO: 8778 - DNA, 1548 bp, Treponema pallidum subsp. pallidum (syphilis spirochete); identical to SEQ ID NO: 2579
  CDS (1)..(1548)

SEQ ID NO: 8779 - protein, 515 aa, Treponema pallidum subsp. pallidum (syphilis spirochete); identical to SEQ ID NO: 2580

SEQ ID NO: 8780 - DNA, 1476 bp, Buchnera sp; identical to SEQ ID NO: 2581
  CDS (1)..(1476)

SEQ ID NO: 8781 - protein, 491 aa, Buchnera sp; identical to SEQ ID NO: 2582

SEQ ID NO: 8782 - DNA, 1512 bp, Lactococcus lactis subsp. lactis; identical to SEQ ID NO: 2583
  CDS (1)..(1512)

SEQ ID NO: 8783 - protein, 503 aa, Lactococcus lactis subsp. lactis; identical to SEQ ID NO: 2584

SEQ ID NO: 8784 - DNA, 1572 bp, Drosophila melanogaster; identical to SEQ ID NO: 2585
  CDS (1)..(1572)

SEQ ID NO: 8785 - protein, 523 aa, Drosophila melanogaster; identical to SEQ ID NO: 2586

SEQ ID NO: 8786 - DNA, 1575 bp, Synechococcus sp; identical to SEQ ID NO: 2587
  CDS (1)..(1575)

SEQ ID NO: 8787 - protein, 524 aa, Synechococcus sp; identical to SEQ ID NO: 2588

SEQ ID NO: 8788 - DNA, 1485 bp, Haemophilus influenzae; identical to SEQ ID NO: 2589
  CDS (1)..(1485)

SEQ ID NO: 8789 - protein, 494 aa, Haemophilus influenzae; identical to SEQ ID NO: 2590

SEQ ID NO: 8790 - DNA, 1446 bp, Neisseria meningitidis; identical to SEQ ID NO: 2591
  CDS (1)..(1446)

SEQ ID NO: 8791 - protein, 481 aa, Neisseria meningitidis; identical to SEQ ID NO: 2592

SEQ ID NO: 8792 - DNA, 1278 bp, Helicobacter pylori; identical to SEQ ID NO: 2593
  CDS (1)..(1278)

SEQ ID NO: 8793 - protein, 425 aa, Helicobacter pylori; identical to SEQ ID NO: 2594

SEQ ID NO: 8794 - DNA, 1434 bp, Xylella fastidiosa; identical to SEQ ID NO: 2595
  CDS (1)..(1434)

SEQ ID NO: 8795 - protein, 477 aa, Xylella fastidiosa; identical to SEQ ID NO: 2596

SEQ ID NO: 8796 - DNA, 1296 bp, Aquifex aeolicus; identical to SEQ ID NO: 2597
  CDS (1)..(1296)

SEQ ID NO: 8797 - protein, 431 aa, Aquifex aeolicus; identical to SEQ ID NO: 2598

SEQ ID NO: 8798 - DNA, 1491 bp, Thermotoga maritima; identical to SEQ ID NO: 2599
  CDS (1)..(1491)

SEQ ID NO: 8799 - protein, 496 aa, Thermotoga maritima; identical to SEQ ID NO: 2600

SEQ ID NO: 8800 - DNA, 1494 bp, Kluyveromyces marxianus var. lactis, Candida sphaerica; identical to SEQ ID NO: 2601
  CDS (1)..(1494)

SEQ ID NO: 8801 - protein, 497 aa, Kluyveromyces marxianus var. lactis, Candida sphaerica; identical to SEQ ID NO: 2602

SEQ ID NO: 8802 - DNA, 2813 bp, Erwinia chrysanthemi; identical to SEQ ID NO: 2603
  CDS (322)..(1797)

SEQ ID NO: 8803 - protein, 491 aa, Erwinia chrysanthemi; identical to SEQ ID NO: 2604

SEQ ID NO: 8804 - DNA, 3244 bp, Plasmodium falciparum; identical to SEQ ID NO: 2605
  CDS (184)..(2916)

SEQ ID NO: 8805 - protein, 910 aa, Plasmodium falciparum; identical to SEQ ID NO: 2606

SEQ ID NO: 8806 - DNA, 1785 bp, Medicago sativa (alfalfa); identical to SEQ ID NO: 2607
  CDS (38)..(1585)

SEQ ID NO: 8807 - protein, 515 aa, Medicago sativa (alfalfa); identical to SEQ ID NO: 2608

SEQ ID NO: 8808 - DNA, 1689 bp, Solanum tuberosum (potato); identical to SEQ ID NO: 2609
  CDS (46)..(1581)

SEQ ID NO: 8809 - protein, 511 aa, Solanum tuberosum (potato); identical to SEQ ID NO: 2610

SEQ ID NO: 8810 - DNA, 1530 bp, Synechocystis sp; identical to SEQ ID NO: 2611
  CDS (1)..(1530)

SEQ ID NO: 8811 - protein, 509 aa, Synechocystis sp; identical to SEQ ID NO: 2612

SEQ ID NO: 8812 - DNA, 1953 bp, Nicotiana tabacum (common tobacco); identical to SEQ ID NO: 2613
  CDS (43)..(1824)

SEQ ID NO: 8813 - protein, 593 aa, Nicotiana tabacum (common tobacco); identical to SEQ ID NO: 2614

SEQ ID NO: 8814 - DNA, 1869 bp, Nicotiana tabacum (common tobacco); identical to SEQ ID NO: 2615
  CDS (22)..(1788)

SEQ ID NO: 8815 - protein, 588 aa, Nicotiana tabacum (common tobacco); identical to SEQ ID NO: 2616

SEQ ID NO: 8816 - DNA, 2058 bp, Solanum tuberosum (potato); identical to SEQ ID NO: 2617
  CDS (41)..(1774)

SEQ ID NO: 8817 - protein, 577 aa, Solanum tuberosum (potato); identical to SEQ ID NO: 2618

SEQ ID NO: 8818 - DNA, 2049 bp, Spinacia oleracea (spinach); identical to SEQ ID NO: 2619
  CDS (147)..(1871)

SEQ ID NO: 8819 - protein, 574 aa, Spinacia oleracea (spinach); identical to SEQ ID NO: 2620

SEQ ID NO: 8820 - DNA, 2359 bp, Petroselinum crispum (parsley); identical to SEQ ID NO: 2621
  CDS (172)..(1986)

SEQ ID NO: 8821 - protein, 604 aa, Petroselinum crispum (parsley); identical to SEQ ID NO: 2622

SEQ ID NO: 8822 - DNA, 1848 bp, Petroselinum crispum (parsley); identical to SEQ ID NO: 2623
  CDS (41)..(1528)

SEQ ID NO: 8823 - protein, 495 aa, Petroselinum crispum (parsley); identical to SEQ ID NO: 2624

SEQ ID NO: 8824 - DNA, 1957 bp, Petroselinum crispum (parsley); identical to SEQ ID NO: 2625
  CDS (74)..(1678)

SEQ ID NO: 8825 - protein, 534 aa, Petroselinum crispum (parsley); identical to SEQ ID NO: 2626

SEQ ID NO: 8826 - DNA, 1569 bp, Caenorhabditis elegans; identical to SEQ ID NO: 2627
  CDS (1)..(1569)

SEQ ID NO: 8827 - protein, 522 aa, Caenorhabditis elegans; identical to SEQ ID NO: 2628

SEQ ID NO: 8828 - DNA, 1779 bp, Streptomyces coelicolor; identical to SEQ ID NO: 2629
  CDS (1)..(1779)

SEQ ID NO: 8829 - protein, 592 aa, Streptomyces coelicolor; identical to SEQ ID NO: 2630

SEQ ID NO: 8830 - DNA, 1524 bp, Streptomyces coelicolor; identical to SEQ ID NO: 2631
  CDS (1)..(1524)

SEQ ID NO: 8831 - protein, 507 aa, Streptomyces coelicolor; identical to SEQ ID NO: 2632

SEQ ID NO: 8832 - DNA, 1422 bp, Schizosaccharomyces pombe; identical to SEQ ID NO: 2633
  CDS (1)..(1422)

SEQ ID NO: 8833 - protein, 473 aa, Schizosaccharomyces pombe; identical to SEQ ID NO: 2634

SEQ ID NO: 8834 - DNA, 1503 bp, Schizosaccharomyces pombe; identical to SEQ ID NO: 2635
  CDS (1)..(1503)

SEQ ID NO: 8835 - protein, 500 aa, Schizosaccharomyces pombe; identical to SEQ ID NO: 2636

SEQ ID NO: 8836 - DNA, 1428 bp, Schizosaccharomyces pombe; identical to SEQ ID NO: 2637
  CDS (1)..(1428)

SEQ ID NO: 8837 - protein, 475 aa, Schizosaccharomyces pombe; identical to SEQ ID NO: 2638

SEQ ID NO: 8838 - DNA, 1461 bp, Leuconostoc mesenteroides; identical to SEQ ID NO: 2639
  CDS (1)..(1461)

SEQ ID NO: 8839 - protein, 486 aa, Leuconostoc mesenteroides; identical to SEQ ID NO: 2640

SEQ ID NO: 8840 - DNA, 3038 bp, Corynebacterium glutamicum; identical to SEQ ID NO: 2641
  CDS (115)..(1659)

SEQ ID NO: 8841 - protein, 514 aa, Corynebacterium glutamicum; identical to SEQ ID NO: 2642

SEQ ID NO: 8842 - DNA, 1852 bp, Nicotiana tabacum; identical to SEQ ID NO: 2643
  CDS (102)..(1634)

SEQ ID NO: 8843 - protein, 510 aa, Nicotiana tabacum; identical to SEQ ID NO: 2644

SEQ ID NO: 8844 - DNA, 1821 bp, Nicotiana tabacum; identical to SEQ ID NO: 2645
  CDS (88)..(1623)

SEQ ID NO: 8845 - protein, 511 aa, Nicotiana tabacum; identical to SEQ ID NO: 2646

SEQ ID NO: 8846 - DNA, 1808 bp, Chlamydia trachomatis; identical to SEQ ID NO: 2647
  CDS (105)..(1643)

SEQ ID NO: 8847 - protein, 512 aa, Chlamydia trachomatis; identical to SEQ ID NO: 2648

SEQ ID NO: 8848 - DNA, 2750 bp, Plasmodium falciparum; identical to SEQ ID NO: 2649
  CDS (48)..(2258)

SEQ ID NO: 8849 - protein, 736 aa, Plasmodium falciparum; identical to SEQ ID NO: 2650

SEQ ID NO: 8850 - DNA, 1509 bp, Debaryomyces hansenii; identical to SEQ ID NO: 2651
  CDS (1)..(1509)

SEQ ID NO: 8851 - protein, 502 aa, Debaryomyces hansenii; identical to SEQ ID NO: 2652

SEQ ID NO: 8852 - DNA, 1503 bp, Candida glabrata; identical to SEQ ID NO: 2653
  CDS (1)..(1503)

SEQ ID NO: 8853 - protein, 500 aa, Candida glabrata; identical to SEQ ID NO: 2654

SEQ ID NO: 8854 - DNA, 1485 bp, Bacillus thuringiensis serovar konkukian str; identical to SEQ ID NO: 2655
  CDS (1)..(1485)

SEQ ID NO: 8855 - protein, 494 aa, Bacillus thuringiensis serovar konkukian str; identical to SEQ ID NO: 2656

SEQ ID NO: 8856 - DNA, 1554 bp, Oryza sativa; identical to SEQ ID NO: 2657
  CDS (1)..(1554)

SEQ ID NO: 8857 - protein, 517 aa, Oryza sativa; identical to SEQ ID NO: 2658

SEQ ID NO: 8858 - DNA, 1500 bp, Photobacterium profundum; identical to SEQ ID NO: 2659
  CDS (1)..(1500)

SEQ ID NO: 8859 - protein, 499 aa, Photobacterium profundum; identical to SEQ ID NO: 2660

SEQ ID NO: 8860 - DNA, 1551 bp, Parachlamydia sp; identical to SEQ ID NO: 2661
  CDS (1)..(1551)

SEQ ID NO: 8861 - protein, 516 aa, Parachlamydia sp; identical to SEQ ID NO: 2662

SEQ ID NO: 8862 - DNA, 1515 bp, Rhodopseudomonas palustris; identical to SEQ ID NO: 2663
  CDS (1)..(1515)

SEQ ID NO: 8863 - protein, 504 aa, Rhodopseudomonas palustris; identical to SEQ ID NO: 2664

SEQ ID NO: 8864 - DNA, 1650 bp, Corynebacterium diphtheriae; identical to SEQ ID NO: 2665
  CDS (1)..(1650)

SEQ ID NO: 8865 - protein, 549 aa, Corynebacterium diphtheriae; identical to SEQ ID NO: 2666

SEQ ID NO: 8866 - DNA, 1446 bp, uncultured bacterium 581; identical to SEQ ID NO: 2667
  CDS (1)..(1446)

SEQ ID NO: 8867 - protein, 481 aa, uncultured bacterium 581; identical to SEQ ID NO: 2668

SEQ ID NO: 8868 - DNA, 1602 bp, Nonomuraea sp; identical to SEQ ID NO: 2669
  CDS (1)..(1602)

SEQ ID NO: 8869 - protein, 533 aa, Nonomuraea sp; identical to SEQ ID NO: 2670

SEQ ID NO: 8870 - DNA, 1476 bp, Listeria monocytogenes; identical to SEQ ID NO: 2671
  CDS (1)..(1476)

SEQ ID NO: 8871 - protein, 491 aa, Listeria monocytogenes; identical to SEQ ID NO: 2672

SEQ ID NO: 8872 - DNA, 1485 bp, Bacillus cereus; identical to SEQ ID NO: 2673
  CDS (1)..(1485)

SEQ ID NO: 8873 - protein, 494 aa, Bacillus cereus; identical to SEQ ID NO: 2674

SEQ ID NO: 8874 - DNA, 1410 bp, Mycobacterium paratuberculosis; identical to SEQ ID NO: 2675
  CDS (1)..(1410)

SEQ ID NO: 8875 - protein, 469 aa, Mycobacterium paratuberculosis; identical to SEQ ID NO: 2676

SEQ ID NO: 8876 - DNA, 2454 bp, Mycobacterium paratuberculosis; identical to SEQ ID NO: 2677
  CDS (1)..(2454)

SEQ ID NO: 8877 - protein, 817 aa, Mycobacterium paratuberculosis; identical to SEQ ID NO: 2678

SEQ ID NO: 8878 - DNA, 1545 bp, Mycobacterium paratuberculosis; identical to SEQ ID NO: 2679
  CDS (1)..(1545)

SEQ ID NO: 8879 - protein, 514 aa, Mycobacterium paratuberculosis; identical to SEQ ID NO: 2680

SEQ ID NO: 8880 - DNA, 1449 bp, Lactobacillus johnsonii; identical to SEQ ID NO: 2681
  CDS (1)..(1449)

SEQ ID NO: 8881 - protein, 482 aa, Lactobacillus johnsonii; identical to SEQ ID NO: 2682

SEQ ID NO: 8882 - DNA, 1539 bp, Ashbya gossypii; identical to SEQ ID NO: 2683
  CDS (1)..(1539)

SEQ ID NO: 8883 - protein, 512 aa, Ashbya gossypii; identical to SEQ ID NO: 2684

SEQ ID NO: 8884 - DNA, 1734 bp, Oryza sativa; identical to SEQ ID NO: 2685
  CDS (1)..(1734)

SEQ ID NO: 8885 - protein, 577 aa, Oryza sativa; identical to SEQ ID NO: 2686

SEQ ID NO: 8886 - DNA, 1467 bp, Gluconobacter oxydans; identical to SEQ ID NO: 2687
  CDS (1)..(1467)

SEQ ID NO: 8887 - protein, 488 aa, Gluconobacter oxydans; identical to SEQ ID NO: 2688

SEQ ID NO: 8888 - DNA, 1581 bp, Vibrio vulnificus; identical to SEQ ID NO: 2689
  CDS (1)..(1581)

SEQ ID NO: 8889 - protein, 526 aa, Vibrio vulnificus; identical to SEQ ID NO: 2690

SEQ ID NO: 8890 - DNA, 1476 bp, Photorhabdus luminescens; identical to SEQ ID NO: 2691
  CDS (1)..(1476)

SEQ ID NO: 8891 - protein, 491 aa, Photorhabdus luminescens; identical to SEQ ID NO: 2692

SEQ ID NO: 8892 - DNA, 1539 bp, Gloeobacter violaceus; identical to SEQ ID NO: 2693
  CDS (1)..(1539)

SEQ ID NO: 8893 - protein, 512 aa, Gloeobacter violaceus; identical to SEQ ID NO: 2694

SEQ ID NO: 8894 - DNA, 1539 bp, Gloeobacter violaceus; identical to SEQ ID NO: 2695
  CDS (1)..(1539)

SEQ ID NO: 8895 - protein, 512 aa, Gloeobacter violaceus; identical to SEQ ID NO: 2696

SEQ ID NO: 8896 - DNA, 1479 bp, Chromobacterium violaceum; identical to SEQ ID NO: 2697
  CDS (1)..(1479)

SEQ ID NO: 8897 - protein, 492 aa, Chromobacterium violaceum; identical to SEQ ID NO: 2698

SEQ ID NO: 8898 - DNA, 2229 bp, Giardia lamblia ATCC 50803; identical to SEQ ID NO: 2699
  CDS (1)..(2229)

SEQ ID NO: 8899 - protein, 742 aa, Giardia lamblia ATCC 50803; identical to SEQ ID NO: 2700

SEQ ID NO: 8900 - DNA, 2850 bp, Plasmodium yoelii yoelii; identical to SEQ ID NO: 2701
  CDS (1)..(2850)

SEQ ID NO: 8901 - protein, 949 aa, Plasmodium yoelii yoelii; identical to SEQ ID NO: 2702

SEQ ID NO: 8902 - DNA, 1476 bp, Neurospora crassa; identical to SEQ ID NO: 2703
  CDS (1)..(1476)

SEQ ID NO: 8903 - protein, 491 aa, Neurospora crassa; identical to SEQ ID NO: 2704

SEQ ID NO: 8904 - DNA, 1524 bp, Synechococcus sp; identical to SEQ ID NO: 2705
  CDS (1)..(1524)

SEQ ID NO: 8905 - protein, 507 aa, Synechococcus sp; identical to SEQ ID NO: 2706

SEQ ID NO: 8906 - DNA, 1455 bp, Rhodopirellula baltica; identical to SEQ ID NO: 2707
  CDS (1)..(1455)

SEQ ID NO: 8907 - protein, 484 aa, Rhodopirellula baltica; identical to SEQ ID NO: 2708

SEQ ID NO: 8908 - DNA, 1524 bp, Prochlorococcus marinus subsp; identical to SEQ ID NO: 2709
  CDS (1)..(1524)

SEQ ID NO: 8909 - protein, 507 aa, Prochlorococcus marinus subsp; identical to SEQ ID NO: 2710

SEQ ID NO: 8910 - DNA, 1524 bp, Prochlorococcus marinus; identical to SEQ ID NO: 2711
  CDS (1)..(1524)

SEQ ID NO: 8911 - protein, 507 aa, Prochlorococcus marinus; identical to SEQ ID NO: 2712

SEQ ID NO: 8912 - DNA, 1521 bp, Prochlorococcus marinus; identical to SEQ ID NO: 2713
  CDS (1)..(1521)

SEQ ID NO: 8913 - protein, 506 aa, Prochlorococcus marinus; identical to SEQ ID NO: 2714

SEQ ID NO: 8914 - DNA, 1488 bp, Haemophilus ducreyi; identical to SEQ ID NO: 2715
  CDS (1)..(1488)

SEQ ID NO: 8915 - protein, 495 aa, Haemophilus ducreyi; identical to SEQ ID NO: 2716

SEQ ID NO: 8916 - DNA, 1497 bp, Candidatus Blochmannia floridanus; identical to SEQ ID NO: 2717
  CDS (1)..(1497)

SEQ ID NO: 8917 - protein, 498 aa, Candidatus Blochmannia floridanus; identical to SEQ ID NO: 2718

SEQ ID NO: 8918 - DNA, 1768 bp, Oryza sativa; identical to SEQ ID NO: 2719
  CDS (2)..(1768)

SEQ ID NO: 8919 - protein, 588 aa, Oryza sativa; identical to SEQ ID NO: 2720

SEQ ID NO: 8920 - DNA, 1548 bp, Bos indicus; identical to SEQ ID NO: 2721
  CDS (1)..(1548)

SEQ ID NO: 8921 - protein, 515 aa, Bos indicus; identical to SEQ ID NO: 2722

SEQ ID NO: 8922 - DNA, 1536 bp, Chlamydophila caviae; identical to SEQ ID NO: 2723
  CDS (1)..(1536)

SEQ ID NO: 8923 - protein, 511 aa, Chlamydophila caviae; identical to SEQ ID NO: 2724

SEQ ID NO: 8924 - DNA, 1524 bp, Streptomyces avermitilis; identical to SEQ ID NO: 2725
  CDS (1)..(1524)

SEQ ID NO: 8925 - protein, 507 aa, Streptomyces avermitilis; identical to SEQ ID NO: 2726

SEQ ID NO: 8926 - DNA, 1647 bp, Streptomyces avermitilis; identical to SEQ ID NO: 2727
  CDS (1)..(1647)

SEQ ID NO: 8927 - protein, 548 aa, Streptomyces avermitilis; identical to SEQ ID NO: 2728

SEQ ID NO: 8928 - DNA, 1491 bp, Nitrosomonas europaea; identical to SEQ ID NO: 2729
  CDS (1)..(1491)

SEQ ID NO: 8929 - protein, 496 aa, Nitrosomonas europaea; identical to SEQ ID NO: 2730

SEQ ID NO: 8930 - DNA, 1524 bp, Enterococcus faecalis; identical to SEQ ID NO: 2731
  CDS (1)..(1524)

SEQ ID NO: 8931 - protein, 507 aa, Enterococcus faecalis; identical to SEQ ID NO: 2732

SEQ ID NO: 8932 - DNA, 1464 bp, Tropheryma whipplei; identical to SEQ ID NO: 2733
  CDS (1)..(1464)

SEQ ID NO: 8933 - protein, 487 aa, Tropheryma whipplei; identical to SEQ ID NO: 2734

SEQ ID NO: 8934 - DNA, 2145 bp, Leishmania mexicana; identical to SEQ ID NO: 2735
  CDS (298)..(1986)

SEQ ID NO: 8935 - protein, 562 aa, Leishmania mexicana; identical to SEQ ID NO: 2736

SEQ ID NO: 8936 - DNA, 1494 bp, Dictyostelium discoideum; identical to SEQ ID NO: 2737
  CDS (1)..(1494)

SEQ ID NO: 8937 - protein, 497 aa, Dictyostelium discoideum; identical to SEQ ID NO: 2738

SEQ ID NO: 8938 - DNA, 1503 bp, Xylella fastidiosa; identical to SEQ ID NO: 2739
  CDS (1)..(1503)

SEQ ID NO: 8939 - protein, 500 aa, Xylella fastidiosa; identical to SEQ ID NO: 2740

SEQ ID NO: 8940 - DNA, 1506 bp, Vibrio parahaemolyticus; identical to SEQ ID NO: 2741
  CDS (1)..(1506)

SEQ ID NO: 8941 - protein, 501 aa, Vibrio parahaemolyticus; identical to SEQ ID NO: 2742

SEQ ID NO: 8942 - DNA, 1533 bp, Pseudomonas syringae; identical to SEQ ID NO: 2743
  CDS (1)..(1533)

SEQ ID NO: 8943 - protein, 510 aa, Pseudomonas syringae; identical to SEQ ID NO: 2744

SEQ ID NO: 8944 - DNA, 1470 bp, Pseudomonas syringae; identical to SEQ ID NO: 2745
  CDS (1)..(1470)

SEQ ID NO: 8945 - protein, 489 aa, Pseudomonas syringae; identical to SEQ ID NO: 2746

SEQ ID NO: 8946 - DNA, 1458 bp, Pseudomonas putida; identical to SEQ ID NO: 2747
  CDS (1)..(1458)

SEQ ID NO: 8947 - protein, 485 aa, Pseudomonas putida; identical to SEQ ID NO: 2748

SEQ ID NO: 8948 - DNA, 1506 bp, Pseudomonas putida; identical to SEQ ID NO: 2749
  CDS (1)..(1506)

SEQ ID NO: 8949 - protein, 501 aa, Pseudomonas putida; identical to SEQ ID NO: 2750

SEQ ID NO: 8950 - DNA, 1470 bp, Pseudomonas putida; identical to SEQ ID NO: 2751
  CDS (1)..(1470)

SEQ ID NO: 8951 - protein, 489 aa, Pseudomonas putida; identical to SEQ ID NO: 2752

SEQ ID NO: 8952 - DNA, 1485 bp, Lactobacillus plantarum; identical to SEQ ID NO: 2753
  CDS (1)..(1485)

SEQ ID NO: 8953 - protein, 494 aa, Lactobacillus plantarum; identical to SEQ ID NO: 2754

SEQ ID NO: 8954 - DNA, 1440 bp, Clostridium tetani; identical to SEQ ID NO: 2755
  CDS (1)..(1440)

SEQ ID NO: 8955 - protein, 479 aa, Clostridium tetani; identical to SEQ ID NO: 2756

SEQ ID NO: 8956 - DNA, 1512 bp, Bradyrhizobium japonicum; identical to SEQ ID NO: 2757
  CDS (1)..(1512)

SEQ ID NO: 8957 - protein, 503 aa, Bradyrhizobium japonicum; identical to SEQ ID NO: 2758

SEQ ID NO: 8958 - DNA, 1497 bp, Bacteroides thetaiotaomicron; identical to SEQ ID NO: 2759
  CDS (1)..(1497)

SEQ ID NO: 8959 - protein, 498 aa, Bacteroides thetaiotaomicron; identical to SEQ ID NO: 2760

SEQ ID NO: 8960 - DNA, 4583 bp, Mus musculus; identical to SEQ ID NO: 2761
  CDS (119)..(2488)

SEQ ID NO: 8961 - protein, 789 aa, Mus musculus; identical to SEQ ID NO: 2762

SEQ ID NO: 8962 - DNA, 1485 bp, Staphylococcus epidermidis; identical to SEQ ID NO: 2763
  CDS (1)..(1485)

SEQ ID NO: 8963 - protein, 494 aa, Staphylococcus epidermidis; identical to SEQ ID NO: 2764

SEQ ID NO: 8964 - DNA, 1590 bp, Yersinia pestis; identical to SEQ ID NO: 2765
  CDS (1)..(1590)

SEQ ID NO: 8965 - protein, 529 aa, Yersinia pestis; identical to SEQ ID NO: 2766

SEQ ID NO: 8966 - DNA, 1530 bp, Synechococcus elongatus; identical to SEQ ID NO: 2767
  CDS (1)..(1530)

SEQ ID NO: 8967 - protein, 509 aa, Synechococcus elongatus; identical to SEQ ID NO: 2768

SEQ ID NO: 8968 - DNA, 1473 bp, Shewanella oneidensis; identical to SEQ ID NO: 2769
  CDS (1)..(1473)

SEQ ID NO: 8969 - protein, 490 aa, Shewanella oneidensis; identical to SEQ ID NO: 2770

SEQ ID NO: 8970 - DNA, 1476 bp, Oceanobacillus iheyensis; identical to SEQ ID NO: 2771
  CDS (1)..(1476)

SEQ ID NO: 8971 - protein, 491 aa, Oceanobacillus iheyensis; identical to SEQ ID NO: 2772

SEQ ID NO: 8972 - DNA, 1344 bp, Corynebacterium efficiens; identical to SEQ ID NO: 2773
  CDS (1)..(1344)

SEQ ID NO: 8973 - protein, 447 aa, Corynebacterium efficiens; identical to SEQ ID NO: 2774

SEQ ID NO: 8974 - DNA, 1545 bp, Corynebacterium efficiens; identical to SEQ ID NO: 2775
  CDS (1)..(1545)

SEQ ID NO: 8975 - protein, 514 aa, Corynebacterium efficiens; identical to SEQ ID NO: 2776

SEQ ID NO: 8976 - DNA, 1668 bp, Bifidobacterium longum; identical to SEQ ID NO: 2777
  CDS (1)..(1668)

SEQ ID NO: 8977 - protein, 555 aa, Bifidobacterium longum; identical to SEQ ID NO: 2778

SEQ ID NO: 8978 - DNA, 1284 bp, Rhodococcus opacus; identical to SEQ ID NO: 2779
  CDS (1)..(1284)

SEQ ID NO: 8979 - protein, 427 aa, Rhodococcus opacus; identical to SEQ ID NO: 2780

SEQ ID NO: 8980 - DNA, 2879 bp, Leishmania guyanensis; identical to SEQ ID NO: 2781
  misc_feature (1992)..(2321): n is a, c, g, or t
  misc_feature (2700)..(2700): n is a, c, g, or t
  misc_feature (2840)..(2840): n is a, c, g, or t
  CDS (205)..(1893)

SEQ ID NO: 8981 - protein, 562 aa, Leishmania guyanensis; identical to SEQ ID NO: 2782

SEQ ID NO: 8982 - DNA, 1689 bp, Leishmania mexicana; identical to SEQ ID NO: 2783
  misc_feature (227)..(444): n is a, c, g, or t
  misc_feature (1475)..(1528): n is a, c, g, or t
  CDS (1)..(1689)

SEQ ID NO: 8983 - protein, 562 aa, Leishmania mexicana; identical to SEQ ID NO: 2784
  misc_feature (76)..(148): Xaa can be any naturally occuring amino acid
  misc_feature (187)..(187): Xaa can be any naturally occuring amino acid
  misc_feature (197)..(197): Xaa can be any naturally occuring amino acid
  misc_feature (224)..(224): Xaa can be any naturally occuring amino acid
  misc_feature (243)..(243): Xaa can be any naturally occuring amino acid
  misc_feature (250)..(250): Xaa can be any naturally occuring amino acid
  misc_feature (492)..(510): Xaa can be any naturally occuring amino acid

SEQ ID NO: 8984 - DNA, 2916 bp, Leishmania amazonensis; identical to SEQ ID NO: 2785
  misc_feature (2191)..(2311): n is a, c, g, or t
  CDS (207)..(1895)

SEQ ID NO: 8985 - protein, 562 aa, Leishmania amazonensis; identical to SEQ ID NO: 2786
  misc_feature (463)..(463): Xaa can be any naturally occuring amino acid
  misc_feature (481)..(481): Xaa can be any naturally occuring amino acid

SEQ ID NO: 8986 - DNA, 1440 bp, Chlorobium tepidum; identical to SEQ ID NO: 2787
  CDS (1)..(1440)

SEQ ID NO: 8987 - protein, 479 aa, Chlorobium tepidum; identical to SEQ ID NO: 2788

SEQ ID NO: 8988 - DNA, 2187 bp, Methylobacterium extorquens; identical to SEQ ID NO: 2789
  CDS (640)..(2187)

SEQ ID NO: 8989 - protein, 515 aa, Methylobacterium extorquens; identical to SEQ ID NO: 2790

SEQ ID NO: 8990 - DNA, 1476 bp, Bartonella henselae; identical to SEQ ID NO: 2791
  CDS (1)..(1476)

SEQ ID NO: 8991 - protein, 491 aa, Bartonella henselae; identical to SEQ ID NO: 2792

SEQ ID NO: 8992 - DNA, 2266 bp, Toxoplasma gondii; identical to SEQ ID NO: 2793
  CDS (169)..(1851)

SEQ ID NO: 8993 - protein, 560 aa, Toxoplasma gondii; identical to SEQ ID NO: 2794

SEQ ID NO: 8994 - DNA, 1923 bp, Xanthomonas campestris; identical to SEQ ID NO: 2795
  CDS (1)..(1923)

SEQ ID NO: 8995 - protein, 640 aa, Xanthomonas campestris; identical to SEQ ID NO: 2796

SEQ ID NO: 8996 - DNA, 1431 bp, Xanthomonas campestris; identical to SEQ ID NO: 2797
  CDS (1)..(1431)

SEQ ID NO: 8997 - protein, 476 aa, Xanthomonas campestris; identical to SEQ ID NO: 2798

SEQ ID NO: 8998 - DNA, 1839 bp, Xanthomonas axonopodis; identical to SEQ ID NO: 2799
  CDS (1)..(1839)

SEQ ID NO: 8999 - protein, 612 aa, Xanthomonas axonopodis; identical to SEQ ID NO: 2800

SEQ ID NO: 9000 - DNA, 1431 bp, Xanthomonas axonopodis; identical to SEQ ID NO: 2801
  CDS (1)..(1431)

SEQ ID NO: 9001 - protein, 476 aa, Xanthomonas axonopodis; identical to SEQ ID NO: 2802

SEQ ID NO: 9002 - DNA, 1458 bp, Thermoanaerobacter tengcongensis; identical to SEQ ID NO: 2803
  CDS (1)..(1458)

SEQ ID NO: 9003 - protein, 485 aa, Thermoanaerobacter tengcongensis; identical to SEQ ID NO: 2804

SEQ ID NO: 9004 - DNA, 1762 bp, Oryza sativa; identical to SEQ ID NO: 2805
  CDS (41)..(1558)

SEQ ID NO: 9005 - protein, 505 aa, Oryza sativa; identical to SEQ ID NO: 2806

SEQ ID NO: 9006 - DNA, 1305 bp, Encephalitozoon cuniculi; identical to SEQ ID NO: 2807
  CDS (1)..(1305)

SEQ ID NO: 9007 - protein, 434 aa, Encephalitozoon cuniculi; identical to SEQ ID NO: 2808

SEQ ID NO: 9008 - DNA, 2125 bp, Drosophila melanogaster; identical to SEQ ID NO: 2809
  CDS (158)..(1738)

SEQ ID NO: 9009 - protein, 526 aa, Drosophila melanogaster; identical to SEQ ID NO: 2810

SEQ ID NO: 9010 - DNA, 1470 bp, Ralstonia solanacearum; identical to SEQ ID NO: 2811
  CDS (1)..(1470)

SEQ ID NO: 9011 - protein, 489 aa, Ralstonia solanacearum; identical to SEQ ID NO: 2812

SEQ ID NO: 9012 - DNA, 1521 bp, Enterococcus mundtii; identical to SEQ ID NO: 2813
  CDS (1)..(1521)

SEQ ID NO: 9013 - protein, 506 aa, Enterococcus mundtii; identical to SEQ ID NO: 2814

SEQ ID NO: 9014 - DNA, 2230 bp, Homo sapiens; identical to SEQ ID NO: 2815
  CDS (54)..(1601)

SEQ ID NO: 9015 - protein, 515 aa, Homo sapiens [sequence omitted]

SEQ ID NO: 9016 - DNA, 1470 bp, Rhizobium loti; identical to SEQ ID NO: 2817
  CDS (1)..(1470)

SEQ ID NO: 9017 - protein, 489 aa, Rhizobium loti; identical to SEQ ID NO: 2818

SEQ ID NO: 9018 - DNA, 1428 bp, Rhizobium loti; identical to SEQ ID NO: 2819
  CDS (1)..(1428)

SEQ ID NO: 9019 - protein, 475 aa, Rhizobium loti; identical to SEQ ID NO: 2820

SEQ ID NO: 9020 - DNA, 3584 bp, Plasmodium berghei; identical to SEQ ID NO: 2821
  CDS (370)..(3222)

SEQ ID NO: 9021 - protein, 950 aa, Plasmodium berghei; identical to SEQ ID NO: 2822

SEQ ID NO: 9022 - DNA, 1491 bp, Pasteurella multocida; identical to SEQ ID NO: 2823
  CDS (1)..(1491)

SEQ ID NO: 9023 - protein, 496 aa, Pasteurella multocida; identical to SEQ ID NO: 2824

SEQ ID NO: 9024 - DNA, 1470 bp, Pseudomonas putida; identical to SEQ ID NO: 2825
  CDS (1)..(1470)

SEQ ID NO: 9025 - protein, 489 aa, Pseudomonas putida; identical to SEQ ID NO: 2826

SEQ ID NO: 9026 - DNA, 1566 bp, Trypanosoma brucei; identical to SEQ ID NO: 2827
  CDS (1)..(1566)

SEQ ID NO: 9027 - protein, 521 aa, Trypanosoma brucei; identical to SEQ ID NO: 2828

SEQ ID NO: 9028 - DNA, 1904 bp, Triticum aestivum; identical to SEQ ID NO: 2829
  CDS (153)..(1682)

SEQ ID NO: 9029 - protein, 509 aa, Triticum aestivum; identical to SEQ ID NO: 2830

SEQ ID NO: 9030 - DNA, 2098 bp, Solanum tuberosum; identical to SEQ ID NO: 2831
  CDS (27)..(1775)

SEQ ID NO: 9031 - protein, 582 aa, Solanum tuberosum; identical to SEQ ID NO: 2832

SEQ ID NO: 9032 - DNA, 1924 bp, Dunaliella bioculata; identical to SEQ ID NO: 2833
  CDS (68)..(1840)

SEQ ID NO: 9033 - protein, 590 aa, Dunaliella bioculata; identical to SEQ ID NO: 2834

SEQ ID NO: 9034 - DNA, 1976 bp, Cyanidium caldarium; identical to SEQ ID NO: 2835
  CDS (46)..(1848)

SEQ ID NO: 9035 - protein, 600 aa, Cyanidium caldarium; identical to SEQ ID NO: 2836

SEQ ID NO: 9036 - DNA, 2106 bp, Drosophila melanogaster; identical to SEQ ID NO: 2837
  CDS (28)..(1746)

SEQ ID NO: 9037 - protein, 572 aa, Drosophila melanogaster; identical to SEQ ID NO: 2838

SEQ ID NO: 9038 - DNA, 1777 bp, Mesembryanthemum crystallinum; identical to SEQ ID NO: 2839
  CDS (39)..(1589)

SEQ ID NO: 9039 - protein, 516 aa, Mesembryanthemum crystallinum; identical to SEQ ID NO: 2840

SEQ ID NO: 9040 - DNA, 1542 bp, Mus musculus; identical to SEQ ID NO: 2841
  CDS (1)..(1542)

SEQ ID NO: 9041 - protein, 513 aa, Mus musculus; identical to SEQ ID NO: 2842

SEQ ID NO: 9042 - DNA, 1485 bp, Actinobacillus actinomycetemcomitans; identical to SEQ ID NO: 2843
  CDS (1)..(1485)

SEQ ID NO: 9043 - protein, 494 aa, Actinobacillus actinomycetemcomitans; identical to SEQ ID NO: 2844

SEQ ID NO: 9044 - DNA, 1473 bp, Buchnera aphidicola; identical to SEQ ID NO: 2845
  CDS (1)..(1473)

SEQ ID NO: 9045 - protein, 490 aa, Buchnera aphidicola; identical to SEQ ID NO: 2846

SEQ ID NO: 9046 - DNA, 1473 bp, Buchnera aphidicola; identical to SEQ ID NO: 2847
  CDS (1)..(1473)

SEQ ID NO: 9047 - protein, 490 aa, Buchnera aphidicola; identical to SEQ ID NO: 2848

SEQ ID NO: 9048 - DNA, 2049 bp, Ceratitis capitata; identical to SEQ ID NO: 2849
  CDS (60)..(1640)

SEQ ID NO: 9049 - protein, 526 aa, Ceratitis capitata; identical to SEQ ID NO: 2850

SEQ ID NO: 9050 - DNA, 1524 bp, Chlamydia muridarum; identical to SEQ ID NO: 2851
  CDS (1)..(1524)

SEQ ID NO: 9051 - protein, 507 aa, Chlamydia muridarum; identical to SEQ ID NO: 2852

SEQ ID NO: 9052 - DNA, 2062 bp, Drosophila melanogaster; identical to SEQ ID NO: 2853
  CDS (303)..(1877)

SEQ ID NO: 9053 - protein, 524 aa, Drosophila melanogaster; identical to SEQ ID NO: 2854

SEQ ID NO: 9054 - DNA, 1536 bp, Emericella nidulans; identical to SEQ ID NO: 2855
  CDS (1)..(1536)

SEQ ID NO: 9055 - protein, 511 aa, Emericella nidulans; identical to SEQ ID NO: 2856

SEQ ID NO: 9056 - DNA, 1957 bp, Leuconostoc mesenteroides; identical to SEQ ID NO: 2857
  CDS (206)..(1666)

SEQ ID NO: 9057 - protein, 486 aa, Leuconostoc mesenteroides; identical to SEQ ID NO: 2858

SEQ ID NO: 9058 - DNA, 2055 bp, Macropus robustus; identical to SEQ ID NO: 2859
  CDS (94)..(1641)

SEQ ID NO: 9059 - protein, 515 aa, Macropus robustus; identical to SEQ ID NO: 2860

SEQ ID NO: 9060 - DNA, 1530 bp, Nostoc punctiforme; identical to SEQ ID NO: 2861
  CDS (1)..(1530)

SEQ ID NO: 9061 - protein, 509 aa, Nostoc punctiforme; identical to SEQ ID NO: 2862

SEQ ID NO: 9062 - DNA, 1476 bp, Rhizobium meliloti; identical to SEQ ID NO: 2863
  CDS (1)..(1476)

SEQ ID NO: 9063 - protein, 491 aa, Rhizobium meliloti; identical to SEQ ID NO: 2864

SEQ ID NO: 9064 - DNA, 2853 bp, Homo sapiens; identical to SEQ ID NO: 2865
  CDS (273)..(2648)

SEQ ID NO: 9065 - protein, 791 aa, Homo sapiens; identical to SEQ ID NO: 2866

SEQ ID NO: 9066 - DNA, 1970 bp, Arabidopsis thaliana; identical to SEQ ID NO: 2867
  CDS (60)..(1790)

SEQ ID NO: 9067 - protein, 576 aa, Arabidopsis thaliana; identical to SEQ ID NO: 2868

SEQ ID NO: 9068 - DNA, 2112 bp, Arabidopsis thaliana; identical to SEQ ID NO: 2869
  CDS (142)..(1932)

SEQ ID NO: 9069 - protein, 596 aa, Arabidopsis thaliana; identical to SEQ ID NO: 2870

SEQ ID NO: 9070 - DNA, 2161 bp, Arabidopsis thaliana; identical to SEQ ID NO: 2871
  CDS (90)..(1967)

SEQ ID NO: 9071 - protein, 625 aa, Arabidopsis thaliana; identical to SEQ ID NO: 2872

SEQ ID NO: 9072 - DNA, 1936 bp, Arabidopsis thaliana; identical to SEQ ID NO: 2873
  CDS (136)..(1686)

SEQ ID NO: 9073 - protein, 516 aa, Arabidopsis thaliana; identical to SEQ ID NO: 2874

SEQ ID NO: 9074 - DNA, 1959 bp, Arabidopsis thaliana; identical to SEQ ID NO: 2875
  CDS (194)..(1741)

SEQ ID NO: 9075 - protein, 515 aa, Arabidopsis thaliana [sequence omitted]

SEQ ID NO: 9076 - DNA, 1503 bp, Xenopus laevis; identical to SEQ ID NO: 2877
  CDS (1)..(1503)

SEQ ID NO: 9077 - protein, 500 aa, Xenopus laevis; identical to SEQ ID NO: 2878

SEQ ID NO: 9078 - DNA, 2004 bp, Arabidopsis thaliana; identical to SEQ ID NO: 2879
  CDS (51)..(1850)

SEQ ID NO: 9079 - protein, 599 aa, Arabidopsis thaliana; identical to SEQ ID NO: 2880

SEQ ID NO: 9080 - DNA, 23 bp, Artificial sequence
  Primer sequence
atgagtgaaggccccgtcaaatt

SEQ ID NO: 9081 - DNA, 25 bp, Artificial sequence
  Primer sequence
ctaattatccttcgtatcttctggc

SEQ ID NO: 9082 - protein, 24 aa, Artificial sequence
  Consensus
  Variant (2)..(2): Xaa in position 2 is any amino acid
  Variant (3)..(3): Xaa in position 3 is Leu, Val, Phe, Ile, Ala or Met
  Variant (4)..(4): Xaa in position 4 is Val, Ile, Leu or Ala
  Variant (5)..(5): Xaa in position 5 is Val or Ile
  Variant (6)..(6): Xaa in position 6 is Val, Ile, Cys or Thr
  Variant (11)..(11): Xaa in position 11 is Ile, Val, Ser or Leu
  Variant (12)..(12): Xaa in position 12 is His or Asp
  Variant (13)..(13): Xaa in position 13 is Asp or Asn
  Variant (14)..(15): Xaa in position 14 to 15 is any amino acid
  Variant (16)..(16): Xaa in position 16 is Ala, Ser, Gln or Thr
  Variant (17)..(17): Xaa in position 17 is Ala, Val or Gly
  Variant (18)..(18): Xaa in position 18 is any amino acid
  Variant (19)..(19): Xaa in position 19 is Glu, Asp, Ala or Gln
  Variant (21)..(21): Xaa in position 21 is Ala, Gly, Cys or Ser
  Variant (22)..(22): Xaa in position 22 is any amino acid
  Variant (23)..(23): Xaa in position 23 is Arg, Lys, Gln, His or Leu
  Variant (24)..(24): Xaa in position 24 is Leu, Ile or Phe
RXXXXXGPCSXXXXXXXXXYXXXX

SEQ ID NO: 9083 - protein, 42 aa, Artificial sequence; identical to SEQ ID NO: 2884
  Consensus
  Variant (1)..(1): Xaa in position 1 is Leu, Ile, Phe or Met
  Variant (2)..(2): Xaa in position 2 is any amino acid
  Variant (3)..(3): Xaa in position 3 is Ile, Val, Leu or Met
  Variant (4)..(4): Xaa in position 4 is Val, Ile or Leu
  Variant (7)..(7): Xaa in position 7 is Val, Ala or Thr
  Variant (9)..(9): Xaa in position 9 is Phe, Leu, Thr or Val
  Variant (10)..(10): Xaa in position 10 is Glu or Ala
  Variant (15)..(15): Xaa in position 15 is any or no amino acid
  Variant (16)..(17): Xaa in position 16 to 17 is any amino acid
  Variant (19)..(19): Xaa in position 19 is Trp or Tyr
  Variant (20)..(20): Xaa in position 20 is Lys or Arg
  Variant (22)..(22): Xaa in position 22 is Leu, Phe, Met or Tyr
  Variant (23)..(23): Xaa in position 23 is Ile, Val, Ala or Leu
  Variant (24)..(24): Xaa in position 24 is any amino acid
  Variant (25)..(25): Xaa in position 25 is Asp, Glu or Gln
  Variant (27)..(27): Xaa in position 27 is any amino acid
  Variant (28)..(28): Xaa in position 28 is Leu, Met, Ile, Val, Ala or Thr
  Variant (29)..(29): Xaa in position 29 is Asp, Asn or Ser
  Variant (30)..(33): Xaa in position 30 to 33 is any amino acid
  Variant (34)..(34): Xaa in position 34 is Ile, Val, Leu or Met
  Variant (35)..(36): Xaa in position 35 to 36 is any amino acid
  Variant (38)..(38): Xaa in position 38 is Leu, Ile, Met or Val
  Variant (39)..(40): Xaa in position 39 to 40 is any amino acid
  Variant (41)..(41): Xaa in position 41 is Ala, Ser, Gly, Val or Thr

SEQ ID NO: 9084 - protein, 65 aa, Artificial sequence; identical to SEQ ID NO: 2885
  Consensus
  Variant (2)..(2): Xaa in position 2 is any amino acid
  Variant (4)..(4): Xaa in position 4 is Asp, Tyr, Gln, Asn or Glu
  Variant (5)..(9): Xaa in position 5 to 9 is any amino acid
  Variant (10)..(10): Xaa in position 10 is Tyr, Phe or Leu
  Variant (11)..(12): Xaa in position 11 to 12 is any amino acid
  Variant (13)..(13): Xaa in position 13 is Asp or Glu
  Variant (14)..(15): Xaa in position 14 to 15 is any amino acid
  Variant (16)..(16): Xaa in position 16 is Ser, Ala, Thr or Cys
  Variant (17)..(17): Xaa in position 17 is Trp, Phe, Tyr, Leu or Val
  Variant (18)..(18): Xaa in position 18 is any amino acid
  Variant (19)..(19): Xaa in position 19 is Ala or Ser
  Variant (20)..(20): Xaa in position 20 is Ile or Val
  Variant (24)..(24): Xaa in position 24 is Thr, Ser or Asn
  Variant (25)..(25): Xaa in position 25 is Thr, Val, Ala, Ser or Ile
  Variant (26)..(26): Xaa in position 26 is Glu or Ala
  Variant (27)..(27): Xaa in position 27 is Ser, Asp or Asn
  Variant (29)..(29): Xaa in position 29 is any amino acid
  Variant (32)..(32): Xaa in position 32 is Glu, Gln, Phe or Met
  Variant (33)..(33): Xaa in position 33 is Leu, Met, Val, Ile or Phe
  Variant (34)..(34): Xaa in position 34 is Ala, Ser, Thr, Cys or Val
  Variant (36)..(36): Xaa in position 36 is Gly, Ala or Asn
  Variant (37)..(39): Xaa in position 37 to 39 is any amino acid
  Variant (40)..(40): Xaa in position 40 is Pro or Ala
  Variant (41)..(41): Xaa in position 41 is Val, Ile, Thr or Leu
  Variant (43)..(43): Xaa in position 43 is Phe, Met, Tyr or Ile
  Variant (46)..(46): Xaa in position 46 is any amino acid
  Variant (47)..(47): Xaa in position 47 is Thr, Ser or Arg
  Variant (48)..(48): Xaa in position 48 is any amino acid
  Variant (50)..(53): Xaa in position 50 to 53 is any amino acid
  Variant (54)..(54): Xaa in position 54 is Ala or Met
  Variant (55)..(55): Xaa in position 55 is any amino acid
  Variant (56)..(56): Xaa in position 56 is Asp, Asn or Glu
  Variant (57)..(57): Xaa in position 57 is Ala or Gly
  Variant (58)..(59): Xaa in position 58 to 59 is any amino acid
  Variant (60)..(60): Xaa in position 60 is Ala or Ser
  Variant (61)..(61): Xaa in position 61 is Ala, Ser, Val or Thr
  Variant (62)..(64): Xaa in position 62 to 64 is any amino acid
  Variant (65)..(65): Xaa in position 65 is His or Gln

SEQ ID NO: 9085 - protein, 71 aa, Artificial sequence; identical to SEQ ID NO: 2886
  Consensus
  Variant (1)..(1): Xaa in position 1 is Thr or Ser
  Variant (2)..(2): Xaa in position 2 is any amino acid
  Variant (5)..(7): Xaa in position 5 to 7 is any amino acid
  Variant (8)..(8): Xaa in position 8 is His or Phe
  Variant (9)..(9): Xaa in position 9 is Val, Ile, Leu or Ala
  Variant (10)..(10): Xaa in position 10 is Ile or Val
  Variant (11)..(11): Xaa in position 11 is Leu or Met
  Variant (14)..(14): Xaa in position 14 is Gly, Ser or Ala
  Variant (15)..(20): Xaa in position 15 to 20 is any or no amino acid
  Variant (21)..(22): Xaa in position 21 to 22 is any amino acid
  Variant (23)..(23): Xaa in position 23 is Pro, Thr or Ser
  Variant (25)..(25): Xaa in position 25 is Tyr, Phe or His
  Variant (26)..(29): Xaa in position 26 to 29 is any amino acid
  Variant (30)..(30): Xaa in position 30 is Val, Ile or Leu
  Variant (31)..(36): Xaa in position 31 to 36 is any amino acid
  Variant (37)..(37): Xaa in position 37 is Leu, Met, Ile, Tyr or His
  Variant (38)..(48): Xaa in position 38 to 48 is any or no amino acid
  Variant (49)..(51): Xaa in position 49 to 51 is any amino acid
  Variant (52)..(52): Xaa in position 52 is Leu, Ile or Val
  Variant (53)..(53): Xaa in position 53 is Met, Val, Ile or Leu
  Variant (54)..(54): Xaa in position 54 is Ile or Val
  Variant (56)..(56): Xaa in position 56 is Cys, Phe, Ala, Thr, Tyr or Val
  Variant (57)..(57): Xaa in position 57 is Ser, Asn or Ala
  Variant (59)..(59): Xaa in position 59 is Gly, Ala or Asp
  Variant (61)..(61): Xaa in position 61 is Ser or Cys
  Variant (62)..(62): Xaa in position 62 is any amino acid
  Variant (64)..(66): Xaa in position 64 to 66 is any amino acid
  Variant (67)..(67): Xaa in position 67 is Arg, Asn, Lys, Leu or Glu
  Variant (69)..(70): Xaa in position 69 to 70 is any amino acid
  Variant (71)..(71): Xaa in position 71 is Val or Ile

SEQ ID NO: 9086 - protein, 41 aa, Artificial sequence; identical to SEQ ID NO: 2887
  Consensus
  Variant (2)..(2): Xaa in position 2 is any amino acid
  Variant (4)..(4): Xaa in position 4 is Ile, Leu, Val, Ala or Met
  Variant (7)..(7): Xaa in position 7 is His, Asn, Phe or Tyr
  Variant (8)..(8): Xaa in position 8 is Leu or Ile
  Variant (9)..(10): Xaa in position 9 to 10 is any amino acid
  Variant (12)..(12): Xaa in position 12 is any amino acid
  Variant (14)..(24): Xaa in position 14 to 24 is any or no amino acid
  Variant (25)..(30): Xaa in position 25 to 30 is any amino acid
  Variant (32)..(32): Xaa in position 32 is any amino acid
  Variant (34)..(34): Xaa in position 34 is Ile or Val
  Variant (37)..(37): Xaa in position 37 is Ala, Pro, Gly, Lys, Ser or Glu
  Variant (39)..(39): Xaa in position 39 is Ile, Leu or Val
  Variant (40)..(40): Xaa in position 40 is any amino acid
  Variant (41)..(41): Xaa in position 41 is Trp, Ile, Leu or Phe

SEQ ID NO: 9087 - protein, 455 aa, Artificial sequence; identical to SEQ ID NO: 2888
  Consensus
  Variant (1)..(455): Xaa in all positions is any amino acid

SEQ ID NO: 9088 - protein, 58 aa, Artificial sequence; identical to SEQ ID NO: 6166
  Consensus
  Variant (1)..(1): Xaa in Position 1 is Ile, Val, Leu or Ala
  Variant (2)..(2): Xaa in Position 2 is Ile, Val or Leu
  Variant (3)..(3): Xaa in Position 3 is any amino acid
  Variant (4)..(4): Xaa in Position 4 is Ile, Val or Leu
  Variant (5)..(5): Xaa in Position 5 is any amino acid
  Variant (6)..(6): Xaa in Position 6 is Gly or Ala
  Variant (7)..(7): Xaa in Position 7 is any amino acid
  Variant (8)..(8): Xaa in Position 8 is Ser, Thr or Ala
  Variant (9)..(9): Xaa in Position 9 is Gly, Ala or Ser
  Variant (10)..(10): Xaa in Position 10 is Ser, Cys, Ala or Gly
  Variant (13)..(13): Xaa in Position 13 is Thr or Ser
  Variant (14)..(18): Xaa in Position 14 to 18 is any amino acid
  Variant (19)..(19): Xaa in Position 19 is Ile, Leu, Val or Met
  Variant (20)..(27): Xaa in Position 20 to 27 is any amino acid
  Variant (28)..(52): Xaa in Position 28 to 52 is no amino acid or any amino acid
  Variant (53)..(53): Xaa in Position 53 is Ile, Leu or Val
  Variant (54)..(55): Xaa in Position 54 to 55 is any amino acid
  Variant (57)..(57): Xaa in Position 57 is any amino acid
  Variant (58)..(58): Xaa in Position 58 is Tyr or Phe

SEQ ID NO: 9089 - protein, 74 aa, Artificial sequence; identical to SEQ ID NO: 6167
  Consensus
  Variant (1)..(1): Xaa in Position 1 is Ala, Ser, Val, Glu or Cys
  Variant (2)..(10): Xaa in Position 2 to 10 is any amino acid
  Variant (11)..(11): Xaa in Position 11 is Leu, Ile, Val or Met
  Variant (12)..(13): Xaa in Position 12 to 13 is any amino acid
  Variant (14)..(14): Xaa in Position 14 is Leu or Ile
  Variant (15)..(19): Xaa in Position 15 to 19 is any amino acid
  Variant (20)..(20): Xaa in Position 20 is Val, Ile, Leu, Thr or Tyr
  Variant (21)..(22): Xaa in Position 21 to 22 is any amino acid
  Variant (24)..(24): Xaa in Position 24 is any amino acid
  Variant (26)..(34): Xaa in Position 26 to 34 is any amino acid
  Variant (35)..(46): Xaa in Position 35 to 46 is no amino acid or any amino acid
  Variant (47)..(47): Xaa in Position 47 is Val, Ile or Phe
  Variant (48)..(48): Xaa in Position 48 is Ile, Val, Leu or Phe
  Variant (49)..(49): Xaa in Position 49 is Ile, Val or Leu
  Variant (50)..(50): Xaa in Position 50 is any amino acid
  Variant (51)..(51): Xaa in Position 51 is Glu or Asp
  Variant (53)..(53): Xaa in Position 53 is Ile or Leu
  Variant (54)..(54): Xaa in Position 54 is Leu, His, Tyr, Phe or Met
  Variant (55)..(59): Xaa in Position 55 to 59 is any amino acid
  Variant (60)..(63): Xaa in Position 60 to 63 is no amino acid or any amino acid
  Variant (64)..(64): Xaa in Position 64 is Leu, Ile, Val or Met
  Variant (65)..(71): Xaa in Position 65 to 71 is any amino acid
  Variant (72)..(72): Xaa in Position 72 is Ile, Val or Leu
  Variant (73)..(73): Xaa in Position 73 is Phe, Tyr or Ser
  Variant (74)..(74): Xaa in Position 74 is Val, Met, Leu, Ile or Phe

SEQ ID NO: 9090 - protein, 44 aa, Artificial sequence; identical to SEQ ID NO: 6168
  Consensus
  Variant (1)..(1): Xaa in Position 1 is Arg or Lys
  Variant (2)..(2): Xaa in Position 2 is Ile, Val, Leu or Met
  Variant (3)..(3): Xaa in Position 3 is any amino acid
  Variant (6)..(29): Xaa in Position 6 to 29 is any amino acid
  Variant (30)..(32): Xaa in Position 30 to 32 is no amino acid or any amino acid
  Variant (33)..(33): Xaa in Position 33 is Phe, Tyr, Trp or Asn
  Variant (34)..(34): Xaa in Position 34 is Ile, Val or Cys
  Variant (35)..(35): Xaa in Position 35 is any amino acid
  Variant (36)..(36): Xaa in Position 36 is Pro or Lys
  Variant (37)..(40): Xaa in Position 37 to 40 is any amino acid
  Variant (42)..(43): Xaa in Position 42 to 43 is any amino acid
  Variant (44)..(44): Xaa in Position 44 is Ile, Val, Leu, Met or Lys

SEQ ID NO: 9091 - protein, 76 aa, Artificial sequence; identical to SEQ ID NO: 2897
  Consensus
  Variant (1)..(1): Xaa in position 1 is Leu, Met or Val
  Variant (2)..(2): Xaa in position 2 is Gly or Asp
  Variant (3)..(3): Xaa in position 3 is Asp, Ser, Asn, Gln or Gly
  Variant (4)..(4): Xaa in position 4 is Leu or Arg
  Variant (5)..(6): Xaa in position 5 to 6 is any amino acid
  Variant (7)..(7): Xaa in position 7 is His or Pro
  Variant (8)..(8): Xaa in position 8 is any amino acid
  Variant (9)..(9): Xaa in position 9 is Gly, Ser, Glu or Asp
  Variant (10)..(13): Xaa in position 10 to 13 is any amino acid
  Variant (14)..(14): Xaa in position 14 is Ala or Ser
  Variant (15)..(15): Xaa in position 15 is Gln, Glu or Met
  Variant (16)..(18): Xaa in position 16 to 18 is any amino acid
  Variant (19)..(19): Xaa in position 19 is Ala or Ser
  Variant (20)..(21): Xaa in position 20 to 21 is any amino acid
  Variant (22)..(22): Xaa in position 22 is Phe, Tyr, Trp or Val
  Variant (23)..(23): Xaa in position 23 is any amino acid
  Variant (24)..(24): Xaa in position 24 is Ala, Ser or Val
  Variant (25)..(27): Xaa in position 25 to 27 is any amino acid
  Variant (28)..(28): Xaa in position 28 is Tyr, Phe or Trp
  Variant (29)..(30): Xaa in position 29 to 30 is any amino acid
  Variant (31)..(31): Xaa in position 31 is Val, Thr, Leu or Ile
  Variant (32)..(32): Xaa in position 32 is any amino acid
  Variant (34)..(34): Xaa in position 34 is Thr or Ser
  Variant (35)..(35): Xaa in position 35 is Ser or Thr
  Variant (36)..(36): Xaa in position 36 is any amino acid
  Variant (37)..(37): Xaa in position 37 is Ser, Ala or Gly
  Variant (38)..(38): Xaa in position 38 is Asn, Ile, Val or Ser
  Variant (39)..(51): Xaa in position 39 to 51 is any amino acid
  Variant (52)..(52): Xaa in position 52 is Val, Ile, Leu or Ala
  Variant (53)..(53): Xaa in position 53 is Leu, Ile, Val or Met
  Variant (54)..(55): Xaa in position 54 to 55 is any amino acid
  Variant (57)..(57): Xaa in position 57 is Asn or Asp
  Variant (58)..(58): Xaa in position 58 is any amino acid
  Variant (60)..(60): Xaa in position 60 is Lys, Gln or Arg
  Variant (61)..(61): Xaa in position 61 is Ser or Ala
  Variant (62)..(65): Xaa in position 62 to 65 is any amino acid
  Variant (66)..(66): Xaa in position 66 is any or no amino acid
  Variant (67)..(67): Xaa in position 67 is Leu, Ile, Met or Val
  Variant (68)..(73): Xaa in position 68 to 73 is any amino acid
  Variant (74)..(74): Xaa in position 74 is Pro or Ala
  Variant (75)..(75): Xaa in position 75 is any amino acid
  Variant (76)..(76): Xaa in position 76 is Tyr, Phe or Trp

SEQ ID NO: 9092 - protein, 39 aa, Artificial sequence; identical to SEQ ID NO: 2898
  Consensus
  Variant (1)..(1): Xaa in position 1 is Val, Ile, Leu, Phe or Thr
  Variant (2)..(2): Xaa in position 2 is Ile, Val, Leu, Phe or Ala
  Variant (3)..(5): Xaa in position 3 to 5 is any amino acid
  Variant (6)..(6): Xaa in position 6 is Thr, Asn or Ser
  Variant (7)..(7): Xaa in position 7 is Tyr, Phe or Pro
  Variant (8)..(8): Xaa in position 8 is Asp, Tyr, Phe or His
  Variant (10)..(12): Xaa in position 10 to 12 is any amino acid
  Variant (13)..(13): Xaa in position 13 is Asn, Asp or Ser
  Variant (14)..(17): Xaa in position 14 to 17 is any or no amino acid
  Variant (18)..(29): Xaa in position 18 to 29 is any amino acid
  Variant (30)..(30): Xaa in position 30 is Ile, Val, Leu or Phe
  Variant (31)..(31): Xaa in position 31 is any amino acid
  Variant (32)..(32): Xaa in position 32 is Phe, Val, Trp or Ile
  Variant (34)..(34): Xaa in position 34 is Glu, Ser or Cys
  Variant (36)..(36): Xaa in position 36 is Trp or His
  Variant (37)..(37): Xaa in position 37 is any amino acid
  Variant (38)..(38): Xaa in position 38 is Ala, Gly, Pro or Val
  Variant (39)..(39): Xaa in position 39 is Tyr, His or Phe

SEQ ID NO: 9093 - protein, 84 aa, Artificial sequence; identical to SEQ ID NO: 2899
  Consensus
  Variant (1)..(1): Xaa in position 1 is Ser or Leu
  Variant (2)..(2): Xaa in position 2 is any amino acid
  Variant (5)..(7): Xaa in position 5 to 7 is any amino acid
  Variant (8)..(8): Xaa in position 8 is Ala, Gly or Ser
  Variant (9)..(9): Xaa in position 9 is Leu, Phe, Met or Ile
  Variant (10)..(10): Xaa in position 10 is Ser, Thr, Arg or Glu
  Variant (11)..(11): Xaa in position 11 is Gln or Met
  Variant (12)..(12): Xaa in position 12 is any amino acid
  Variant (13)..(13): Xaa in position 13 is Ser or Ala
  Variant (14)..(14): Xaa in position 14 is any amino acid
  Variant (15)..(15): Xaa in position 15 is Ile, Leu, Met, Val or Phe
  Variant (16)..(16): Xaa in position 16 is His, Asn, Leu or Ile
  Variant (17)..(24): Xaa in position 17 to 24 is any or no amino acid
  Variant (25)..(33): Xaa in position 25 to 33 is any amino acid
  Variant (34)..(34): Xaa in position 34 is Phe, Val, Leu, Met or Ile
  Variant (35)..(42): Xaa in position 35 to 42 is any amino acid
  Variant (43)..(43): Xaa in position 43 is Ser or Thr
  Variant (44)..(44): Xaa in position 44 is Thr or Ser
  Variant (46)..(47): Xaa in position 46 to 47 is any amino acid
  Variant (48)..(48): Xaa in position 48 is Tyr, Gln or Val
  Variant (49)..(49): Xaa in position 49 is any amino acid
  Variant (50)..(50): Xaa in position 50 is Leu, Ile, Phe or Met
  Variant (51)..(51): Xaa in position 51 is any amino acid
  Variant (52)..(52): Xaa in position 52 is Ala or Ser
  Variant (53)..(53): Xaa in position 53 is Ser, Ala or Thr
  Variant (54)..(54): Xaa in position 54 is any amino acid
  Variant (55)..(55): Xaa in position 55 is Asp or Glu
  Variant (56)..(57): Xaa in position 56 to 57 is any or no amino acid
  Variant (58)..(65): Xaa in position 58 to 65 is any amino acid
  Variant (66)..(66): Xaa in position 66 is Gly, Ala, Lys or Asn
  Variant (67)..(73): Xaa in position 67 to 73 is any amino acid
  Variant (74)..(74): Xaa in position 74 is Ile, Val, Leu, Tyr or Phe
  Variant (75)..(80): Xaa in position 75 to 80 is any amino acid
  Variant (81)..(81): Xaa in position 81 is Arg or Lys
  Variant (82)..(83): Xaa in position 82 to 83 is any amino acid
  Variant (84)..(84): Xaa in position 84 is Ile, Leu, Val, Met, Phe, Ala or Thr

SEQ ID NO: 9094 - protein, 31 aa, Artificial sequence; identical to SEQ ID NO: 2900
  Consensus
  Variant (1)..(1): Xaa in position 1 is Val, Ile, Leu, Cys or Arg
  Variant (2)..(5): Xaa in position 2 to 5 is any or no amino acid
  Variant (6)..(9): Xaa in position 6 to 9 is any amino acid
  Variant (10)..(10): Xaa in position 10 is Gly, Thr, Asp or Asn
  Variant (11)..(11): Xaa in position 11 is any amino acid
  Variant (12)..(12): Xaa in position 12 is Ile, Val or Thr
  Variant (13)..(13): Xaa in position 13 is any amino acid
  Variant (14)..(14): Xaa in position 14 is Ala, Gly, Thr or Leu
  Variant (15)..(16): Xaa in position 15 to 16 is any amino acid
  Variant (17)..(17): Xaa in position 17 is Val, Ile, Ala, Leu or Phe
  Variant (18)..(19): Xaa in position 18 to 19 is any amino acid
  Variant (24)..(24): Xaa in position 24 is Ile, Val or Phe
  Variant (25)..(26): Xaa in position 25 to 26 is any amino acid
  Variant (27)..(27): Xaa in position 27 is Val, Leu, Ile, Phe or Met
  Variant (28)..(29): Xaa in position 28 to 29 is any amino acid
  Variant (31)..(31): Xaa in position 31 is Glu or Gln

SEQ ID NO: 9095 - protein, 101 aa, Artificial sequence; identical to SEQ ID NO: 1322
  Consensus
  Variant (2)..(23): Xaa in Position 2 to 23 is any amino acid
  Variant (24)..(30): Xaa in Position 24 to 30 is no amino acid or any amino acid
  Variant (32)..(32): Xaa in Position 32 is any amino acid
  Variant (37)..(39): Xaa in Position 37 to 39 is any amino acid
  Variant (41)..(55): Xaa in Position 41 to 55 is any amino acid
  Variant (56)..(56): Xaa in Position 56 is no amino acid or any amino acid
  Variant (57)..(57): Xaa in Position 57 is no amino acid or any amino acid
  Variant (59)..(62): Xaa in Position 59 to 62 is any amino acid
  Variant (64)..(64): Xaa in Position 64 is any amino acid
  Variant (67)..(70): Xaa in Position 67 to 70 is any amino acid
  Variant (72)..(72): Xaa in Position 72 is any amino acid
  Variant (75)..(77): Xaa in Position 75 to 77 is any amino acid
  Variant (79)..(85): Xaa in Position 79 to 85 is any amino acid
  Variant (87)..(90): Xaa in Position 87 to 90 is any amino acid
  Variant (92)..(93): Xaa in Position 92 to 93 is any amino acid
  Variant (97)..(97): Xaa in Position 97 is any amino acid
  Variant (100)..(100): Xaa in Position 100 is any amino acid

SEQ ID NO: 9096 - protein, 642 aa, Artificial sequence; identical to SEQ ID NO: 2902
  Consensus
  Variant (1)..(642): Xaa in all positions is any amino acid

SEQ ID NO: 9097 - protein, 64 aa, Artificial sequence
  Consensus
  Variant (1)..(1): Xaa in position 1 is Trp, Tyr, Phe, Asn or Leu
  Variant (2)..(13): Xaa in position 2 to 13 is any amino acid
  Variant (14)..(14): Xaa in position 14 is Ile, Leu, Val, Met, Thr or Phe
  Variant (15)..(23): Xaa in position 15 to 23 is any amino acid
  Variant (24)..(24): Xaa in position 24 is Gly, Ala or Ser
  Variant (25)..(27): Xaa in position 25 to 27 is any amino acid
  Variant (28)..(28): Xaa in position 28 is Phe, Tyr or Trp
  Variant (29)..(29): Xaa in position 29 is Glu, Asp or Gly
  Variant (30)..(30): Xaa in position 30 is Gly, Val, Thr or Tyr
  Variant (31)..(31): Xaa in position 31 is any amino acid
  Variant (32)..(32): Xaa in position 32 is Arg, Lys, His, Ala or Pro
  Variant (33)..(39): Xaa in position 33 to 39 is any or no amino acid
  Variant (40)..(45): Xaa in position 40 to 45 is any amino acid
  Variant (46)..(46): Xaa in position 46 is Phe, His, Pro, Val or Leu
  Variant (47)..(50): Xaa in position 47 to 50 is any amino acid
  Variant (51)..(51): Xaa in position 51 is His or Asn
  Variant (52)..(53): Xaa in position 52 to 53 is any amino acid
  Variant (55)..(55): Xaa in position 55 is Leu, Met, Phe, Val or Ile
  Variant (56)..(63): Xaa in position 56 to 63 is any amino acid
  Variant (64)..(64): Xaa in position 64 is Leu, Met, Ile, Phe or Thr
XXXXXXXXXXXXXXXXXXXXXXXXXXXXXXXXXXXXXXXXXXXXXXXXXXXXXRXXXXXXXXXX

SEQ ID NO: 9098 - protein, 61 aa, Artificial sequence
  Consensus
  Variant (2)..(2): Xaa in position 2 is any amino acid
  Variant (3)..(3): Xaa in position 3 is Gly or Ser
  Variant (4)..(4): Xaa in position 4 is Ile, Val or Cys
  Variant (5)..(5): Xaa in position 5 is Thr, Ile or Val
  Variant (6)..(6): Xaa in position 6 is Arg, Lys, Gln, Asn or Tyr
  Variant (7)..(8): Xaa in position 7 to 8 is any amino acid
  Variant (9)..(9): Xaa in position 9 is Val, Ile, Leu, Thr, Ala or Met
  Variant (10)..(24): Xaa in position 10 to 24 is any or no amino acid
  Variant (25)..(44): Xaa in position 25 to 44 is any amino acid
  Variant (45)..(45): Xaa in position 45 is Glu or Gly
  Variant (46)..(46): Xaa in position 46 is any amino acid
  Variant (47)..(47): Xaa in position 47 is Phe, Gly, Ile, Trp or Met
  Variant (48)..(48): Xaa in position 48 is any amino acid
  Variant (49)..(49): Xaa in position 49 is Thr, Cys, Ser, Ala or Val
  Variant (50)..(50): Xaa in position 50 is Gly, Ser, Ala or Asn
  Variant (51)..(51): Xaa in position 51 is Thr, Ser, Asn or Ala
  Variant (52)..(54): Xaa in position 52 to 54 is any amino acid
  Variant (55)..(55): Xaa in position 55 is Ile, Val or Leu
  Variant (56)..(57): Xaa in position 56 to 57 is any amino acid
  Variant (58)..(58): Xaa in position 58 is Val, Ile, Met or Leu
  Variant (59)..(60): Xaa in position 59 to 60 is any amino acid
  Variant (61)..(61): Xaa in position 61 is Ile, Val, Leu, Phe or Tyr
LXXXXXXXXXXXXXXXXXXXXXXXXXXXXXXXXXXXXXXXXXXXXXXXXXXXXXXXXXXXX

SEQ ID NO: 9099 - protein, 55 aa, Artificial sequence
  Consensus
  Variant (1)..(1): Xaa in position 1 is Trp, Tyr, Phe, Leu or His
  Variant (2)..(2): Xaa in position 2 is any amino acid
  Variant (3)..(3): Xaa in position 3 is Asn, Asp, Glu or Gly
  Variant (4)..(4): Xaa in position 4 is Gly, Asp or Leu
  Variant (5)..(6): Xaa in position 5 to 6 is any amino acid
  Variant (7)..(7): Xaa in position 7 is Val, Leu or Ile
  Variant (8)..(11): Xaa in position 8 to 11 is any amino acid
  Variant (13)..(13): Xaa in position 13 is any amino acid
  Variant (14)..(14): Xaa in position 14 is Val, Ile, Leu or Thr
  Variant (15)..(15): Xaa in position 15 is His or Ser
  Variant (16)..(16): Xaa in position 16 is Val, Ile or Phe
  Variant (17)..(17): Xaa in position 17 is any amino acid
  Variant (18)..(18): Xaa in position 18 is Thr, Asp or Ser
  Variant (19)..(19): Xaa in position 19 is His, Ser, Arg, Trp or Asn
  Variant (20)..(21): Xaa in position 20 to 21 is any amino acid
  Variant (22)..(22): Xaa in position 22 is His, Leu or Gln
  Variant (23)..(23): Xaa in position 23 is Tyr, His or Gly
  Variant (24)..(24): Xaa in position 24 is Gly, Ser or Ala
  Variant (25)..(25): Xaa in position 25 is any amino acid
  Variant (26)..(26): Xaa in position 26 is Ser, Gly, Ala or Thr
  Variant (27)..(27): Xaa in position 27 is Val, Ile, Ala or Thr
  Variant (28)..(28): Xaa in position 28 is Phe, Tyr, Trp or Leu
  Variant (29)..(29): Xaa in position 29 is Glu, Gly or Asp
  Variant (30)..(30): Xaa in position 30 is Gly, Thr or Val
  Variant (31)..(31): Xaa in position 31 is any amino acid
  Variant (32)..(32): Xaa in position 32 is Arg or His
  Variant (33)..(33): Xaa in position 33 is any amino acid
  Variant (34)..(34): Xaa in position 34 is Tyr, Trp, Ile or Leu
  Variant (35)..(41): Xaa in position 35 to 41 is any or no amino acid
  Variant (42)..(45): Xaa in position 42 to 45 is any amino acid
  Variant (46)..(46): Xaa in position 46 is Phe or Leu
  Variant (47)..(47): Xaa in position 47 is Arg, Lys, Phe, Ala or Met
  Variant (48)..(50): Xaa in position 48 to 50 is any amino acid
  Variant (52)..(53): Xaa in position 52 to 53 is any amino acid
  Variant (55)..(55): Xaa in position 55 is Leu, Phe or Met
XXXXXXXXXXXAXXXXXXXXXXXXXXXXXXXXXXXXXXXXXXXXXXXXXXHXXRX

SEQ ID NO: 9100 - protein, 64 aa, Artificial sequence
  Consensus
  Variant (1)..(1): Xaa in position 1 is Lys or His
  Variant (2)..(4): Xaa in position 2 to 4 is any amino acid
  Variant (5)..(5): Xaa in position 5 is any or no amino acid
  Variant (6)..(6): Xaa in position 6 is Tyr, Trp or Leu
  Variant (7)..(7): Xaa in position 7 is Leu, Met, Ile, Val or Asn
  Variant (8)..(8): Xaa in position 8 is any or no amino acid
  Variant (9)..(15): Xaa in position 9 to 15 is any amino acid
  Variant (16)..(16): Xaa in position 16 is Ala, Ser or Asp
  Variant (17)..(19): Xaa in position 17 to 19 is any amino acid
  Variant (20)..(20): Xaa in position 20 is Gly, Asn or Asp
  Variant (21)..(22): Xaa in position 21 to 22 is any amino acid
  Variant (23)..(23): Xaa in position 23 is Glu, Asp or Thr
  Variant (24)..(24): Xaa in position 24 is Ala or Gly
  Variant (25)..(25): Xaa in position 25 is Ile, Leu, Met or Phe
  Variant (26)..(26): Xaa in position 26 is any amino acid
  Variant (27)..(27): Xaa in position 27 is Leu, Met or Val
  Variant (28)..(28): Xaa in position 28 is Asp, Asn, Ser or Thr
  Variant (29)..(30): Xaa in position 29 to 30 is any amino acid
  Variant (31)..(31): Xaa in position 31 is Gly or Asp
  Variant (32)..(32): Xaa in position 32 is any amino acid
  Variant (33)..(33): Xaa in position 33 is Val, Ile or Leu
  Variant (34)..(34): Xaa in position 34 is any amino acid
  Variant (36)..(36): Xaa in position 36 is Gly, Ala, Cys or Thr
  Variant (37)..(37): Xaa in position 37 is any amino acid
  Variant (38)..(38): Xaa in position 38 is Gly, Ala or Thr
  Variant (39)..(39): Xaa in position 39 is any amino acid
  Variant (40)..(40): Xaa in position 40 is Asn or Cys
  Variant (41)..(41): Xaa in position 41 is Ile, Leu, Val or Phe
  Variant (42)..(42): Xaa in position 42 is Phe or Trp
  Variant (43)..(43): Xaa in position 43 is any amino acid
  Variant (44)..(44): Xaa in position 44 is Val or Ile
  Variant (45)..(46): Xaa in position 45 to 46 is any amino acid
  Variant (47)..(47): Xaa in position 47 is Gly, Asp, Lys or Asn
  Variant (48)..(48): Xaa in position 48 is any amino acid
  Variant (49)..(49): Xaa in position 49 is Leu, Ile, Val or Ala
  Variant (50)..(50): Xaa in position 50 is any amino acid
  Variant (51)..(51): Xaa in position 51 is Thr or Ser
  Variant (53)..(54): Xaa in position 53 to 54 is any or no amino acid
  Variant (55)..(58): Xaa in position 55 to 58 is any amino acid
  Variant (60)..(60): Xaa in position 60 is any amino acid
  Variant (61)..(61): Xaa in position 61 is Gly or Ser
  Variant (62)..(62): Xaa in position 62 is Ile or Phe
  Variant (64)..(64): Xaa in position 64 is Arg or Gln
XXXXXXXXXXXXXXXXXXXXXXXXXXXXXXXXXXEXXXXXXXXXXXXXXXXPXXXXXXLXXXTX

SEQ ID NO: 9101 - protein, 20 aa, Artificial sequence
  Consensus
  Variant (1)..(1): Xaa in position 1 is Ala or Phe
  Variant (2)..(2): Xaa in position 2 is Asp, Thr, Ser, Asn or Glu
  Variant (3)..(3): Xaa in position 3 is Glu, Gly or Gln
  Variant (4)..(4): Xaa in position 4 is any amino acid
  Variant (5)..(5): Xaa in position 5 is Phe or Trp
  Variant (6)..(6): Xaa in position 6 is any amino acid
  Variant (7)..(7): Xaa in position 7 is Thr, Ser or Val
  Variant (8)..(8): Xaa in position 8 is Gly, Ser or Asn
  Variant (9)..(9): Xaa in position 9 is Thr or Ser
  Variant (10)..(10): Xaa in position 10 is Ala, Met, Gly, Thr or Val
  Variant (11)..(12): Xaa in position 11 to 12 is any amino acid
  Variant (13)..(13): Xaa in position 13 is Ile, Val, Leu, Ser or Ala
  Variant (14)..(14): Xaa in position 14 is any amino acid
  Variant (15)..(15): Xaa in position 15 is Pro, Trp or Asn
  Variant (16)..(16): Xaa in position 16 is Val or Ile
  Variant (17)..(18): Xaa in position 17 to 18 is any amino acid
  Variant (19)..(19): Xaa in position 19 is Val, Ile or Leu
  Variant (20)..(20): Xaa in position 20 is Asp, Gly, Glu or Asn
XXXXXXXXXXXXXXXXXXXX

SEQ ID NO: 9102 - protein, 278 aa, Artificial sequence
  Consensus
  Variant (1)..(278): Xaa in all positions is any amino acid
GXXVXXXXAXXXVXXHXXXYGXXXFEGXRXYXXXXXXXXXXXFXXXXHXXRLXXSAXXXXXXXXXXXXXXXXXXXXXXXXXXXXXXXYXRXXXXXGXXXXXXXXXXXXXXXXXXXXXXXXXXXXXXXXXXXXGXXXXXXXXXRXXXXXXXXXXKXXXXYXXXXXXXXEAXXXGXXXXXXLXXXGXXXEXXXXNXFXVXXGXXXTPXXXXXXLXGITRXXXXXXXXXXGXXXXEXXXXXXXXXXXADEXFXXGTAXEXXPXXXXDXXXXXXXXXXGXXT

SEQ ID NO: 9103 - protein, 37 aa, Artificial sequence
  Consensus
  Variant (2)..(2): Xaa in position 2 is any amino acid
  Variant (3)..(3): Xaa in position 3 is Ser, Thr, Ala, Gly, Cys or Ile
  Variant (4)..(5): Xaa in position 4 to 5 is any amino acid
  Variant (7)..(7): Xaa in position 7 is Leu, Ile, Val, Met, Phe, Ala or Cys
  Variant (8)..(8): Xaa in position 8 is Phe or Tyr
  Variant (9)..(14): Xaa in position 9 to 14 is any or no amino acid
  Variant (15)..(20): Xaa in position 15 to 20 is any amino acid
  Variant (21)..(21): Xaa in position 21 is Leu, Ile, Val, Met, Phe or Ala
  Variant (22)..(22): Xaa in position 22 is any amino acid
  Variant (24)..(25): Xaa in position 24 to 25 is any or no amino acid
  Variant (26)..(31): Xaa in position 26 to 31 is any amino acid
  Variant (32)..(32): Xaa in position 32 is Leu, Ile, Val or Met
  Variant (33)..(33): Xaa in position 33 is any amino acid
  Variant (34)..(34): Xaa in position 34 is Gly or Ser
  Variant (35)..(35): Xaa in position 35 is Leu, Ile, Val or Met
  Variant (36)..(36): Xaa in position 36 is any amino acid
  Variant (37)..(37): Xaa in position 37 is Lys or Arg
EXXXXNXXXXXXXXXXXXXXXXTXXXXXXXXXXXXXX

SEQ ID NO: 9104 - protein, 48 aa, Artificial sequence
  Consensus
  Variant (2)..(2): Xaa in position 2 is Ile, Val or Leu
  Variant (4)..(6): Xaa in position 4 to 6 is any amino acid
  Variant (7)..(7): Xaa in position 7 is Gly, Ala, Ser, Thr or Val
  Variant (8)..(8): Xaa in position 8 is Val, Ile, Leu or Met
  Variant (9)..(10): Xaa in position 9 to 10 is any amino acid
  Variant (11)..(13): Xaa in position 11 to 13 is any or no amino acid
  Variant (14)..(14): Xaa in position 14 is Phe, Ile, Leu or Met
  Variant (15)..(16): Xaa in position 15 to 16 is any amino acid
  Variant (17)..(17): Xaa in position 17 is Ile, Val or Leu
  Variant (18)..(18): Xaa in position 18 is Leu, Ile, Val, Ala or Cys
  Variant (19)..(20): Xaa in position 19 to 20 is any amino acid
  Variant (21)..(21): Xaa in position 21 is Ser, Ala, Thr, Phe or Cys
  Variant (22)..(22): Xaa in position 22 is Asp or Gln
  Variant (23)..(23): Xaa in position 23 is any amino acid
  Variant (24)..(24): Xaa in position 24 is Ile, Val, Leu, Phe or Ala
  Variant (25)..(25): Xaa in position 25 is Met or Ile
  Variant (26)..(26): Xaa in position 26 is Val, Ile or Leu
  Variant (27)..(27): Xaa in position 27 is Ala or Ser
  Variant (31)..(31): Xaa in position 31 is Leu or Met
  Variant (32)..(32): Xaa in position 32 is Gly or Ala
  Variant (33)..(33): Xaa in position 33 is Val, Ile, Met, Ala or Leu
  Variant (34)..(34): Xaa in position 34 is Glu or Gln
  Variant (35)..(35): Xaa in position 35 is Ile, Leu, Val, Met, Cys or Tyr
  Variant (36)..(39): Xaa in position 36 to 39 is any amino acid
  Variant (40)..(40): Xaa in position 40 is Val, Leu, Ile or Met
  Variant (41)..(43): Xaa in position 41 to 43 is any amino acid
  Variant (44)..(44): Xaa in position 44 is Gln or Glu
  Variant (45)..(45): Xaa in position 45 is Lys, Arg, Glu or Gln
  Variant (46)..(46): Xaa in position 46 is any amino acid
  Variant (47)..(47): Xaa in position 47 is Ile, Leu, Met or Ala
  Variant (48)..(48): Xaa in position 48 is Ile, Val, Thr, Leu or Ala
KXEXXXXXXXXXXXXXXXXXXXXXXXXRGDXXXXXXXXXXXXXXXXXX

SEQ ID NO: 9105 - protein, 63 aa, Artificial sequence
  Consensus
  Variant (1)..(1): Xaa in position 1 is Val, Ile, Ala, Cys, Ser or Thr
  Variant (2)..(2): Xaa in position 2 is Ile, Val or Ala
  Variant (3)..(3): Xaa in position 3 is any or no amino acid
  Variant (5)..(5): Xaa in position 5 is Thr or Ser
  Variant (6)..(6): Xaa in position 6 is Gln, Asn, His or Glu
  Variant (7)..(7): Xaa in position 7 is Met, Leu, Val or Ile
  Variant (8)..(8): Xaa in position 8 is Leu, Met or Val
  Variant (9)..(9): Xaa in position 9 is any amino acid
  Variant (10)..(10): Xaa in position 10 is Ser or Thr
  Variant (11)..(11): Xaa in position 11 is Met or Leu
  Variant (12)..(16): Xaa in position 12 to 16 is any amino acid
  Variant (17)..(17): Xaa in position 17 is Pro or Ala
  Variant (20)..(20): Xaa in position 20 is Ala or Ser
  Variant (22)..(22): Xaa in position 22 is Val, Ala, Ile, Thr or Gly
  Variant (23)..(23): Xaa in position 23 is any amino acid
  Variant (25)..(25): Xaa in position 25 is Val or Ile
  Variant (26)..(26): Xaa in position 26 is Ala, Gly, Phe, Ser, Tyr or Thr
  Variant (27)..(27): Xaa in position 27 is any amino acid
  Variant (28)..(28): Xaa in position 28 is Ala or Ser
  Variant (29)..(29): Xaa in position 29 is Val, Ile or Thr
  Variant (30)..(32): Xaa in position 30 to 32 is any amino acid
  Variant (33)..(33): Xaa in position 33 is Thr, Ala, Ser or Val
  Variant (34)..(34): Xaa in position 34 is Asp, Ser or Asn
  Variant (35)..(35): Xaa in position 35 is Ala, Cys, Ser or Gly
  Variant (36)..(36): Xaa in position 36 is Val, Ile, Thr or Leu
  Variant (37)..(37): Xaa in position 37 is Met or Leu
  Variant (39)..(39): Xaa in position 39 is Ser or Thr
  Variant (40)..(40): Xaa in position 40 is Gly, Ala, Asn or Glu
  Variant (42)..(42): Xaa in position 42 is Thr or Ser
  Variant (43)..(43): Xaa in position 43 is Ala, Ser or Thr
  Variant (44)..(44): Xaa in position 44 is any amino acid
  Variant (46)..(46): Xaa in position 46 is any amino acid
  Variant (47)..(47): Xaa in position 47 is Tyr, Phe, His, Asp or Trp
  Variant (49)..(50): Xaa in position 49 to 50 is any amino acid
  Variant (51)..(51): Xaa in position 51 is Ala, Thr, Ser, Val or Cys
  Variant (52)..(52): Xaa in position 52 is Val, Ile, Leu or Ala
  Variant (53)..(54): Xaa in position 53 to 54 is any amino acid
  Variant (55)..(55): Xaa in position 55 is Met, Leu or Gln
  Variant (56)..(57): Xaa in position 56 to 57 is any amino acid
  Variant (58)..(58): Xaa in position 58 is Ile, Val, Thr or Ala
  Variant (59)..(61): Xaa in position 59 to 61 is any amino acid
  Variant (62)..(62): Xaa in position 62 is Ala, Thr, Val, Ile or Ser
  Variant (63)..(63): Xaa in position 63 is Glu, Asp or Gln
XXXAXXXXXXXXXXXXXTRXEXXDXXXXXXXXXXXXXLXXEXXXGXXPXXXXXXXXXXXXXXX

SEQ ID NO: 9106 - protein, 346 aa, Artificial sequence
  Consensus
  Variant (1)..(346): Xaa in all positions is any amino acid
GXXXXXRXNFSHGXXXXHXXXXXXXXXXXXXXXXXXXXXXXXXXXXDXXGPXIRXXXXXXXXXXXXXXXXXXGXXXXXXXXXXXXXXXXXXXXXXXXXXXXXXXXXXXXXGXXXXXXDGXXXXXVXXXXXXXXXXXXXXXXXXXXXXXXGXXXXXKXXNXXXXXXXXXXXXXKDXXDXXXXXXXXXXXDXXXXSFXXXXXDXXXXXXXXXXXXXXXXXXXXXXXXXKXEXXXXXXXXXXXXXIXXXXDXXMVARGDLGXEXXXXXXXXXQKXXIXXXXXXXXXVIXATQMLXSMXXXPXPTRAEXXDVXNAXXDGXDXXMLSXEXAXGXXPXXXVXXMXXXXXXXE

SEQ ID NO: 9107 - protein, 20 aa, Artificial sequence
  Consensus
  Variant (1)..(1): Xaa in position 1 is Leu, Val, Ile, Met, Phe or Ala
  Variant (2)..(4): Xaa in position 2 to 4 is any amino acid
  Variant (5)..(5): Xaa in position 5 is Gln, Asn, Gly or Leu
  Variant (6)..(6): Xaa in position 6 is Gln or Ile
  Variant (7)..(8): Xaa in position 7 to 8 is any amino acid
  Variant (10)..(10): Xaa in position 10 is any amino acid
  Variant (11)..(11): Xaa in position 11 is Asn, Asp, Ser, Pro or Glu
  Variant (12)..(14): Xaa in position 12 to 14 is any amino acid
  Variant (15)..(15): Xaa in position 15 is Tyr, Phe, Leu or Ser
  Variant (16)..(16): Xaa in position 16 is Tyr or Phe
  Variant (17)..(19): Xaa in position 17 to 19 is any amino acid
  Variant (20)..(20): Xaa in position 20 is Ile, Leu, Val or Phe
XXXXXXXXGXXXXXXXXXXX

SEQ ID NO: 9108 - protein, 94 aa, Artificial sequence; identical to SEQ ID NO: 1313
  Consensus
  Variant (1)..(1): Xaa in Position 1 is Asp or Gly
  Variant (2)..(9): Xaa in Position 2 to 9 is any amino acid
  Variant (10)..(10): Xaa in Position 10 is Met, Val, Ile, Leu or Ser
  Variant (11)..(26): Xaa in Position 11 to 26 is any amino acid
  Variant (27)..(27): Xaa in Position 27 is no amino acid or any amino acid
  Variant (28)..(28): Xaa in Position 28 is no amino acid or any amino acid
  Variant (29)..(29): Xaa in Position 29 is Asp, Gly or Ser
  Variant (30)..(34): Xaa in Position 30 to 34 is any amino acid
  Variant (35)..(35): Xaa in Position 35 is Leu, Ala, Phe, Val or Ile
  Variant (36)..(52): Xaa in Position 36 to 52 is any amino acid
  Variant (53)..(57): Xaa in Position 53 to 57 is no amino acid or any amino acid
  Variant (58)..(58): Xaa in Position 58 is Ser, Thr, Asn or Gly
  Variant (60)..(60): Xaa in Position 60 is Thr or Ser
  Variant (61)..(61): Xaa in Position 61 is any amino acid
  Variant (62)..(62): Xaa in Position 62 is Ala, Ser, Thr, Gly or Cys
  Variant (63)..(63): Xaa in Position 63 is Asn or Gln
  Variant (64)..(66): Xaa in Position 64 to 66 is any amino acid
  Variant (67)..(67): Xaa in Position 67 is Leu, Ile, Val, Met or Thr
  Variant (68)..(72): Xaa in Position 68 to 72 is any amino acid
  Variant (73)..(73): Xaa in Position 73 is no amino acid or any amino acid
  Variant (74)..(74): Xaa in Position 74 is no amino acid or any amino acid
  Variant (75)..(75): Xaa in Position 75 is Pro, Arg or Ser
  Variant (76)..(84): Xaa in Position 76 to 84 is any amino acid
  Variant (85)..(85): Xaa in Position 85 is Ala, Ser, Gly or Cys
  Variant (87)..(90): Xaa in Position 87 to 90 is any amino acid
  Variant (92)..(92): Xaa in Position 92 is any amino acid
  Variant (93)..(93): Xaa in Position 93 is Gly, Ala, Gln or Asp
  Variant (94)..(94): Xaa in Position 94 is Gly, Ala or Ser

SEQ ID NO: 9109 - protein, 89 aa, Artificial sequence; identical to SEQ ID NO: 1314
  Consensus
  Variant (2)..(2): Xaa in Position 2 is any amino acid
  Variant (3)..(3): Xaa in Position 3 is Val, Ile, Leu or Cys
  Variant (4)..(8): Xaa in Position 4 to 8 is any amino acid
  Variant (9)..(9): Xaa in Position 9 is Leu, Ile, Met, Val or Thr
  Variant (10)..(20): Xaa in Position 10 to 20 is any amino acid
  Variant (21)..(21): Xaa in Position 21 is Leu, Val, Ile or Met
  Variant (22)..(22): Xaa in Position 22 is any amino acid
  Variant (23)..(23): Xaa in Position 23 is Leu, Val, Ile, Met or Thr
  Variant (24)..(24): Xaa in Position 24 is His, Tyr or Phe
  Variant (25)..(25): Xaa in Position 25 is Leu, Met, Ile, Val or Cys
  Variant (28)..(28): Xaa in Position 28 is Ala or Ser
  Variant (30)..(30): Xaa in Position 30 is Leu, Ile, Phe or Val
  Variant (31)..(32): Xaa in Position 31 to 32 is any amino acid
  Variant (33)..(33): Xaa in Position 33 is Ala, Gly, Ser or Ile
  Variant (34)..(48): Xaa in Position 34 to 48 is any amino acid
  Variant (49)..(52): Xaa in Position 49 to 52 is no amino acid or any amino acid
  Variant (54)..(57): Xaa in Position 54 to 57 is any amino acid
  Variant (58)..(58): Xaa in Position 58 is Cys, Gly or Ser
  Variant (59)..(59): Xaa in Position 59 is Leu, Gly, Phe or Ala
  Variant (60)..(60): Xaa in Position 60 is Ser, Thr or Tyr
  Variant (62)..(62): Xaa in Position 62 is any amino acid
  Variant (63)..(63): Xaa in Position 63 is Leu, Gly, Ile, Met or Val
  Variant (64)..(67): Xaa in Position 64 to 67 is any amino acid
  Variant (68)..(68): Xaa in Position 68 is Gly or Glu
  Variant (69)..(69): Xaa in Position 69 is Ser or Ala
  Variant (70)..(70): Xaa in Position 70 is Val, Leu, Ile or Met
  Variant (71)..(71): Xaa in Position 71 is Leu, Val or Ile
  Variant (72)..(85): Xaa in Position 72 to 85 is any amino acid
  Variant (86)..(86): Xaa in Position 86 is Lys, Arg or Gln
  Variant (87)..(88): Xaa in Position 87 to 88 is any amino acid
  Variant (89)..(89): Xaa in Position 89 is Gly, Ala or Met

SEQ ID NO: 9110 - protein, 464 aa, Artificial sequence; identical to SEQ ID NO: 1315
  Consensus
  Variant (1)..(464): Xaa in all Positions is any amino acid

SEQ ID NO: 9111 - protein, 122 aa, Artificial sequence; identical to SEQ ID NO: 1316
  Consensus
  Variant (1)..(1): Xaa in Position 1 is Asp or Glu
  Variant (2)..(2): Xaa in Position 2 is Phe or Leu
  Variant (6)..(7): Xaa in Position 6 to 7 is any amino acid
  Variant (9)..(9): Xaa in Position 9 is any amino acid
  Variant (11)..(11): Xaa in Position 11 is Thr or Ser
  Variant (12)..(13): Xaa in Position 12 to 13 is any amino acid
  Variant (14)..(14): Xaa in Position 14 is Met or Val
  Variant (15)..(20): Xaa in Position 15 to 20 is any amino acid
  Variant (21)..(21): Xaa in Position 21 is no amino acid or any amino acid
  Variant (22)..(22): Xaa in Position 22 is no amino acid or any amino acid
  Variant (23)..(23): Xaa in Position 23 is Ala, Ser or Thr
  Variant (24)..(24): Xaa in Position 24 is Thr, Ser or Ala
  Variant (25)..(25): Xaa in Position 25 is any amino acid
  Variant (26)..(26): Xaa in Position 26 is Gly or Asn
  Variant (28)..(28): Xaa in Position 28 is any amino acid
  Variant (30)..(30): Xaa in Position 30 is Tyr or Phe
  Variant (31)..(31): Xaa in Position 31 is any amino acid
  Variant (34)..(35): Xaa in Position 34 to 35 is any amino acid
  Variant (37)..(38): Xaa in Position 37 to 38 is any amino acid
  Variant (39)..(39): Xaa in Position 39 is Leu or Phe
  Variant (41)..(42): Xaa in Position 41 to 42 is any amino acid
  Variant (43)..(43): Xaa in Position 43 is Val, Met or Ile
  Variant (44)..(47): Xaa in Position 44 to 47 is any amino acid
  Variant (49)..(53): Xaa in Position 49 to 53 is no amino acid or any amino acid
  Variant (54)..(55): Xaa in Position 54 to 55 is any amino acid
  Variant (56)..(56): Xaa in Position 56 is Ala or Glu
  Variant (57)..(57): Xaa in Position 57 is Gly or Ala
  Variant (58)..(58): Xaa in Position 58 is Leu, Met or Val
  Variant (59)..(59): Xaa in Position 59 is Phe or Met
  Variant (60)..(61): Xaa in Position 60 to 61 is any amino acid
  Variant (62)..(62): Xaa in Position 62 is Ser or Thr
  Variant (63)..(63): Xaa in Position 63 is Gly or Thr
  Variant (65)..(66): Xaa in Position 65 to 66 is any amino acid
  Variant (69)..(69): Xaa in Position 69 is Ile or Leu
  Variant (70)..(70): Xaa in Position 70 is any amino acid
  Variant (71)..(71): Xaa in Position 71 is Leu, Val or Ile
  Variant (72)..(74): Xaa in Position 72 to 74 is any amino acid
  Variant (75)..(75): Xaa in Position 75 is Leu, Val or Ser
  Variant (76)..(76): Xaa in Position 76 is any amino acid
  Variant (77)..(77): Xaa in Position 77 is no amino acid or any amino acid
  Variant (78)..(78): Xaa in Position 78 is no amino acid or any amino acid
  Variant (79)..(79): Xaa in Position 79 is Pro or Arg
  Variant (80)..(80): Xaa in Position 80 is Pro or Cys
  Variant (81)..(81): Xaa in Position 81 is any amino acid
  Variant (82)..(82): Xaa in Position 82 is Ser or Gly
  Variant (83)..(83): Xaa in Position 83 is Ile or Val
  Variant (84)..(84): Xaa in Position 84 is Leu or Ile
  Variant (85)..(85): Xaa in Position 85 is any amino acid
  Variant (86)..(86): Xaa in Position 86 is Asp or Ser
  Variant (87)..(88): Xaa in Position 87 to 88 is any amino acid
  Variant (89)..(89): Xaa in Position 89 is Ala or Ser
  Variant (91)..(91): Xaa in Position 91 is Val, Ile or Ala
  Variant (92)..(94): Xaa in Position 92 to 94 is any amino acid
  Variant (96)..(96): Xaa in Position 96 is Ala or Cys
  Variant (97)..(97): Xaa in Position 97 is Gly or Ala
  Variant (98)..(98): Xaa in Position 98 is Gly or Ala
  Variant (99)..(99): Xaa in Position 99 is any amino acid
  Variant (100)..(100): Xaa in Position 100 is Ala, Ser or Gly
  Variant (101)..(101): Xaa in Position 101 is any amino acid
  Variant (102)..(102): Xaa in Position 102 is Leu or Phe
  Variant (103)..(103): Xaa in Position 103 is Ser, Thr or Cys
  Variant (104)..(104): Xaa in Position 104 is Gln or Gly
  Variant (106)..(106): Xaa in Position 106 is any amino acid
  Variant (107)..(107): Xaa in Position 107 is Val, Leu, Ile or Ala
  Variant (108)..(108): Xaa in Position 108 is any amino acid
  Variant (110)..(110): Xaa in Position 110 is Val, Ile or Ala
  Variant (111)..(111): Xaa in Position 111 is any amino acid
  Variant (112)..(112): Xaa in Position 112 is Pro or Ala
  Variant (113)..(113): Xaa in Position 113 is any amino acid
  Variant (115)..(115): Xaa in Position 115 is Gly or Asn
  Variant (116)..(116): Xaa in Position 116 is any amino acid
  Variant (117)..(117): Xaa in Position 117 is Tyr or His
  Variant (118)..(118): Xaa in Position 118 is Leu, Ile or Met
  Variant (119)..(119): Xaa in Position 119 is Thr or Arg
  Variant (120)..(120): Xaa in Position 120 is any amino acid
  Variant (121)..(121): Xaa in Position 121 is Glu or Asp
  Variant (122)..(122): Xaa in Position 122 is Asp or Glu

SEQ ID NO: 9112 - protein, 50 aa, Artificial sequence; identical to SEQ ID NO: 1317
  Consensus
  Variant (1)..(1): Xaa in Position 1 is Asp, Glu or Met
  Variant (2)..(2): Xaa in Position 2 is Ile, Val or Thr
  Variant (3)..(3): Xaa in Position 3 is His or Glu
  Variant (4)..(5): Xaa in Position 4 to 5 is any amino acid
  Variant (8)..(8): Xaa in Position 8 is any amino acid
  Variant (9)..(9): Xaa in Position 9 is Leu, Ile or Val
  Variant (10)..(10): Xaa in Position 10 is Ile, Val or Leu
  Variant (11)..(11): Xaa in Position 11 is any amino acid
  Variant (12)..(12): Xaa in Position 12 is Leu or Met
  Variant (16)..(17): Xaa in Position 16 to 17 is any amino acid
  Variant (19)..(21): Xaa in Position 19 to 21 is any amino acid
  Variant (23)..(23): Xaa in Position 23 is Leu, Val or Ile
  Variant (24)..(24): Xaa in Position 24 is any amino acid
  Variant (26)..(26): Xaa in Position 26 is Leu, Ile, Val or Met
  Variant (27)..(27): Xaa in Position 27 is any amino acid
  Variant (28)..(28): Xaa in Position 28 is Arg or Lys
  Variant (29)..(29): Xaa in Position 29 is Ile or Met
  Variant (30)..(31): Xaa in Position 30 to 31 is any amino acid
  Variant (32)..(32): Xaa in Position 32 is Trp, Phe or Leu
  Variant (33)..(33): Xaa in Position 33 is Ala or Cys
  Variant (34)..(35): Xaa in Position 34 to 35 is any amino acid
  Variant (36)..(36): Xaa in Position 36 is Asn, Gln or His
  Variant (37)..(37): Xaa in Position 37 is any amino acid
  Variant (38)..(38): Xaa in Position 38 is Ile, Val, Leu or Met
  Variant (39)..(39): Xaa in Position 39 is any amino acid
  Variant (40)..(40): Xaa in Position 40 is Leu, Val, Ile or Thr
  Variant (42)..(42): Xaa in Position 42 is any amino acid
  Variant (47)..(47): Xaa in Position 47 is Leu or Ile
  Variant (48)..(48): Xaa in Position 48 is Trp or Phe
  Variant (49)..(49): Xaa in Position 49 is any amino acid
  Variant (50)..(50): Xaa in Position 50 is Ala or Ser

SEQ ID NO: 9113 - protein, 62 aa, Artificial sequence; identical to SEQ ID NO: 1318
  Consensus
  Variant (1)..(1): Xaa in Position 1 is Leu, Ile or Met
  Variant (2)..(2): Xaa in Position 2 is Lys, Arg or Glu
  Variant (3)..(8): Xaa in Position 3 to 8 is any amino acid
  Variant (10)..(10): Xaa in Position 10 is Ser, Ala or Leu
  Variant (11)..(11): Xaa in Position 11 is Val, Ile or Met
  Variant (12)..(12): Xaa in Position 12 is Ser or Thr
  Variant (13)..(13): Xaa in Position 13 is Leu, Ile or Val
  Variant (14)..(14): Xaa in Position 14 is any amino acid
  Variant (15)..(15): Xaa in Position 15 is Leu or Phe
  Variant (16)..(16): Xaa in Position 16 is Ser or Gly
  Variant (18)..(18): Xaa in Position 18 is any amino acid
  Variant (19)..(19): Xaa in Position 19 is Leu, Met, Ile or Val
  Variant (20)..(20): Xaa in Position 20 is Gly, Ala or Cys
  Variant (23)..(23): Xaa in Position 23 is Ile, Val or Met
  Variant (25)..(25): Xaa in Position 25 is Ser, Thr or Ala
  Variant (26)..(26): Xaa in Position 26 is Val, Ile, Met or Ala
  Variant (27)..(27): Xaa in Position 27 is Leu or Ile
  Variant (28)..(28): Xaa in Position 28 is Val, Leu or Ile
  Variant (29)..(29): Xaa in Position 29 is Gly or Ala
  Variant (30)..(32): Xaa in Position 30 to 32 is any amino acid
  Variant (33)..(33): Xaa in Position 33 is Phe or Leu
  Variant (34)..(34): Xaa in Position 34 is Ile or Val
  Variant (35)..(40): Xaa in Position 35 to 40 is any amino acid
  Variant (41)..(41): Xaa in Position 41 is Arg, Lys or Gln
  Variant (42)..(42): Xaa in Position 42 is Lys or Gln
  Variant (43)..(44): Xaa in Position 43 to 44 is any amino acid
  Variant (48)..(48): Xaa in Position 48 is Ile, Val, Leu or Met
  Variant (50)..(50): Xaa in Position 50 is Gln or Lys
  Variant (51)..(51): Xaa in Position 51 is Ser, Ala or Gly
  Variant (53)..(53): Xaa in Position 53 is any amino acid
  Variant (54)..(54): Xaa in Position 54 is Leu, Ile or Met
  Variant (55)..(56): Xaa in Position 55 to 56 is any amino acid
  Variant (57)..(57): Xaa in Position 57 is Met or Ala
  Variant (58)..(58): Xaa in Position 58 is Ala or Gly
  Variant (59)..(61): Xaa in Position 59 to 61 is any amino acid
  Variant (62)..(62): Xaa in Position 62 is Ile, Leu, Met or Val

SEQ ID NO: 9114 - protein, 65 aa, Artificial sequence; identical to SEQ ID NO: 1319
  Consensus
  Variant (1)..(1): Xaa in Position 1 is Gly or Gln
  Variant (2)..(2): Xaa in Position 2 is Ile, Gly or Leu
  Variant (3)..(3): Xaa in Position 3 is any amino acid
  Variant (5)..(6): Xaa in Position 5 to 6 is any amino acid
  Variant (7)..(7): Xaa in Position 7 is Pro or Glu
  Variant (8)..(9): Xaa in Position 8 to 9 is any amino acid
  Variant (10)..(10): Xaa in Position 10 is Thr or Ser
  Variant (11)..(11): Xaa in Position 11 is Asn or Ser
  Variant (12)..(12): Xaa in Position 12 is any amino acid
  Variant (13)..(13): Xaa in Position 13 is Val, Phe or Ile
  Variant (14)..(14): Xaa in Position 14 is Phe, Trp, Tyr or Thr
  Variant (15)..(15): Xaa in Position 15 is Leu, Ile or Val
  Variant (16)..(16): Xaa in Position 16 is Asp, Ala or Asn
  Variant (17)..(20): Xaa in Position 17 to 20 is any amino acid
  Variant (21)..(21): Xaa in Position 21 is no amino acid or any amino acid
  Variant (22)..(22): Xaa in Position 22 is Met, Ile, Leu or Phe
  Variant (23)..(24): Xaa in Position 23 to 24 is any amino acid
  Variant (25)..(25): Xaa in Position 25 is Asp, Ser or Asn
  Variant (26)..(26): Xaa in Position 26 is any amino acid
  Variant (27)..(27): Xaa in Position 27 is Leu, Phe or Ala
  Variant (28)..(31): Xaa in Position 28 to 31 is any amino acid
  Variant (32)..(36): Xaa in Position 32 to 36 is no amino acid or any amino acid
  Variant (37)..(37): Xaa in Position 37 is Val, Ile or Cys
  Variant (38)..(38): Xaa in Position 38 is Lys, Ile or Arg
  Variant (39)..(39): Xaa in Position 39 is Leu or Ile
  Variant (40)..(40): Xaa in Position 40 is any amino acid
  Variant (41)..(41): Xaa in Position 41 is Gly, Ala or Asp
  Variant (42)..(42): Xaa in Position 42 is any amino acid
  Variant (44)..(44): Xaa in Position 44 is Ile, Val or Leu
  Variant (45)..(45): Xaa in Position 45 is Ala, Ser or Val
  Variant (46)..(46): Xaa in Position 46 is Phe, Cys or Leu
  Variant (48)..(48): Xaa in Position 48 is any amino acid
  Variant (49)..(49): Xaa in Position 49 is Gln or His
  Variant (50)..(50): Xaa in Position 50 is no amino acid or any amino acid
  Variant (51)..(51): Xaa in Position 51 is Val, Leu, Ile or Thr
  Variant (52)..(54): Xaa in Position 52 to 54 is any amino acid
  Variant (55)..(55): Xaa in Position 55 is Ser, Ala or Thr
  Variant (56)..(58): Xaa in Position 56 to 58 is any amino acid
  Variant (59)..(59): Xaa in Position 59 is Val, Leu, Ile or Cys
  Variant (60)..(60): Xaa in Position 60 is Lys, Ile or Glu
  Variant (61)..(61): Xaa in Position 61 is any amino acid
  Variant (62)..(62): Xaa in Position 62 is Val, Ala or Cys
  Variant (63)..(64): Xaa in Position 63 to 64 is any amino acid
  Variant (65)..(65): Xaa in Position 65 is Glu, Asp or Arg

SEQ ID NO: 9115 - protein, 432 aa, Artificial sequence; identical to SEQ ID NO: 1320
  Consensus
  Variant (1)..(432): Xaa on all Positions is any amino acid

SEQ ID NO: 9116 - protein, 432 aa, Artificial sequence; identical to SEQ ID NO: 1321
  Consensus
  Variant (1)..(432): Xaa in all Positions is any amino acid

SEQ ID NO: 9117 - protein, 101 aa, Artificial sequence; identical to SEQ ID NO: 1322
  Consensus
  Variant (2)..(23): Xaa in Position 2 to 23 is any amino acid
  Variant (24)..(30): Xaa in Position 24 to 30 is no amino acid or any amino acid
  Variant (32)..(32): Xaa in Position 32 is any amino acid
  Variant (37)..(39): Xaa in Position 37 to 39 is any amino acid
  Variant (41)..(55): Xaa in Position 41 to 55 is any amino acid
  Variant (56)..(56): Xaa in Position 56 is no amino acid or any amino acid
  Variant (57)..(57): Xaa in Position 57 is no amino acid or any amino acid
  Variant (59)..(62): Xaa in Position 59 to 62 is any amino acid
  Variant (64)..(64): Xaa in Position 64 is any amino acid
  Variant (67)..(70): Xaa in Position 67 to 70 is any amino acid
  Variant (72)..(72): Xaa in Position 72 is any amino acid
  Variant (75)..(77): Xaa in Position 75 to 77 is any amino acid
  Variant (79)..(85): Xaa in Position 79 to 85 is any amino acid
  Variant (87)..(90): Xaa in Position 87 to 90 is any amino acid
  Variant (92)..(93): Xaa in Position 92 to 93 is any amino acid
  Variant (97)..(97): Xaa in Position 97 is any amino acid
  Variant (100)..(100): Xaa in Position 100 is any amino acid

SEQ ID NO: 9118 - protein, 23 aa, Artificial sequence
  Consensus
  Variant (1)..(1): Xaa in position 1 is Leu or Met
  Variant (2)..(2): Xaa in position 2 is any amino acid
  Variant (3)..(3): Xaa in position 3 is Arg, Lys or Ser
  Variant (6)..(6): Xaa in position 6 is Ile, Val or Leu
  Variant (8)..(8): Xaa in position 8 is any amino acid
  Variant (9)..(9): Xaa in position 9 is Leu or Val
  Variant (10)..(11): Xaa in position 10 to 11 is any amino acid
  Variant (12)..(12): Xaa in position 12 is Thr or Ser
  Variant (13)..(15): Xaa in position 13 to 15 is any amino acid
  Variant (16)..(16): Xaa in position 16 is Tyr, Leu, Phe or Met
  Variant (17)..(21): Xaa in position 17 to 21 is any amino acid
  Variant (22)..(22): Xaa in position 22 is Pro or Ala
  Variant (23)..(23): Xaa in position 23 is Leu, Phe or Val
XXXLPXPXXXXXXXXXXXXXXXX

SEQ ID NO: 9119 - protein, 27 aa, Artificial sequence
  Consensus
  Variant (1)..(1): Xaa in position 1 is Gln, Pro or Met
  Variant (2)..(3): Xaa in position 2 to 3 is any amino acid
  Variant (4)..(4): Xaa in position 4 is Arg or Lys
  Variant (5)..(5): Xaa in position 5 is Ala, Ser or Thr
  Variant (6)..(6): Xaa in position 6 is Ala, Thr, Ser or Gly
  Variant (7)..(7): Xaa in position 7 is any amino acid
  Variant (8)..(8): Xaa in position 8 is Leu, Ile, Met or Val
  Variant (9)..(10): Xaa in position 9 to 10 is any amino acid
  Variant (11)..(11): Xaa in position 11 is Ser, Ala, Thr or Tyr
  Variant (12)..(12): Xaa in position 12 is any amino acid
  Variant (13)..(13): Xaa in position 13 is Leu, Val, Ile, Met or Ala
  Variant (14)..(14): Xaa in position 14 is any amino acid
  Variant (15)..(15): Xaa in position 15 is Phe, Ile or Tyr
  Variant (16)..(18): Xaa in position 16 to 18 is any amino acid
  Variant (19)..(19): Xaa in position 19 is Leu, Ile, Val or Met
  Variant (20)..(20): Xaa in position 20 is Arg, Lys, Gln or Asp
  Variant (21)..(23): Xaa in position 21 to 23 is any amino acid
  Variant (25)..(25): Xaa in position 25 is any amino acid
  Variant (26)..(26): Xaa in position 26 is Pro, Thr, Val or Ala
  Variant (27)..(27): Xaa in position 27 is Asp or Glu
XXXXXXXXXXXXXXXXXXXXXXXLXXX

SEQ ID NO: 9120 - protein, 16 aa, Artificial sequence
  Consensus
  Variant (1)..(1): Xaa in position 1 is Leu, Phe, Met or Ile
  Variant (2)..(2): Xaa in position 2 is Cys, Ser, Asp or Thr
  Variant (3)..(3): Xaa in position 3 is Met or Ser
  Variant (4)..(5): Xaa in position 4 to 5 is any amino acid
  Variant (6)..(6): Xaa in position 6 is Tyr, Phe or Trp
  Variant (7)..(8): Xaa in position 7 to 8 is any amino acid
  Variant (9)..(9): Xaa in position 9 is Leu or Met
  Variant (11)..(11): Xaa in position 11 is Gly, Asn, Ala or Cys
  Variant (12)..(12): Xaa in position 12 is any amino acid
  Variant (13)..(13): Xaa in position 13 is Ser, Thr or Ala
  Variant (15)..(15): Xaa in position 15 is any amino acid
  Variant (16)..(16): Xaa in position 16 is Pro or Ala
XXXXXXXXXFXXXRXX

SEQ ID NO: 9121 - protein, 45 aa, Artificial sequence; identical to SEQ ID NO: 2913
  Consensus
  Variant (1)..(1): Xaa in position 1 is Leu, Ile, Val, Met or Phe
  Variant (2)..(2): Xaa in position 2 is Gly or Ala
  Variant (3)..(3): Xaa in position 3 is any amino acid
  Variant (4)..(4): Xaa in position 4 is Leu or Phe
  Variant (5)..(5): Xaa in position 5 is Thr or Ser
  Variant (6)..(6): Xaa in position 6 is Ser, Thr or Ala
  Variant (7)..(8): Xaa in position 7 to 8 is any amino acid
  Variant (9)..(9): Xaa in position 9 is Arg, Phe or Thr
  Variant (10)..(11): Xaa in position 10 to 11 is any amino acid
  Variant (13)..(15): Xaa in position 13 to 15 is any amino acid
  Variant (16)..(16): Xaa in position 16 is Arg, Tyr or His
  Variant (17)..(26): Xaa in position 17 to 26 is any amino acid
  Variant (27)..(30): Xaa in position 27 to 30 is any or no amino acid
  Variant (31)..(31): Xaa in position 31 is Leu or Glu
  Variant (32)..(33): Xaa in position 32 to 33 is any amino acid
  Variant (34)..(34): Xaa in position 34 is any or no amino acid
  Variant (35)..(35): Xaa in position 35 is Ile or Val
  Variant (36)..(36): Xaa in position 36 is Asp, His or Glu
  Variant (37)..(37): Xaa in position 37 is any amino acid
  Variant (38)..(38): Xaa in position 38 is Ala, Ser or Gly
  Variant (39)..(39): Xaa in position 39 is Leu, Ser, Val or Ala
  Variant (41)..(41): Xaa in position 41 is any amino acid
  Variant (42)..(42): Xaa in position 42 is Leu, Val or Ile
  Variant (43)..(43): Xaa in position 43 is Cys, Val or Thr
  Variant (44)..(44): Xaa in position 44 is Leu, Phe or Met

SEQ ID NO: 9122 - protein, 31 aa, Artificial sequence; identical to SEQ ID NO: 2914
  Consensus
  Variant (2)..(2): Xaa in position 2 is Trp or Phe
  Variant (3)..(3): Xaa in position 3 is Tyr or Phe
  Variant (4)..(4): Xaa in position 4 is Asp or Cys
  Variant (6)..(6): Xaa in position 6 is any or no amino acid
  Variant (7)..(7): Xaa in position 7 is Leu, Phe or Ile
  Variant (8)..(8): Xaa in position 8 is any amino acid
  Variant (9)..(9): Xaa in position 9 is Leu, Ile, Phe or Thr
  Variant (10)..(10): Xaa in position 10 is Ile, Val, Phe or Leu
  Variant (11)..(11): Xaa in position 11 is Val, Ile or Met
  Variant (12)..(13): Xaa in position 12 to 13 is any amino acid
  Variant (14)..(14): Xaa in position 14 is Asn, Asp, Cys or Gly
  Variant (15)..(15): Xaa in position 15 is Gly, Ala, Ser or Val
  Variant (16)..(16): Xaa in position 16 is any amino acid
  Variant (17)..(17): Xaa in position 17 is Ala, Ser or Thr
  Variant (18)..(18): Xaa in position 18 is Gly, Ala, Thr or Cys
  Variant (19)..(19): Xaa in position 19 is Ile, Val or Phe
  Variant (20)..(20): Xaa in position 20 is any amino acid
  Variant (21)..(21): Xaa in position 21 is Phe, Trp, Ala or Gly
  Variant (22)..(22): Xaa in position 22 is Glu or Asp
  Variant (23)..(23): Xaa in position 23 is His or Ser
  Variant (24)..(24): Xaa in position 24 is Ser, Thr, Phe or Ala
  Variant (25)..(26): Xaa in position 25 to 26 is any amino acid
  Variant (27)..(27): Xaa in position 27 is Asp or Glu
  Variant (28)..(28): Xaa in position 28 is Gly or Ala
  Variant (29)..(30): Xaa in position 29 to 30 is any amino acid
  Variant (31)..(31): Xaa in position 31 is Val, Thr or Ile

SEQ ID NO: 9123 - protein, 43 aa, Artificial sequence; identical to SEQ ID NO: 2915
  Consensus
  Variant (2)..(2): Xaa in position 2 is Ala or Ser
  Variant (3)..(4): Xaa in position 3 to 4 is any amino acid
  Variant (6)..(6): Xaa in position 6 is Met, Leu, Gln, Val or Ile
  Variant (7)..(7): Xaa in position 7 is any amino acid
  Variant (8)..(8): Xaa in position 8 is Phe, Leu, Ile or Met
  Variant (10)..(10): Xaa in position 10 is any amino acid
  Variant (11)..(11): Xaa in position 11 is Ala or Thr
  Variant (12)..(12): Xaa in position 12 is Tyr, Phe, His, Val or Asn
  Variant (13)..(13): Xaa in position 13 is Tyr, Phe, Leu or Arg
  Variant (14)..(15): Xaa in position 14 to 15 is any amino acid
  Variant (16)..(16): Xaa in position 16 is Tyr, Leu, Thr or Met
  Variant (17)..(17): Xaa in position 17 is Gly, Lys or Ser
  Variant (18)..(22): Xaa in position 18 to 22 is any amino acid
  Variant (23)..(23): Xaa in position 23 is Tyr, Leu or Phe
  Variant (25)..(25): Xaa in position 25 is Pro, Ser or Ala
  Variant (26)..(26): Xaa in position 26 is Ala, Cys, Val, Ile or Ser
  Variant (27)..(27): Xaa in position 27 is Ser, Met, Ala or Thr
  Variant (28)..(28): Xaa in position 28 is Thr or Val
  Variant (29)..(29): Xaa in position 29 is Lys, Arg, Ala or Ser
  Variant (30)..(30): Xaa in position 30 is any amino acid
  Variant (31)..(31): Xaa in position 31 is Phe or Tyr
  Variant (32)..(33): Xaa in position 32 to 33 is any amino acid
  Variant (34)..(34): Xaa in position 34 is Gly or Ser
  Variant (35)..(35): Xaa in position 35 is Arg or Met
  Variant (36)..(36): Xaa in position 36 is Thr or Ser
  Variant (37)..(37): Xaa in position 37 is Glu, Ser, Ala or Thr
  Variant (38)..(38): Xaa in position 38 is any amino acid
  Variant (39)..(39): Xaa in position 39 is Ile, Gly, Val, Met or Cys
  Variant (40)..(40): Xaa in position 40 is Arg, Pro, Asn or Cys
  Variant (41)..(41): Xaa in position 41 is Ser, Pro, Thr, Ile or Val
  Variant (42)..(42): Xaa in position 42 is Val, Ala, Gln or Cys
  Variant (43)..(43): Xaa in position 43 is Ser, Thr or Asn

SEQ ID NO: 9124 - protein, 24 aa, Artificial sequence
  Consensus
  Variant (2)..(5): Xaa in position 2 to 5 is any amino acid
  Variant (6)..(6): Xaa in position 6 is Lys or Arg
  Variant (7)..(7): Xaa in position 7 is any amino acid
  Variant (8)..(8): Xaa in position 8 is Ala, Cys, Ser or Thr
  Variant (9)..(10): Xaa in position 9 to 10 is any amino acid
  Variant (11)..(11): Xaa in position 11 is Gly or Ala
  Variant (12)..(12): Xaa in position 12 is any amino acid
  Variant (13)..(13): Xaa in position 13 is Gly or Ala
  Variant (14)..(14): Xaa in position 14 is any amino acid
  Variant (15)..(15): Xaa in position 15 is Asp or Glu
  Variant (16)..(16): Xaa in position 16 is Arg or Lys
  Variant (17)..(17): Xaa in position 17 is His or Tyr
  Variant (18)..(18): Xaa in position 18 is Leu or Phe
  Variant (19)..(19): Xaa in position 19 is Tyr, Phe, Asn or Leu
  Variant (20)..(20): Xaa in position 20 is Ala or Gly
  Variant (21)..(21): Xaa in position 21 is Leu, Met or Ile
  Variant (22)..(23): Xaa in position 22 to 23 is any amino acid
  Variant (24)..(24): Xaa in position 24 is Leu, Met, Ile, Val or Thr
HXXXXXXXXXXXXXXXXXXXXXXX

SEQ ID NO: 9125 - protein, 65 aa, Artificial sequence; identical to SEQ ID NO: 1307
  Consensus
  Variant (4)..(4): Xaa in Position 4 is Glu, Gln, Lys or Ala
  Variant (5)..(5): Xaa in Position 5 is Thr or Ser
  Variant (6)..(6): Xaa in Position 6 is any amino acid
  Variant (7)..(7): Xaa in Position 7 is Trp, Phe or Tyr
  Variant (8)..(8): Xaa in Position 8 is Asn, Ser or Ala
  Variant (9)..(13): Xaa in Position 9 to 13 is any amino acid
  Variant (14)..(14): Xaa in Position 14 is Gln or Thr
  Variant (15)..(15): Xaa in Position 15 is Gly or Ser
  Variant (16)..(16): Xaa in Position 16 is no amino acid or any amino acid
  Variant (17)..(18): Xaa in Position 17 to 18 is any amino acid
  Variant (19)..(19): Xaa in Position 19 is Asp, Asn or Glu
  Variant (20)..(21): Xaa in Position 20 to 21 is any amino acid
  Variant (23)..(25): Xaa in Position 23 to 25 is any amino acid
  Variant (26)..(26): Xaa in Position 26 is Gly or Ser
  Variant (27)..(29): Xaa in Position 27 to 29 is any amino acid
  Variant (30)..(30): Xaa in Position 30 is Ala, Met, Val or Ile
  Variant (31)..(36): Xaa in Position 31 to 36 is any amino acid
  Variant (37)..(37): Xaa in Position 37 is Leu, Ile, Val, Ala or Phe
  Variant (38)..(44): Xaa in Position 38 to 44 is any amino acid
  Variant (45)..(55): Xaa in Position 45 to 55 is no amino acid or any amino acid
  Variant (56)..(56): Xaa in Position 56 is Thr, Ser, Ala or Val
  Variant (58)..(60): Xaa in Position 58 to 60 is any amino acid
  Variant (62)..(62): Xaa in Position 62 is Ala, Thr or Pro
  Variant (63)..(64): Xaa in Position 63 to 64 is any amino acid

SEQ ID NO: 9126 - protein, 137 aa, Artificial sequence; identical to SEQ ID NO: 6194
  Consensus
  Variant (1)..(1): Xaa in position 1 is Lys, Arg or Gln
  Variant (2)..(2): Xaa in position 2 is Ile, Lys, Val or Leu
  Variant (3)..(6): Xaa in position 3 to 6 is any amino acid
  Variant (7)..(7): Xaa in position 7 is Pro, Ser or Thr
  Variant (8)..(8): Xaa in position 8 is Ile, Val or Leu
  Variant (9)..(9): Xaa in position 9 is Val or Ala
  Variant (10)..(10): Xaa in position 10 is Glu or Asp
  Variant (11)..(11): Xaa in position 11 is Met, Leu, Ile or Val
  Variant (12)..(12): Xaa in position 12 is Asp, Gln or Leu
  Variant (16)..(16): Xaa in position 16 is Met or Gln
  Variant (17)..(17): Xaa in position 17 is Thr or Ala
  Variant (18)..(18): Xaa in position 18 is Arg or Lys
  Variant (19)..(19): Xaa in position 19 is Ile or Val
  Variant (20)..(20): Xaa in position 20 is Ile, Phe or Met
  Variant (22)..(23): Xaa in position 22 to 23 is any amino acid
  Variant (24)..(24): Xaa in position 24 is Ile or Val
  Variant (25)..(25): Xaa in position 25 is Lys, Arg or Gln
  Variant (26)..(27): Xaa in position 26 to 27 is any amino acid
  Variant (28)..(28): Xaa in position 28 is Leu or Phe
  Variant (29)..(29): Xaa in position 29 is Ile, Val or Leu
  Variant (30)..(30): Xaa in position 30 is any amino acid
  Variant (31)..(31): Xaa in position 31 is Pro or Thr
  Variant (32)..(32): Xaa in position 32 is Tyr, Phe, His or Asn
  Variant (33)..(33): Xaa in position 33 is Leu, Val or Met
  Variant (34)..(34): Xaa in position 34 is Asp, Glu or Asn
  Variant (35)..(35): Xaa in position 35 is Leu, Val, Ile or Met
  Variant (36)..(38): Xaa in position 36 to 38 is any amino acid
  Variant (39)..(39): Xaa in position 39 is Tyr, Phe, Ser or Thr
  Variant (40)..(40): Xaa in position 40 is Tyr or Phe
  Variant (41)..(41): Xaa in position 41 is Asp or Ser
  Variant (43)..(43): Xaa in position 43 is Gly or Ser
  Variant (44)..(44): Xaa in position 44 is Ile, Leu, Val or Met
  Variant (45)..(46): Xaa in position 45 to 46 is any amino acid
  Variant (48)..(48): Xaa in position 48 is Asp or Asn
  Variant (49)..(49): Xaa in position 49 is any amino acid
  Variant (51)..(51): Xaa in position 51 is any amino acid
  Variant (53)..(53): Xaa in position 53 is Gln, Lys or Arg
  Variant (54)..(54): Xaa in position 54 is Val or Ile
  Variant (56)..(56): Xaa in position 56 is any amino acid
  Variant (57)..(57): Xaa in position 57 is Asp or Glu
  Variant (58)..(58): Xaa in position 58 is Ser, Ala or Thr
  Variant (59)..(59): Xaa in position 59 is Ala or Ser
  Variant (60)..(60): Xaa in position 60 is any amino acid
  Variant (61)..(61): Xaa in position 61 is Ala or Glu
  Variant (62)..(62): Xaa in position 62 is any amino acid
  Variant (63)..(63): Xaa in position 63 is Lys, Leu, Gln or Met
  Variant (64)..(64): Xaa in position 64 is Lys, Glu, Gln or Arg
  Variant (65)..(65): Xaa in position 65 is Tyr, His or Val
  Variant (66)..(66): Xaa in position 66 is any amino acid
  Variant (67)..(67): Xaa in position 67 is Val, Met or Ile
  Variant (68)..(68): Xaa in position 68 is Gly or Ala
  Variant (69)..(69): Xaa in position 69 is Val or Ile
  Variant (77)..(77): Xaa in position 77 is Asp or Asn
  Variant (78)..(78): Xaa in position 78 is Glu, Ala, Ser or Gln
  Variant (79)..(79): Xaa in position 79 is any amino acid
  Variant (81)..(81): Xaa in position 81 is Val, Met, Ile or Leu
  Variant (82)..(82): Xaa in position 82 is any amino acid
  Variant (84)..(84): Xaa in position 84 is Phe or Tyr
  Variant (85)..(85): Xaa in position 85 is any amino acid
  Variant (88)..(88): Xaa in position 88 is any amino acid
  Variant (91)..(91): Xaa in position 91 is Lys, Arg or Leu
  Variant (95)..(95): Xaa in position 95 is Gly or Ala
  Variant (97)..(97): Xaa in position 97 is Ile or Leu
  Variant (99)..(99): Xaa in position 99 is Asn, Ser or Ala
  Variant (100)..(100): Xaa in position 100 is Ile, Ala or Tyr
  Variant (101)..(101): Xaa in position 101 is Leu or Ile
  Variant (102)..(102): Xaa in position 102 is Gly, Asn or Asp
  Variant (104)..(104): Xaa in position 104 is Thr or Val
  Variant (105)..(105): Xaa in position 105 is Val or Ile
  Variant (108)..(108): Xaa in position 108 is any amino acid
  Variant (109)..(109): Xaa in position 109 is Pro, Ala or Ser
  Variant (111)..(111): Xaa in position 111 is Ile, Val, Leu or Met
  Variant (112)..(112): Xaa in position 112 is Cys, Ile, Val or Met
  Variant (113)..(114): Xaa in position 113 to 114 is any amino acid
  Variant (115)..(115): Xaa in position 115 is Ile, Val or Leu
  Variant (117)..(117): Xaa in position 117 is Arg, Lys or Pro
  Variant (118)..(118): Xaa in position 118 is Leu, Ile, Ala or Tyr
  Variant (119)..(119): Xaa in position 119 is Val, Ile or Leu
  Variant (120)..(121): Xaa in position 120 to 121 is any amino acid
  Variant (123)..(124): Xaa in position 123 to 124 is any amino acid
  Variant (125)..(125): Xaa in position 125 is Pro or Ala
  Variant (127)..(127): Xaa in position 127 is Ile, Cys, Val or Thr
  Variant (128)..(128): Xaa in position 128 is Ile or Val
  Variant (129)..(129): Xaa in position 129 is Gly or Ala
  Variant (133)..(133): Xaa in position 133 is Phe, His or Tyr
  Variant (134)..(134): Xaa in position 134 is Gly or Ala
  Variant (136)..(136): Xaa in position 136 is Gln, Ile or Leu

SEQ ID NO: 9127 - protein, 166 aa, Artificial sequence; identical to SEQ ID NO: 6195
  Consensus
  Variant (1)..(1): Xaa in position 1 is Met or Gln
  Variant (2)..(2): Xaa in position 2 is Tyr, His or Phe
  Variant (4)..(6): Xaa in position 4 to 6 is any amino acid
  Variant (8)..(8): Xaa in position 8 is Ile or Val
  Variant (9)..(10): Xaa in position 9 to 10 is any amino acid
  Variant (13)..(13): Xaa in position 13 is any amino acid
  Variant (14)..(14): Xaa in position 14 is Ala or Ser
  Variant (15)..(15): Xaa in position 15 is Ser or Cys
  Variant (16)..(16): Xaa in position 16 is Phe, Met, Leu or Ile
  Variant (17)..(18): Xaa in position 17 to 18 is any amino acid
  Variant (19)..(19): Xaa in position 19 is Ala, Gly or Ser
  Variant (20)..(20): Xaa in position 20 is Leu, Tyr, Ile or Phe
  Variant (21)..(25): Xaa in position 21 to 25 is any amino acid
  Variant (26)..(26): Xaa in position 26 is Leu, Val or Ile
  Variant (27)..(27): Xaa in position 27 is Tyr, Phe or Trp
  Variant (28)..(28): Xaa in position 28 is Leu, Met, Phe or Ser
  Variant (29)..(29): Xaa in position 29 is Ser, Thr or Ala
  Variant (32)..(32): Xaa in position 32 is Asn, Asp or Ser
  Variant (35)..(35): Xaa in position 35 is Leu, Ser or Met
  Variant (37)..(37): Xaa in position 37 is any amino acid
  Variant (39)..(39): Xaa in position 39 is Asp or His
  Variant (40)..(40): Xaa in position 40 is Gly, Ala or His
  Variant (41)..(41): Xaa in position 41 is any amino acid
  Variant (43)..(43): Xaa in position 43 is Lys or Arg
  Variant (44)..(44): Xaa in position 44 is Asp or Ala
  Variant (45)..(45): Xaa in position 45 is Ile, Val, Leu or Thr
  Variant (47)..(49): Xaa in position 47 to 49 is any amino acid
  Variant (50)..(50): Xaa in position 50 is Tyr, Phe, Ala or Val
  Variant (51)..(51): Xaa in position 51 is any or no amino acid
  Variant (52)..(57): Xaa in position 52 to 57 is any amino acid
  Variant (58)..(58): Xaa in position 58 is Phe, Tyr or Leu
  Variant (59)..(61): Xaa in position 59 to 61 is any amino acid
  Variant (62)..(62): Xaa in position 62 is Gly, Lys, Asn or Ser
  Variant (63)..(63): Xaa in position 63 is Ile, Leu or Val
  Variant (64)..(64): Xaa in position 64 is any amino acid
  Variant (66)..(66): Xaa in position 66 is any amino acid
  Variant (67)..(67): Xaa in position 67 is His or Tyr
  Variant (68)..(68): Xaa in position 68 is any amino acid
  Variant (73)..(73): Xaa in position 73 is Met or Ala
  Variant (74)..(74): Xaa in position 74 is Val or Ala
  Variant (76)..(77): Xaa in position 76 to 77 is any amino acid
  Variant (78)..(78): Xaa in position 78 is Leu, Ile, Met or Val
  Variant (79)..(79): Xaa in position 79 is Lys or Arg
  Variant (80)..(80): Xaa in position 80 is Ser or Trp
  Variant (81)..(81): Xaa in position 81 is any amino acid
  Variant (83)..(83): Xaa in position 83 is Gly or Ala
  Variant (84)..(84): Xaa in position 84 is Tyr, Phe or Met
  Variant (85)..(85): Xaa in position 85 is Val, Ile or Leu
  Variant (86)..(86): Xaa in position 86 is Trp, Met, Ile or Leu
  Variant (88)..(88): Xaa in position 88 is Cys, Leu, Met or Phe
  Variant (89)..(89): Xaa in position 89 is Lys or Met
  Variant (92)..(92): Xaa in position 92 is Asp or Glu
  Variant (95)..(95): Xaa in position 95 is Val or Ile
  Variant (96)..(96): Xaa in position 96 is Gln, Met or Glu
  Variant (99)..(99): Xaa in position 99 is any amino acid
  Variant (100)..(100): Xaa in position 100 is Val, Leu or Ile
  Variant (102)..(102): Xaa in position 102 is Gln, Ser or Thr
  Variant (103)..(103): Xaa in position 103 is Gly or Ala
  Variant (104)..(104): Xaa in position 104 is Phe or Tyr
  Variant (108)..(108): Xaa in position 108 is Gly or Ala
  Variant (109)..(109): Xaa in position 109 is Leu or Met
  Variant (111)..(111): Xaa in position 111 is Thr or Ser
  Variant (113)..(113): Xaa in position 113 is Val, Ile, Thr or Ala
  Variant (115)..(116): Xaa in position 115 to 116 is any amino acid
  Variant (117)..(117): Xaa in position 117 is Pro, Ser or Ala
  Variant (118)..(118): Xaa in position 118 is Asp, Thr or Asn
  Variant (120)..(120): Xaa in position 120 is any or no amino acid
  Variant (121)..(122): Xaa in position 121 to 122 is any amino acid
  Variant (123)..(123): Xaa in position 123 is Glu, Ala, Ile or Val
  Variant (124)..(124): Xaa in position 124 is any amino acid
  Variant (127)..(127): Xaa in position 127 is Ala or Ser
  Variant (133)..(133): Xaa in position 133 is Arg or Lys
  Variant (135)..(135): Xaa in position 135 is Tyr or Phe
  Variant (136)..(136): Xaa in position 136 is Arg, Tyr or Met
  Variant (137)..(137): Xaa in position 137 is any amino acid
  Variant (138)..(138): Xaa in position 138 is His, Tyr or Trp
  Variant (139)..(139): Xaa in position 139 is Gln or Leu
  Variant (140)..(140): Xaa in position 140 is Lys, Gln, Ala or Arg
  Variant (141)..(141): Xaa in position 141 is Gly or Asn
  Variant (142)..(143): Xaa in position 142 to 143 is any amino acid
  Variant (148)..(148): Xaa in position 148 is Ser or Pro
  Variant (149)..(149): Xaa in position 149 is Ile or Val
  Variant (151)..(151): Xaa in position 151 is Ser or Thr
  Variant (156)..(156): Xaa in position 156 is Thr, Ser or Ala
  Variant (157)..(157): Xaa in position 157 is any amino acid
  Variant (158)..(158): Xaa in position 158 is Gly or Ala
  Variant (159)..(159): Xaa in position 159 is Leu or Ile
  Variant (160)..(161): Xaa in position 160 to 161 is any amino acid
  Variant (163)..(163): Xaa in position 163 is Ala or Gly
  Variant (164)..(164): Xaa in position 164 is any amino acid
  Variant (165)..(165): Xaa in position 165 is Leu, Phe or Val

SEQ ID NO: 9128 - protein, 447 aa, Artificial sequence; identical to SEQ ID NO: 6196
  Consensus
  Variant (1)..(447): Xaa in all positions is any amino acid

SEQ ID NO: 9129 - protein, 447 aa, Artificial sequence; identical to SEQ ID NO: 6197
  Consensus
  Variant (1)..(447): Xaa in all positions is any amino acid

SEQ ID NO: 9130 - protein, 150 aa, Artificial sequence; identical to SEQ ID NO: 2917
  Consensus
  Variant (1)..(1): Xaa in Position 1 is Arg or Lys
  Variant (2)..(2): Xaa in Position 2 is Val, Ile, Leu or Ala
  Variant (3)..(3): Xaa in Position 3 is Ile, Val, Met or Ala
  Variant (4)..(4): Xaa in Position 4 is Ile, Val, Leu, Met or Ala
  Variant (8)..(8): Xaa in Position 8 is Phe, Ile, Leu or Tyr
  Variant (9)..(9): Xaa in Position 9 is Gly or Ala
  Variant (10)..(10): Xaa in Position 10 is any amino acid
  Variant (11)..(11): Xaa in Position 11 is Asp, Ser or Asn
  Variant (12)..(13): Xaa in Position 12 to 13 is any amino acid
  Variant (14)..(14): Xaa in Position 14 is Ser, Thr or Asn
  Variant (15)..(15): Xaa in Position 15 is Ala, Ser, Phe or Tyr
  Variant (16)..(17): Xaa in Position 16 to 17 is any amino acid
  Variant (18)..(18): Xaa in Position 18 is Leu, Ile, Val or Phe
  Variant (19)..(21): Xaa in Position 19 to 21 is any amino acid
  Variant (22)..(22): Xaa in Position 22 is Leu, Ile or Val
  Variant (23)..(27): Xaa in Position 23 to 27 is any amino acid
  Variant (28)..(28): Xaa in Position 28 is Glu, Asp, Pro or Ser
  Variant (29)..(30): Xaa in Position 29 to 30 is any amino acid
  Variant (31)..(31): Xaa in Position 31 is Ile, Val, Leu, Thr or Met
  Variant (32)..(32): Xaa in Position 32 is Tyr, Phe or Leu
  Variant (33)..(33): Xaa in Position 33 is Arg, His or Leu
  Variant (34)..(34): Xaa in Position 34 is Ile, Val, Met or Leu
  Variant (37)..(37): Xaa in Position 37 is Tyr or Phe
  Variant (39)..(39): Xaa in Position 39 is Gly, Ser or Ala
  Variant (40)..(40): Xaa in Position 40 is Lys, Arg or Glu
  Variant (41)..(42): Xaa in Position 41 to 42 is any amino acid
  Variant (43)..(43): Xaa in Position 43 is Val, Ile, Leu, Ala or Met
  Variant (44)..(44): Xaa in Position 44 is any amino acid
  Variant (45)..(45): Xaa in Position 45 is Asn, Gly, Gln or Ala
  Variant (46)..(46): Xaa in Position 46 is Leu, Ile, Met, Phe or Val
  Variant (47)..(49): Xaa in Position 47 to 49 is any amino acid
  Variant (50)..(50): Xaa in Position 50 is Arg, Lys or Glu
  Variant (51)..(51): Xaa in Position 51 is Phe or Tyr
  Variant (52)..(52): Xaa in Position 52 is any amino acid
  Variant (54)..(59): Xaa in Position 54 to 59 is any amino acid
  Variant (60)..(60): Xaa in Position 60 is no amino acid or any amino acid
  Variant (61)..(61): Xaa in Position 61 is Trp, Met, Asn or Leu
  Variant (62)..(63): Xaa in Position 62 to 63 is any amino acid
  Variant (64)..(64): Xaa in Position 64 is no amino acid or any amino acid
  Variant (65)..(65): Xaa in Position 65 is no amino acid or any amino acid
  Variant (66)..(66): Xaa in Position 66 is Ile, Val or Ala
  Variant (67)..(68): Xaa in Position 67 to 68 is any amino acid
  Variant (69)..(69): Xaa in Position 69 is Val, Ile, Met or Leu
  Variant (70)..(70): Xaa in Position 70 is any amino acid
  Variant (71)..(71): Xaa in Position 71 is Ile, Leu, Val, Phe or Ser
  Variant (72)..(74): Xaa in Position 72 to 74 is any amino acid
  Variant (76)..(77): Xaa in Position 76 to 77 is any amino acid
  Variant (78)..(78): Xaa in Position 78 is Gly, Asp, Val or Ala
  Variant (79)..(81): Xaa in Position 79 to 81 is any amino acid
  Variant (82)..(82): Xaa in Position 82 is Arg or Lys
  Variant (83)..(83): Xaa in Position 83 is no amino acid or any amino acid
  Variant (84)..(84): Xaa in Position 84 is no amino acid or any amino acid
  Variant (85)..(85): Xaa in Position 85 is Tyr or Phe
  Variant (86)..(86): Xaa in Position 86 is Tyr, Phe or Trp
  Variant (87)..(87): Xaa in Position 87 is Asp, Glu, Ala or Asn
  Variant (88)..(89): Xaa in Position 88 to 89 is any amino acid
  Variant (91)..(91): Xaa in Position 91 is no amino acid or any amino acid
  Variant (92)..(92): Xaa in Position 92 is any amino acid
  Variant (93)..(93): Xaa in Position 93 is Leu, Ile, Val, Met or Ala
  Variant (94)..(94): Xaa in Position 94 is Arg, Lys or Leu
  Variant (96)..(96): Xaa in Position 96 is Met, Val, Ile or Leu
  Variant (97)..(97): Xaa in Position 97 is Val, Met, Ile, Leu or Phe
  Variant (98)..(98): Xaa in Position 98 is Gln, Pro or Thr
  Variant (99)..(99): Xaa in Position 99 is Asn or Ser
  Variant (100)..(100): Xaa in Position 100 is His, Gln or Pro
  Variant (101)..(102): Xaa in Position 101 to 102 is any amino acid
  Variant (103)..(103): Xaa in Position 103 is Gln, Glu, Asn or Leu
  Variant (104)..(104): Xaa in Position 104 is Leu, Ile, Val, Met or Thr
  Variant (105)..(105): Xaa in Position 105 is Leu, Met, Val, Ile, Phe or Tyr
  Variant (106)..(106): Xaa in Position 106 is any amino acid
  Variant (107)..(107): Xaa in Position 107 is Leu, Met, Ile, Val, Trp or Phe
  Variant (108)..(109): Xaa in Position 108 to 109 is any amino acid
  Variant (111)..(111): Xaa in Position 111 is Glu, Asp, Ser or Asn
  Variant (112)..(112): Xaa in Position 112 is any amino acid
  Variant (114)..(118): Xaa in Position 114 to 118 is any amino acid
  Variant (119)..(121): Xaa in Position 119 to 121 is no amino acid or any amino acid
  Variant (122)..(122): Xaa in Position 122 is Ile, Val, Leu, Phe or Met
  Variant (123)..(124): Xaa in Position 123 to 124 is any amino acid
  Variant (125)..(125): Xaa in Position 125 is Glu, Lys, Ala, Arg or His
  Variant (126)..(126): Xaa in Position 126 is Lys or Val
  Variant (127)..(128): Xaa in Position 127 to 128 is any amino acid
  Variant (129)..(129): Xaa in Position 129 is Val, Ile, Ala, Leu or Phe
  Variant (130)..(130): Xaa in Position 130 is Leu, Ile, Val, Phe or Met
  Variant (131)..(140): Xaa in Position 131 to 140 is any amino acid
  Variant (141)..(145): Xaa in Position 141 to 145 is no amino acid or any amino acid
  Variant (146)..(146): Xaa in Position 146 is Val, Leu, Ile, Ala or Ser
  Variant (147)..(147): Xaa in Position 147 is any amino acid
  Variant (148)..(148): Xaa in Position 148 is Gly or Ala
  Variant (149)..(149): Xaa in Position 149 is Gln or Arg
  Variant (150)..(150): Xaa in Position 150 is Tyr or Phe

SEQ ID NO: 9131 - protein, 44 aa, Artificial sequence; identical to SEQ ID NO: 2918
  Consensus
  Variant (1)..(1): Xaa in Position 1 is Tyr or Leu
  Variant (2)..(2): Xaa in Position 2 is any amino acid
  Variant (3)..(13): Xaa in Position 3 to 13 is no amino acid or any amino acid
  Variant (15)..(17): Xaa in Position 15 to 17 is any amino acid
  Variant (19)..(19): Xaa in Position 19 is Phe or Tyr
  Variant (20)..(25): Xaa in Position 20 to 25 is any amino acid
  Variant (26)..(26): Xaa in Position 26 is Ile, Val, Leu or Phe
  Variant (27)..(29): Xaa in Position 27 to 29 is any amino acid
  Variant (30)..(30): Xaa in Position 30 is Arg, Asn, Phe or Gln
  Variant (31)..(31): Xaa in Position 31 is Trp or Phe
  Variant (32)..(32): Xaa in Position 32 is any amino acid
  Variant (33)..(33): Xaa in Position 33 is Gly or Asp
  Variant (34)..(34): Xaa in Position 34 is Val or Thr
  Variant (36)..(36): Xaa in Position 36 is Phe or Ile
  Variant (37)..(37): Xaa in Position 37 is any amino acid
  Variant (38)..(38): Xaa in Position 38 is Leu, Met, Ile, Val or Phe
  Variant (39)..(40): Xaa in Position 39 to 40 is any amino acid
  Variant (41)..(41): Xaa in Position 41 is Gly or Ala
  Variant (43)..(43): Xaa in Position 43 is any amino acid
  Variant (44)..(44): Xaa in Position 44 is Leu, Met or Val

SEQ ID NO: 9132 - protein, 97 aa, Artificial sequence; identical to SEQ ID NO: 2919
  Consensus
  Variant (1)..(1): Xaa in Position 1 is Asn, Asp, Gln, Arg or Lys
  Variant (2)..(4): Xaa in Position 2 to 4 is any amino acid
  Variant (5)..(5): Xaa in Position 5 is Ile, Leu, Met, Phe or Val
  Variant (6)..(6): Xaa in Position 6 is any amino acid
  Variant (7)..(7): Xaa in Position 7 is Ile, Leu, Val, Ala or Ser
  Variant (8)..(8): Xaa in Position 8 is any amino acid
  Variant (9)..(9): Xaa in Position 9 is Pro or His
  Variant (10)..(12): Xaa in Position 10 to 12 is any amino acid
  Variant (13)..(13): Xaa in Position 13 is Ile, Val, Met, Leu, Phe or Ala
  Variant (14)..(19): Xaa in Position 14 to 19 is any amino acid
  Variant (20)..(20): Xaa in Position 20 is Lys, Ser or Arg
  Variant (21)..(29): Xaa in Position 21 to 29 is any amino acid
  Variant (30)..(35): Xaa in Position 30 to 35 is no amino acid or no amino acid
  Variant (36)..(36): Xaa in Position 36 is Leu, Ile, Met or Val
  Variant (37)..(44): Xaa in Position 37 to 44 is any amino acid
  Variant (45)..(64): Xaa in Position 45 to 64 is no amino acid or any amino acid
  Variant (65)..(65): Xaa in Position 65 is Ala, Gly, Pro or Ser
  Variant (66)..(66): Xaa in Position 66 is Tyr or Leu
  Variant (67)..(68): Xaa in Position 67 to 68 is any amino acid
  Variant (69)..(69): Xaa in Position 69 is Leu, Met or Tyr
  Variant (70)..(70): Xaa in Position 70 is Leu, Ile, Phe or Met
  Variant (71)..(71): Xaa in Position 71 is any amino acid
  Variant (72)..(72): Xaa in Position 72 is Asp, Glu, Ala, Asn or His
  Variant (73)..(75): Xaa in Position 73 to 75 is any amino acid
  Variant (76)..(76): Xaa in Position 76 is Gly, Ser or Asp
  Variant (77)..(80): Xaa in Position 77 to 80 is any amino acid
  Variant (81)..(81): Xaa in Position 81 is Phe or Tyr
  Variant (82)..(85): Xaa in Position 82 to 85 is any amino acid
  Variant (86)..(86): Xaa in Position 86 is no amino acid or any amino acid
  Variant (87)..(87): Xaa in Position 87 is Val, Ile, Leu, Ala or Gln
  Variant (88)..(90): Xaa in Position 88 to 90 is any amino acid
  Variant (92)..(96): Xaa in Position 92 to 96 is any amino acid
  Variant (97)..(97): Xaa in Position 97 is Ile, Val, Leu, Phe or Ala

SEQ ID NO: 9133 - protein, 1277 aa, Artificial sequence; identical to SEQ ID NO: 2920
  Consensus
  Variant (1)..(1277): Xaa in all Positions is any amino acid

SEQ ID NO: 9134 - DNA, 1563 bp, Escherichia coli K12; identical to SEQ ID NO: 3241
  CDS (1)..(1563)

SEQ ID NO: 9135 - protein, 520 aa, Escherichia coli K12; identical to SEQ ID NO: 3242

SEQ ID NO: 9136 - DNA, 2984 bp, Rhizobium meliloti; identical to SEQ ID NO: 3243
  CDS (638)..(2827)

SEQ ID NO: 9137 - protein, 729 aa, Rhizobium meliloti; identical to SEQ ID NO: 3244

SEQ ID NO: 9138 - DNA, 1365 bp, Salmonella typhimurium; identical to SEQ ID NO: 3245
  CDS (1)..(1365)

SEQ ID NO: 9139 - protein, 454 aa, Salmonella typhimurium; identical to SEQ ID NO: 3246

SEQ ID NO: 9140 - DNA, 1413 bp, Bacillus subtilis; identical to SEQ ID NO: 3247
  CDS (1)..(1413)

SEQ ID NO: 9141 - protein, 470 aa, Bacillus subtilis; identical to SEQ ID NO: 3248

SEQ ID NO: 9142 - DNA, 1449 bp, Spirochaeta aurantia; identical to SEQ ID NO: 3249
  CDS (1)..(1449)

SEQ ID NO: 9143 - protein, 482 aa, Spirochaeta aurantia; identical to SEQ ID NO: 3250

SEQ ID NO: 9144 - DNA, 1389 bp, Methanobacterium thermoautotrophicum; identical to SEQ ID NO: 3251
  CDS (1)..(1389)

SEQ ID NO: 9145 - protein, 462 aa, Methanobacterium thermoautotrophicum; identical to SEQ ID NO: 3252

SEQ ID NO: 9146 - DNA, 1572 bp, Haloferax volcanii; identical to SEQ ID NO: 3253
  CDS (1)..(1572)

SEQ ID NO: 9147 - protein, 523 aa, Haloferax volcanii; identical to SEQ ID NO: 3254

SEQ ID NO: 9148 - DNA, 1305 bp, Pyrococcus abyssi; identical to SEQ ID NO: 3255
  CDS (1)..(1305)

SEQ ID NO: 9149 - protein, 434 aa, Pyrococcus abyssi; identical to SEQ ID NO: 3256

SEQ ID NO: 9150 - DNA, 1572 bp, Vibrio cholerae; identical to SEQ ID NO: 3257
  CDS (1)..(1572)

SEQ ID NO: 9151 - protein, 523 aa, Vibrio cholerae; identical to SEQ ID NO: 3258

SEQ ID NO: 9152 - DNA, 1359 bp, Xylella fastidiosa; identical to SEQ ID NO: 3259
  CDS (1)..(1359)

SEQ ID NO: 9153 - protein, 452 aa, Xylella fastidiosa; identical to SEQ ID NO: 3260

SEQ ID NO: 9154 - DNA, 1464 bp, Xylella fastidiosa; identical to SEQ ID NO: 3261
  CDS (1)..(1464)

SEQ ID NO: 9155 - protein, 487 aa, Xylella fastidiosa; identical to SEQ ID NO: 3262

SEQ ID NO: 9156 - DNA, 2760 bp, Arabidopsis thaliana (mouse-ear cress); identical to SEQ ID NO: 3263
  CDS (7)..(2760)

SEQ ID NO: 9157 - protein, 917 aa, Arabidopsis thaliana (mouse-ear cress); identical to SEQ ID NO: 3264

SEQ ID NO: 9158 - DNA, 1722 bp, Streptococcus pneumoniae; identical to SEQ ID NO: 3265
  CDS (1)..(1722)

SEQ ID NO: 9159 - protein, 573 aa, Streptococcus pneumoniae; identical to SEQ ID NO: 3266

SEQ ID NO: 9160 - DNA, 1362 bp, Streptococcus pneumoniae; identical to SEQ ID NO: 3267
  CDS (1)..(1362)

SEQ ID NO: 9161 - protein, 453 aa, Streptococcus pneumoniae; identical to SEQ ID NO: 3268

SEQ ID NO: 9162 - DNA, 1428 bp, Clostridium acetobutylicum; identical to SEQ ID NO: 3269
  CDS (1)..(1428)

SEQ ID NO: 9163 - protein, 475 aa, Clostridium acetobutylicum; identical to SEQ ID NO: 3270

SEQ ID NO: 9164 - DNA, 1566 bp, Yersinia pestis; identical to SEQ ID NO: 3271
  CDS (1)..(1566)

SEQ ID NO: 9165 - protein, 521 aa, Yersinia pestis; identical to SEQ ID NO: 3272

SEQ ID NO: 9166 - DNA, 2148 bp, Nostoc sp. PCC 7120; identical to SEQ ID NO: 3273
  CDS (1)..(2148)

SEQ ID NO: 9167 - protein, 715 aa, Nostoc sp. PCC 7120; identical to SEQ ID NO: 3274

SEQ ID NO: 9168 - DNA, 1377 bp, Yersinia pestis; identical to SEQ ID NO: 3275
  CDS (1)..(1377)

SEQ ID NO: 9169 - protein, 458 aa, Yersinia pestis; identical to SEQ ID NO: 3276

SEQ ID NO: 9170 - DNA, 2145 bp, Nostoc sp. PCC 7120; identical to SEQ ID NO: 3277
  CDS (1)..(2145)

SEQ ID NO: 9171 - protein, 714 aa, Nostoc sp. PCC 7120; identical to SEQ ID NO: 3278

SEQ ID NO: 9172 - DNA, 2208 bp, Nostoc sp. PCC 7120; identical to SEQ ID NO: 3279
  CDS (1)..(2208)

SEQ ID NO: 9173 - protein, 735 aa, Nostoc sp. PCC 7120; identical to SEQ ID NO: 3280

SEQ ID NO: 9174 - DNA, 1515 bp, Nostoc sp. PCC 7120; identical to SEQ ID NO: 3281
  CDS (1)..(1515)

SEQ ID NO: 9175 - protein, 504 aa, Nostoc sp. PCC 7120; identical to SEQ ID NO: 3282

SEQ ID NO: 9176 - DNA, 1362 bp, Escherichia coli; identical to SEQ ID NO: 3283
  CDS (1)..(1362)

SEQ ID NO: 9177 - protein, 453 aa, Escherichia coli; identical to SEQ ID NO: 3284

SEQ ID NO: 9178 - DNA, 2190 bp, Agrobacterium tumefaciens; identical to SEQ ID NO: 3285
  CDS (1)..(2190)

SEQ ID NO: 9179 - protein, 729 aa, Agrobacterium tumefaciens; identical to SEQ ID NO: 3286

SEQ ID NO: 9180 - DNA, 1365 bp, Listeria monocytogenes; identical to SEQ ID NO: 3287
  CDS (1)..(1365)

SEQ ID NO: 9181 - protein, 454 aa, Listeria monocytogenes; identical to SEQ ID NO: 3288

SEQ ID NO: 9182 - DNA, 1365 bp, Listeria innocua; identical to SEQ ID NO: 3289
  CDS (1)..(1365)

SEQ ID NO: 9183 - protein, 454 aa, Listeria innocua; identical to SEQ ID NO: 3290

SEQ ID NO: 9184 - DNA, 1869 bp, Klebsiella pneumoniae; identical to SEQ ID NO: 3291
  CDS (151)..(1506)

SEQ ID NO: 9185 - protein, 451 aa, Klebsiella pneumoniae; identical to SEQ ID NO: 3292

SEQ ID NO: 9186 - DNA, 1389 bp, Leptospira biflexa; identical to SEQ ID NO: 3293
  CDS (1)..(1389)

SEQ ID NO: 9187 - protein, 462 aa, Leptospira biflexa; identical to SEQ ID NO: 3294

SEQ ID NO: 9188 - DNA, 1425 bp, Methanococcus jannaschii; identical to SEQ ID NO: 3295
  CDS (1)..(1425)

SEQ ID NO: 9189 - protein, 474 aa, Methanococcus jannaschii; identical to SEQ ID NO: 3296

SEQ ID NO: 9190 - DNA, 1503 bp, Helicobacter pylori; identical to SEQ ID NO: 3297
  CDS (1)..(1503)

SEQ ID NO: 9191 - protein, 500 aa, Helicobacter pylori; identical to SEQ ID NO: 3298

SEQ ID NO: 9192 - DNA, 1236 bp, Archaeoglobus fulgidus; identical to SEQ ID NO: 3299
  CDS (1)..(1236)

SEQ ID NO: 9193 - protein, 411 aa, Archaeoglobus fulgidus; identical to SEQ ID NO: 3300

SEQ ID NO: 9194 - DNA, 954 bp, Aeropyrum pernix; identical to SEQ ID NO: 3301
  CDS (1)..(954)

SEQ ID NO: 9195 - protein, 317 aa, Aeropyrum pernix; identical to SEQ ID NO: 3302

SEQ ID NO: 9196 - DNA, 1377 bp, Vibrio cholerae; identical to SEQ ID NO: 3303
  CDS (1)..(1377)

SEQ ID NO: 9197 - protein, 458 aa, Vibrio cholerae; identical to SEQ ID NO: 3304

SEQ ID NO: 9198 - DNA, 1497 bp, Xylella fastidiosa; identical to SEQ ID NO: 3305
  CDS (1)..(1497)

SEQ ID NO: 9199 - protein, 498 aa, Xylella fastidiosa; identical to SEQ ID NO: 3306

SEQ ID NO: 9200 - DNA, 1362 bp, Pseudomonas aeruginosa; identical to SEQ ID NO: 3307
  CDS (1)..(1362)

SEQ ID NO: 9201 - protein, 453 aa, Pseudomonas aeruginosa; identical to SEQ ID NO: 3308

SEQ ID NO: 9202 - DNA, 1461 bp, Bacillus halodurans; identical to SEQ ID NO: 3309
  CDS (1)..(1461)

SEQ ID NO: 9203 - protein, 486 aa, Bacillus halodurans; identical to SEQ ID NO: 3310

SEQ ID NO: 9204 - DNA, 1467 bp, Halobacterium sp. NRC-1; identical to SEQ ID NO: 3311
  CDS (1)..(1467)

SEQ ID NO: 9205 - protein, 488 aa, Halobacterium sp. NRC-1; identical to SEQ ID NO: 3312

SEQ ID NO: 9206 - DNA, 1584 bp, Halobacterium sp. NRC-1; identical to SEQ ID NO: 3313
  CDS (1)..(1584)

SEQ ID NO: 9207 - protein, 527 aa, Halobacterium sp. NRC-1; identical to SEQ ID NO: 3314

SEQ ID NO: 9208 - DNA, 1542 bp, Caulobacter crescentus; identical to SEQ ID NO: 3315
  CDS (1)..(1542)

SEQ ID NO: 9209 - protein, 513 aa, Caulobacter crescentus; identical to SEQ ID NO: 3316

SEQ ID NO: 9210 - DNA, 1557 bp, Haemophilus influenzae; identical to SEQ ID NO: 3317
  CDS (1)..(1557)

SEQ ID NO: 9211 - protein, 518 aa, Haemophilus influenzae; identical to SEQ ID NO: 3318

SEQ ID NO: 9212 - DNA, 1395 bp, Methanobacterium thermoautotrophicum; identical to SEQ ID NO: 3319
  CDS (1)..(1395)

SEQ ID NO: 9213 - protein, 464 aa, Methanobacterium thermoautotrophicum; identical to SEQ ID NO: 3320

SEQ ID NO: 9214 - DNA, 1509 bp, Bacillus halodurans; identical to SEQ ID NO: 3321
  CDS (1)..(1509)

SEQ ID NO: 9215 - protein, 502 aa, Bacillus halodurans; identical to SEQ ID NO: 3322

SEQ ID NO: 9216 - DNA, 1464 bp, Streptococcus pneumoniae; identical to SEQ ID NO: 3323
  CDS (1)..(1464)

SEQ ID NO: 9217 - protein, 487 aa, Streptococcus pneumoniae; identical to SEQ ID NO: 3324

SEQ ID NO: 9218 - DNA, 1479 bp, Pseudomonas aeruginosa; identical to SEQ ID NO: 3325
  CDS (1)..(1479)

SEQ ID NO: 9219 - protein, 492 aa, Pseudomonas aeruginosa; identical to SEQ ID NO: 3326

SEQ ID NO: 9220 - DNA, 1386 bp, Thermotoga maritima; identical to SEQ ID NO: 3327
  CDS (1)..(1386)

SEQ ID NO: 9221 - protein, 461 aa, Thermotoga maritima; identical to SEQ ID NO: 3328

SEQ ID NO: 9222 - DNA, 1482 bp, Pseudomonas putida; identical to SEQ ID NO: 3329
  CDS (1)..(1482)

SEQ ID NO: 9223 - protein, 493 aa, Pseudomonas putida; identical to SEQ ID NO: 3330

SEQ ID NO: 9224 - DNA, 3065 bp, Pseudomonas aeruginosa; identical to SEQ ID NO: 3331
  CDS (401)..(1993)

SEQ ID NO: 9225 - protein, 530 aa, Pseudomonas aeruginosa; identical to SEQ ID NO: 3332

SEQ ID NO: 9226 - DNA, 1485 bp, Aquifex aeolicus; identical to SEQ ID NO: 3333
  CDS (1)..(1485)

SEQ ID NO: 9227 - protein, 494 aa, Aquifex aeolicus; identical to SEQ ID NO: 3334

SEQ ID NO: 9228 - DNA, 1422 bp, Deinococcus radiodurans; identical to SEQ ID NO: 3335
  CDS (1)..(1422)

SEQ ID NO: 9229 - protein, 473 aa, Deinococcus radiodurans; identical to SEQ ID NO: 3336

SEQ ID NO: 9230 - DNA, 1917 bp, Deinococcus radiodurans; identical to SEQ ID NO: 3337
  CDS (1)..(1917)

SEQ ID NO: 9231 - protein, 638 aa, Deinococcus radiodurans; identical to SEQ ID NO: 3338

SEQ ID NO: 9232 - DNA, 1551 bp, Mycobacterium tuberculosis; identical to SEQ ID NO: 3339
  CDS (1)..(1551)

SEQ ID NO: 9233 - protein, 516 aa, Mycobacterium tuberculosis; identical to SEQ ID NO: 3340

SEQ ID NO: 9234 - DNA, 1503 bp, Helicobacter pylori; identical to SEQ ID NO: 3341
  CDS (1)..(1503)

SEQ ID NO: 9235 - protein, 500 aa, Helicobacter pylori; identical to SEQ ID NO: 3342

SEQ ID NO: 9236 - DNA, 1476 bp, Neisseria meningitidis; identical to SEQ ID NO: 3343
  CDS (1)..(1476)

SEQ ID NO: 9237 - protein, 491 aa, Neisseria meningitidis; identical to SEQ ID NO: 3344

SEQ ID NO: 9238 - DNA, 1575 bp, Caulobacter crescentus; identical to SEQ ID NO: 3345
  CDS (1)..(1575)

SEQ ID NO: 9239 - protein, 524 aa, Caulobacter crescentus; identical to SEQ ID NO: 3346

SEQ ID NO: 9240 - DNA, 1251 bp, Campylobacter jejuni; identical to SEQ ID NO: 3347
  CDS (1)..(1251)

SEQ ID NO: 9241 - protein, 416 aa, Campylobacter jejuni; identical to SEQ ID NO: 3348

SEQ ID NO: 9242 - DNA, 1266 bp, Sulfolobus solfataricus; identical to SEQ ID NO: 3349
  CDS (1)..(1266)

SEQ ID NO: 9243 - protein, 421 aa, Sulfolobus solfataricus; identical to SEQ ID NO: 3350

SEQ ID NO: 9244 - DNA, 1548 bp, Buchnera aphidicola; identical to SEQ ID NO: 3351
  CDS (1)..(1548)

SEQ ID NO: 9245 - protein, 515 aa, Buchnera aphidicola; identical to SEQ ID NO: 3352

SEQ ID NO: 9246 - DNA, 2172 bp, Streptomyces griseus; identical to SEQ ID NO: 3353
  CDS (1)..(2172)

SEQ ID NO: 9247 - protein, 723 aa, Streptomyces griseus; identical to SEQ ID NO: 3354

SEQ ID NO: 9248 - DNA, 2712 bp, Streptomyces lividans; identical to SEQ ID NO: 3355
  CDS (119)..(1546)

SEQ ID NO: 9249 - protein, 475 aa, Streptomyces lividans; identical to SEQ ID NO: 3356

SEQ ID NO: 9250 - DNA, 2115 bp, Clostridium thermocellum; identical to SEQ ID NO: 3357
  CDS (361)..(1845)

SEQ ID NO: 9251 - protein, 494 aa, Clostridium thermocellum; identical to SEQ ID NO: 3358

SEQ ID NO: 9252 - DNA, 1548 bp, Bacillus subtilis; identical to SEQ ID NO: 3359
  CDS (1)..(1548)

SEQ ID NO: 9253 - protein, 515 aa, Bacillus subtilis; identical to SEQ ID NO: 3360

SEQ ID NO: 9254 - DNA, 1524 bp, Saccharomyces cerevisiae; identical to SEQ ID NO: 3361
  CDS (1)..(1524)

SEQ ID NO: 9255 - protein, 507 aa, Saccharomyces cerevisiae; identical to SEQ ID NO: 3362

SEQ ID NO: 9256 - DNA, 2340 bp, Thermus aquaticus; identical to SEQ ID NO: 3363
  CDS (169)..(1557)

SEQ ID NO: 9257 - protein, 462 aa, Thermus aquaticus; identical to SEQ ID NO: 3364

SEQ ID NO: 9258 - DNA, 2558 bp, Bacillus caldotenax; identical to SEQ ID NO: 3365
  CDS (312)..(1838)

SEQ ID NO: 9259 - protein, 508 aa, Bacillus caldotenax; identical to SEQ ID NO: 3366

SEQ ID NO: 9260 - DNA, 2068 bp, Arabidopsis thaliana (mouse-ear cress); identical to SEQ ID NO: 3367
  CDS (29)..(1894)

SEQ ID NO: 9261 - protein, 621 aa, Arabidopsis thaliana (mouse-ear cress); identical to SEQ ID NO: 3368

SEQ ID NO: 9262 - DNA, 1371 bp, Lactococcus lactis subsp. lactis; identical to SEQ ID NO: 3369
  CDS (1)..(1371)

SEQ ID NO: 9263 - protein, 456 aa, Lactococcus lactis subsp. lactis; identical to SEQ ID NO: 3370

SEQ ID NO: 9264 - DNA, 1527 bp, Synechocystis sp; identical to SEQ ID NO: 3371
  CDS (1)..(1527)

SEQ ID NO: 9265 - protein, 508 aa, Synechocystis sp; identical to SEQ ID NO: 3372

SEQ ID NO: 9266 - DNA, 1458 bp, Synechocystis sp; identical to SEQ ID NO: 3373
  CDS (1)..(1458)

SEQ ID NO: 9267 - protein, 485 aa, Synechocystis sp; identical to SEQ ID NO: 3374

SEQ ID NO: 9268 - DNA, 2144 bp, Nicotiana tabacum (common tobacco); identical to SEQ ID NO: 3375
  CDS (90)..(1940)

SEQ ID NO: 9269 - protein, 616 aa, Nicotiana tabacum (common tobacco); identical to SEQ ID NO: 3376

SEQ ID NO: 9270 - DNA, 1509 bp, Streptomyces coelicolor; identical to SEQ ID NO: 3377
  CDS (1)..(1509)

SEQ ID NO: 9271 - protein, 502 aa, Streptomyces coelicolor; identical to SEQ ID NO: 3378

SEQ ID NO: 9272 - DNA, 1470 bp, Schizosaccharomyces pombe; identical to SEQ ID NO: 3379
  CDS (1)..(1470)

SEQ ID NO: 9273 - protein, 489 aa, Schizosaccharomyces pombe; identical to SEQ ID NO: 3380

SEQ ID NO: 9274 - DNA, 1302 bp, Pyrococcus kodakaraensis; identical to SEQ ID NO: 3381
  CDS (1)..(1302)

SEQ ID NO: 9275 - protein, 433 aa, Pyrococcus kodakaraensis; identical to SEQ ID NO: 3382

SEQ ID NO: 9276 - DNA, 1590 bp, Mycobacterium leprae; identical to SEQ ID NO: 3383
  CDS (1)..(1590)

SEQ ID NO: 9277 - protein, 529 aa, Mycobacterium leprae; identical to SEQ ID NO: 3384

SEQ ID NO: 9278 - DNA, 1512 bp, Rhodobacter sphaeroides; identical to SEQ ID NO: 3385
  CDS (1)..(1512)

SEQ ID NO: 9279 - protein, 503 aa, Rhodobacter sphaeroides; identical to SEQ ID NO: 3386

SEQ ID NO: 9280 - DNA, 1993 bp, Ruta graveolens; identical to SEQ ID NO: 3387
  CDS (94)..(1935)

SEQ ID NO: 9281 - protein, 613 aa, Ruta graveolens; identical to SEQ ID NO: 3388

SEQ ID NO: 9282 - DNA, 1983 bp, Corynebacterium glutamicum; identical to SEQ ID NO: 3389
  CDS (86)..(1963)

SEQ ID NO: 9283 - protein, 625 aa, Corynebacterium glutamicum; identical to SEQ ID NO: 3390

SEQ ID NO: 9284 - DNA, 2220 bp, Streptomyces pristinaespiralis; identical to SEQ ID NO: 3391
  CDS (61)..(2220)

SEQ ID NO: 9285 - protein, 719 aa, Streptomyces pristinaespiralis; identical to SEQ ID NO: 3392

SEQ ID NO: 9286 - DNA, 2051 bp, Ruta graveolens; identical to SEQ ID NO: 3393
  CDS (43)..(1869)

SEQ ID NO: 9287 - protein, 608 aa, Ruta graveolens; identical to SEQ ID NO: 3394

SEQ ID NO: 9288 - DNA, 2660 bp, Streptomyces venezuelae; identical to SEQ ID NO: 3395
  CDS (651)..(2660)

SEQ ID NO: 9289 - protein, 669 aa, Streptomyces venezuelae; identical to SEQ ID NO: 3396

SEQ ID NO: 9290 - DNA, 1518 bp, Symbiobacterium thermophilum; identical to SEQ ID NO: 3397
  CDS (1)..(1518)

SEQ ID NO: 9291 - protein, 505 aa, Symbiobacterium thermophilum; identical to SEQ ID NO: 3398

SEQ ID NO: 9292 - DNA, 1476 bp, Symbiobacterium thermophilum; identical to SEQ ID NO: 3399
  CDS (1)..(1476)

SEQ ID NO: 9293 - protein, 491 aa, Symbiobacterium thermophilum; identical to SEQ ID NO: 3400

SEQ ID NO: 9294 - DNA, 2088 bp, Propionibacterium acnes; identical to SEQ ID NO: 3401
  CDS (1)..(2088)

SEQ ID NO: 9295 - protein, 695 aa, Propionibacterium acnes; identical to SEQ ID NO: 3402

SEQ ID NO: 9296 - DNA, 1458 bp, Leifsonia xyli; identical to SEQ ID NO: 3403
  CDS (1)..(1458)

SEQ ID NO: 9297 - protein, 485 aa, Leifsonia xyli; identical to SEQ ID NO: 3404

SEQ ID NO: 9298 - DNA, 1560 bp, Leifsonia xyli; identical to SEQ ID NO: 3405
  CDS (1)..(1560)

SEQ ID NO: 9299 - protein, 519 aa, Leifsonia xyli; identical to SEQ ID NO: 3406

SEQ ID NO: 9300 - DNA, 1545 bp, Debaryomyces hansenii CBS767; identical to SEQ ID NO: 3407
  CDS (1)..(1545)

SEQ ID NO: 9301 - protein, 514 aa, Debaryomyces hansenii CBS767; identical to SEQ ID NO: 3408

SEQ ID NO: 9302 - DNA, 1524 bp, Yarrowia lipolytica CLIB99; identical to SEQ ID NO: 3409
  CDS (1)..(1524)

SEQ ID NO: 9303 - protein, 507 aa, Yarrowia lipolytica CLIB99; identical to SEQ ID NO: 3410

SEQ ID NO: 9304 - DNA, 1527 bp, Kluyveromyces lactis NRRL Y; identical to SEQ ID NO: 3411
  CDS (1)..(1527)

SEQ ID NO: 9305 - protein, 508 aa, Kluyveromyces lactis NRRL Y; identical to SEQ ID NO: 3412

SEQ ID NO: 9306 - DNA, 1455 bp, Erwinia carotovora; identical to SEQ ID NO: 3413
  CDS (1)..(1455)

SEQ ID NO: 9307 - protein, 484 aa, Erwinia carotovora; identical to SEQ ID NO: 3414

SEQ ID NO: 9308 - DNA, 1563 bp, Erwinia carotovora; identical to SEQ ID NO: 3415
  CDS (1)..(1563)

SEQ ID NO: 9309 - protein, 520 aa, Erwinia carotovora; identical to SEQ ID NO: 3416

SEQ ID NO: 9310 - DNA, 1311 bp, Acinetobacter sp; identical to SEQ ID NO: 3417
  CDS (1)..(1311)

SEQ ID NO: 9311 - protein, 436 aa, Acinetobacter sp; identical to SEQ ID NO: 3418

SEQ ID NO: 9312 - DNA, 1521 bp, Candida glabrata CBS138; identical to SEQ ID NO: 3419
  CDS (1)..(1521)

SEQ ID NO: 9313 - protein, 506 aa, Candida glabrata CBS138; identical to SEQ ID NO: 3420

SEQ ID NO: 9314 - DNA, 1407 bp, Staphylococcus aureus; identical to SEQ ID NO: 3421
  CDS (1)..(1407)

SEQ ID NO: 9315 - protein, 468 aa, Staphylococcus aureus; identical to SEQ ID NO: 3422

SEQ ID NO: 9316 - DNA, 1407 bp, Staphylococcus aureus; identical to SEQ ID NO: 3423
  CDS (1)..(1407)

SEQ ID NO: 9317 - protein, 468 aa, Staphylococcus aureus; identical to SEQ ID NO: 3424

SEQ ID NO: 9318 - DNA, 1428 bp, Bacillus thuringiensis; identical to SEQ ID NO: 3425
  CDS (1)..(1428)

SEQ ID NO: 9319 - protein, 475 aa, Bacillus thuringiensis; identical to SEQ ID NO: 3426

SEQ ID NO: 9320 - DNA, 1443 bp, Bacillus thuringiensis; identical to SEQ ID NO: 3427
  CDS (46)..(1443)

SEQ ID NO: 9321 - protein, 465 aa, Bacillus thuringiensis; identical to SEQ ID NO: 3428

SEQ ID NO: 9322 - DNA, 2061 bp, Streptomyces venezuelae; identical to SEQ ID NO: 3429
  CDS (1)..(2061)

SEQ ID NO: 9323 - protein, 686 aa, Streptomyces venezuelae; identical to SEQ ID NO: 3430

SEQ ID NO: 9324 - DNA, 1593 bp, Photobacterium profundum; identical to SEQ ID NO: 3431
  CDS (1)..(1593)

SEQ ID NO: 9325 - protein, 530 aa, Photobacterium profundum; identical to SEQ ID NO: 3432

SEQ ID NO: 9326 - DNA, 1404 bp, Photobacterium profundum; identical to SEQ ID NO: 3433
  CDS (1)..(1404)

SEQ ID NO: 9327 - protein, 467 aa, Photobacterium profundum; identical to SEQ ID NO: 3434

SEQ ID NO: 9328 - DNA, 1404 bp, Photobacterium profundum; identical to SEQ ID NO: 3435
  CDS (1)..(1404)

SEQ ID NO: 9329 - protein, 467 aa, Photobacterium profundum; identical to SEQ ID NO: 3436

SEQ ID NO: 9330 - DNA, 1320 bp, Methanococcus maripaludis; identical to SEQ ID NO: 3437
  CDS (1)..(1320)

SEQ ID NO: 9331 - protein, 439 aa, Methanococcus maripaludis; identical to SEQ ID NO: 3438

SEQ ID NO: 9332 - DNA, 1305 bp, Parachlamydia sp; identical to SEQ ID NO: 3439
  CDS (1)..(1305)

SEQ ID NO: 9333 - protein, 434 aa, Parachlamydia sp; identical to SEQ ID NO: 3440

SEQ ID NO: 9334 - DNA, 2160 bp, Rhodopseudomonas palustris; identical to SEQ ID NO: 3441
  CDS (1)..(2160)

SEQ ID NO: 9335 - protein, 719 aa, Rhodopseudomonas palustris; identical to SEQ ID NO: 3442

SEQ ID NO: 9336 - DNA, 1554 bp, Corynebacterium diphtheriae; identical to SEQ ID NO: 3443
  CDS (1)..(1554)

SEQ ID NO: 9337 - protein, 517 aa, Corynebacterium diphtheriae; identical to SEQ ID NO: 3444

SEQ ID NO: 9338 - DNA, 3174 bp, Lycopersicon esculentum; identical to SEQ ID NO: 3445
  CDS (121)..(2829)

SEQ ID NO: 9339 - protein, 902 aa, Lycopersicon esculentum; identical to SEQ ID NO: 3446

SEQ ID NO: 9340 - DNA, 1848 bp, uncultured bacterium; identical to SEQ ID NO: 3447
  CDS (1)..(1848)

SEQ ID NO: 9341 - protein, 615 aa, uncultured bacterium; identical to SEQ ID NO: 3448

SEQ ID NO: 9342 - DNA, 2151 bp, Xanthomonas albilineans; identical to SEQ ID NO: 3449
  CDS (1)..(2151)

SEQ ID NO: 9343 - protein, 716 aa, Xanthomonas albilineans; identical to SEQ ID NO: 3450

SEQ ID NO: 9344 - DNA, 2088 bp, Streptomyces thioluteus; identical to SEQ ID NO: 3451
  CDS (1)..(2088): Xaa of translated CDS can stand for any naturally occuring amino acid which can be translated from respective CDS-codon

SEQ ID NO: 9345 - protein, 695 aa, Streptomyces thioluteus; identical to SEQ ID NO: 3452
  misc_feature (11)..(12): Xaa can be any naturally occuring amino acid

SEQ ID NO: 9346 - DNA, 1707 bp, Listeria monocytogenes; identical to SEQ ID NO: 3453
  CDS (1)..(1707)

SEQ ID NO: 9347 - protein, 568 aa, Listeria monocytogenes; identical to SEQ ID NO: 3454

SEQ ID NO: 9348 - DNA, 1374 bp, Listeria monocytogenes; identical to SEQ ID NO: 3455
  CDS (1)..(1374)

SEQ ID NO: 9349 - protein, 457 aa, Listeria monocytogenes; identical to SEQ ID NO: 3456

SEQ ID NO: 9350 - DNA, 1599 bp, Desulfovibrio vulgaris; identical to SEQ ID NO: 3457
  CDS (1)..(1599)

SEQ ID NO: 9351 - protein, 532 aa, Desulfovibrio vulgaris; identical to SEQ ID NO: 3458

SEQ ID NO: 9352 - DNA, 1899 bp, Thermus thermophilus; identical to SEQ ID NO: 3459
  CDS (1)..(1899)

SEQ ID NO: 9353 - protein, 632 aa, Thermus thermophilus; identical to SEQ ID NO: 3460

SEQ ID NO: 9354 - DNA, 1422 bp, Leptospira interrogans; identical to SEQ ID NO: 3461
  CDS (1)..(1422)

SEQ ID NO: 9355 - protein, 473 aa, Leptospira interrogans; identical to SEQ ID NO: 3462

SEQ ID NO: 9356 - DNA, 1413 bp, Bacillus cereus; identical to SEQ ID NO: 3463
  CDS (1)..(1413)

SEQ ID NO: 9357 - protein, 470 aa, Bacillus cereus; identical to SEQ ID NO: 3464

SEQ ID NO: 9358 - DNA, 1443 bp, Bacillus cereus; identical to SEQ ID NO: 3465
  CDS (1)..(1443)

SEQ ID NO: 9359 - protein, 480 aa, Bacillus cereus; identical to SEQ ID NO: 3466

SEQ ID NO: 9360 - DNA, 1476 bp, Geobacter sulfurreducens; identical to SEQ ID NO: 3467
  CDS (1)..(1476)

SEQ ID NO: 9361 - protein, 491 aa, Geobacter sulfurreducens; identical to SEQ ID NO: 3468

SEQ ID NO: 9362 - DNA, 1506 bp, Ashbya gossypii; identical to SEQ ID NO: 3469
  CDS (1)..(1506)

SEQ ID NO: 9363 - protein, 501 aa, Ashbya gossypii; identical to SEQ ID NO: 3470

SEQ ID NO: 9364 - DNA, 1362 bp, Shigella flexneri; identical to SEQ ID NO: 3471
  CDS (1)..(1362)

SEQ ID NO: 9365 - protein, 453 aa, Shigella flexneri; identical to SEQ ID NO: 3472

SEQ ID NO: 9366 - DNA, 1419 bp, Wolinella succinogenes; identical to SEQ ID NO: 3473
  CDS (1)..(1419)

SEQ ID NO: 9367 - protein, 472 aa, Wolinella succinogenes; identical to SEQ ID NO: 3474

SEQ ID NO: 9368 - DNA, 1401 bp, Vibrio vulnificus; identical to SEQ ID NO: 3475
  CDS (1)..(1401)

SEQ ID NO: 9369 - protein, 466 aa, Vibrio vulnificus; identical to SEQ ID NO: 3476

SEQ ID NO: 9370 - DNA, 2076 bp, Photorhabdus luminescens; identical to SEQ ID NO: 3477
  CDS (1)..(2076)

SEQ ID NO: 9371 - protein, 691 aa, Photorhabdus luminescens; identical to SEQ ID NO: 3478

SEQ ID NO: 9372 - DNA, 1371 bp, Photorhabdus luminescens; identical to SEQ ID NO: 3479
  CDS (1)..(1371)

SEQ ID NO: 9373 - protein, 456 aa, Photorhabdus luminescens; identical to SEQ ID NO: 3480

SEQ ID NO: 9374 - DNA, 1575 bp, Photorhabdus luminescens; identical to SEQ ID NO: 3481
  CDS (1)..(1575)

SEQ ID NO: 9375 - protein, 524 aa, Photorhabdus luminescens; identical to SEQ ID NO: 3482

SEQ ID NO: 9376 - DNA, 2934 bp, Photorhabdus luminescens; identical to SEQ ID NO: 3483
  CDS (1)..(2934)

SEQ ID NO: 9377 - protein, 977 aa, Photorhabdus luminescens; identical to SEQ ID NO: 3484

SEQ ID NO: 9378 - DNA, 1527 bp, Gloeobacter violaceus; identical to SEQ ID NO: 3485
  CDS (1)..(1527)

SEQ ID NO: 9379 - protein, 508 aa, Gloeobacter violaceus; identical to SEQ ID NO: 3486

SEQ ID NO: 9380 - DNA, 1359 bp, Gloeobacter violaceus; identical to SEQ ID NO: 3487
  CDS (1)..(1359)

SEQ ID NO: 9381 - protein, 452 aa, Gloeobacter violaceus; identical to SEQ ID NO: 3488

SEQ ID NO: 9382 - DNA, 1293 bp, Chromobacterium violaceum; identical to SEQ ID NO: 3489
  CDS (1)..(1293)

SEQ ID NO: 9383 - protein, 430 aa, Chromobacterium violaceum; identical to SEQ ID NO: 3490

SEQ ID NO: 9384 - DNA, 1467 bp, Chromobacterium violaceum; identical to SEQ ID NO: 3491
  CDS (1)..(1467)

SEQ ID NO: 9385 - protein, 488 aa, Chromobacterium violaceum; identical to SEQ ID NO: 3492

SEQ ID NO: 9386 - DNA, 1287 bp, Synechococcus sp; identical to SEQ ID NO: 3493
  CDS (1)..(1287)

SEQ ID NO: 9387 - protein, 428 aa, Synechococcus sp; identical to SEQ ID NO: 3494

SEQ ID NO: 9388 - DNA, 1521 bp, Synechococcus sp; identical to SEQ ID NO: 3495
  CDS (1)..(1521)

SEQ ID NO: 9389 - protein, 506 aa, Synechococcus sp; identical to SEQ ID NO: 3496

SEQ ID NO: 9390 - DNA, 1644 bp, Rhodopirellula baltica; identical to SEQ ID NO: 3497
  CDS (1)..(1644)

SEQ ID NO: 9391 - protein, 547 aa, Rhodopirellula baltica; identical to SEQ ID NO: 3498

SEQ ID NO: 9392 - DNA, 1554 bp, Rhodopirellula baltica; identical to SEQ ID NO: 3499
  CDS (1)..(1554)

SEQ ID NO: 9393 - protein, 517 aa, Rhodopirellula baltica; identical to SEQ ID NO: 3500

SEQ ID NO: 9394 - DNA, 1521 bp, Prochlorococcus marinus subsp; identical to SEQ ID NO: 3501
  CDS (1)..(1521)

SEQ ID NO: 9395 - protein, 506 aa, Prochlorococcus marinus subsp; identical to SEQ ID NO: 3502

SEQ ID NO: 9396 - DNA, 1341 bp, Prochlorococcus marinus; identical to SEQ ID NO: 3503
  CDS (1)..(1341)

SEQ ID NO: 9397 - protein, 446 aa, Prochlorococcus marinus; identical to SEQ ID NO: 3504

SEQ ID NO: 9398 - DNA, 1521 bp, Prochlorococcus marinus; identical to SEQ ID NO: 3505
  CDS (1)..(1521)

SEQ ID NO: 9399 - protein, 506 aa, Prochlorococcus marinus; identical to SEQ ID NO: 3506

SEQ ID NO: 9400 - DNA, 1518 bp, Prochlorococcus marinus; identical to SEQ ID NO: 3507
  CDS (1)..(1518)

SEQ ID NO: 9401 - protein, 505 aa, Prochlorococcus marinus; identical to SEQ ID NO: 3508

SEQ ID NO: 9402 - DNA, 1497 bp, Helicobacter hepaticus; identical to SEQ ID NO: 3509
  CDS (1)..(1497)

SEQ ID NO: 9403 - protein, 498 aa, Helicobacter hepaticus; identical to SEQ ID NO: 3510

SEQ ID NO: 9404 - DNA, 1386 bp, Candidatus Blochmannia floridanus; identical to SEQ ID NO: 3511
  CDS (1)..(1386)

SEQ ID NO: 9405 - protein, 461 aa, Candidatus Blochmannia floridanus; identical to SEQ ID NO: 3512

SEQ ID NO: 9406 - DNA, 1566 bp, Candidatus Blochmannia floridanus; identical to SEQ ID NO: 3513
  CDS (1)..(1566)

SEQ ID NO: 9407 - protein, 521 aa, Candidatus Blochmannia floridanus; identical to SEQ ID NO: 3514

SEQ ID NO: 9408 - DNA, 1428 bp, Bacillus cereus; identical to SEQ ID NO: 3515
  CDS (1)..(1428)

SEQ ID NO: 9409 - protein, 475 aa, Bacillus cereus; identical to SEQ ID NO: 3516

SEQ ID NO: 9410 - DNA, 1398 bp, Bacillus cereus; identical to SEQ ID NO: 3517
  CDS (1)..(1398)

SEQ ID NO: 9411 - protein, 465 aa, Bacillus cereus; identical to SEQ ID NO: 3518

SEQ ID NO: 9412 - DNA, 1416 bp, Bacillus anthracis; identical to SEQ ID NO: 3519
  CDS (1)..(1416)

SEQ ID NO: 9413 - protein, 471 aa, Bacillus anthracis; identical to SEQ ID NO: 3520

SEQ ID NO: 9414 - DNA, 1482 bp, Streptomyces avermitilis; identical to SEQ ID NO: 3521
  CDS (1)..(1482)

SEQ ID NO: 9415 - protein, 493 aa, Streptomyces avermitilis; identical to SEQ ID NO: 3522

SEQ ID NO: 9416 - DNA, 2199 bp, Streptomyces avermitilis; identical to SEQ ID NO: 3523
  CDS (1)..(2199)

SEQ ID NO: 9417 - protein, 732 aa, Streptomyces avermitilis; identical to SEQ ID NO: 3524

SEQ ID NO: 9418 - DNA, 1488 bp, Nitrosomonas europaea; identical to SEQ ID NO: 3525
  CDS (1)..(1488)

SEQ ID NO: 9419 - protein, 495 aa, Nitrosomonas europaea; identical to SEQ ID NO: 3526

SEQ ID NO: 9420 - DNA, 1293 bp, Coxiella burnetii; identical to SEQ ID NO: 3527
  CDS (1)..(1293)

SEQ ID NO: 9421 - protein, 430 aa, Coxiella burnetii; identical to SEQ ID NO: 3528

SEQ ID NO: 9422 - DNA, 1392 bp, Coxiella burnetii; identical to SEQ ID NO: 3529
  CDS (1)..(1392)

SEQ ID NO: 9423 - protein, 463 aa, Coxiella burnetii; identical to SEQ ID NO: 3530

SEQ ID NO: 9424 - DNA, 1443 bp, Tropheryma whipplei; identical to SEQ ID NO: 3531
  CDS (1)..(1443)

SEQ ID NO: 9425 - protein, 480 aa, Tropheryma whipplei; identical to SEQ ID NO: 3532

SEQ ID NO: 9426 - DNA, 1494 bp, Burkholderia multivorans; identical to SEQ ID NO: 3533
  CDS (1)..(1494)

SEQ ID NO: 9427 - protein, 497 aa, Burkholderia multivorans; identical to SEQ ID NO: 3534

SEQ ID NO: 9428 - DNA, 1851 bp, Oryza sativa; identical to SEQ ID NO: 3535
  CDS (1)..(1851)

SEQ ID NO: 9429 - protein, 616 aa, Oryza sativa; identical to SEQ ID NO: 3536

SEQ ID NO: 9430 - DNA, 2241 bp, Neurospora crassa; identical to SEQ ID NO: 3537
  CDS (493)..(2241)

SEQ ID NO: 9431 - protein, 582 aa, Neurospora crassa; identical to SEQ ID NO: 3538

SEQ ID NO: 9432 - DNA, 1359 bp, Xylella fastidiosa; identical to SEQ ID NO: 3539
  CDS (1)..(1359)

SEQ ID NO: 9433 - protein, 452 aa, Xylella fastidiosa; identical to SEQ ID NO: 3540

SEQ ID NO: 9434 - DNA, 1476 bp, Xylella fastidiosa; identical to SEQ ID NO: 3541
  CDS (1)..(1476)

SEQ ID NO: 9435 - protein, 491 aa, Xylella fastidiosa; identical to SEQ ID NO: 3542

SEQ ID NO: 9436 - DNA, 1365 bp, Vibrio parahaemolyticus; identical to SEQ ID NO: 3543
  CDS (1)..(1365)

SEQ ID NO: 9437 - protein, 454 aa, Vibrio parahaemolyticus; identical to SEQ ID NO: 3544

SEQ ID NO: 9438 - DNA, 1344 bp, Pseudomonas syringae; identical to SEQ ID NO: 3545
  CDS (1)..(1344)

SEQ ID NO: 9439 - protein, 447 aa, Pseudomonas syringae; identical to SEQ ID NO: 3546

SEQ ID NO: 9440 - DNA, 1482 bp, Pseudomonas syringae; identical to SEQ ID NO: 3547
  CDS (1)..(1482)

SEQ ID NO: 9441 - protein, 493 aa, Pseudomonas syringae; identical to SEQ ID NO: 3548

SEQ ID NO: 9442 - DNA, 1341 bp, Pseudomonas putida; identical to SEQ ID NO: 3549
  CDS (1)..(1341)

SEQ ID NO: 9443 - protein, 446 aa, Pseudomonas putida; identical to SEQ ID NO: 3550

SEQ ID NO: 9444 - DNA, 1482 bp, Pseudomonas putida; identical to SEQ ID NO: 3551
  CDS (1)..(1482)

SEQ ID NO: 9445 - protein, 493 aa, Pseudomonas putida; identical to SEQ ID NO: 3552

SEQ ID NO: 9446 - DNA, 1437 bp, Lactobacillus plantarum; identical to SEQ ID NO: 3553
  CDS (1)..(1437)

SEQ ID NO: 9447 - protein, 478 aa, Lactobacillus plantarum; identical to SEQ ID NO: 3554

SEQ ID NO: 9448 - DNA, 2166 bp, Bradyrhizobium japonicum; identical to SEQ ID NO: 3555
  CDS (1)..(2166)

SEQ ID NO: 9449 - protein, 721 aa, Bradyrhizobium japonicum; identical to SEQ ID NO: 3556

SEQ ID NO: 9450 - DNA, 1407 bp, Bacteroides thetaiotaomicron; identical to SEQ ID NO: 3557
  CDS (1)..(1407)

SEQ ID NO: 9451 - protein, 468 aa, Bacteroides thetaiotaomicron; identical to SEQ ID NO: 3558

SEQ ID NO: 9452 - DNA, 1407 bp, Staphylococcus epidermidis; identical to SEQ ID NO: 3559
  CDS (1)..(1407)

SEQ ID NO: 9453 - protein, 468 aa, Staphylococcus epidermidis; identical to SEQ ID NO: 3560

SEQ ID NO: 9454 - DNA, 1161 bp, Staphylococcus epidermidis; identical to SEQ ID NO: 3561
  CDS (10)..(1161)

SEQ ID NO: 9455 - protein, 383 aa, Staphylococcus epidermidis; identical to SEQ ID NO: 3562

SEQ ID NO: 9456 - DNA, 1401 bp, Vibrio vulnificus; identical to SEQ ID NO: 3563
  CDS (1)..(1401)

SEQ ID NO: 9457 - protein, 466 aa, Vibrio vulnificus; identical to SEQ ID NO: 3564

SEQ ID NO: 9458 - DNA, 1566 bp, Vibrio vulnificus; identical to SEQ ID NO: 3565
  CDS (1)..(1566)

SEQ ID NO: 9459 - protein, 521 aa, Vibrio vulnificus; identical to SEQ ID NO: 3566

SEQ ID NO: 9460 - DNA, 1521 bp, Synechococcus elongatus; identical to SEQ ID NO: 3567
  CDS (1)..(1521)

SEQ ID NO: 9461 - protein, 506 aa, Synechococcus elongatus; identical to SEQ ID NO: 3568

SEQ ID NO: 9462 - DNA, 1377 bp, Synechococcus elongatus; identical to SEQ ID NO: 3569
  CDS (1)..(1377)

SEQ ID NO: 9463 - protein, 458 aa, Synechococcus elongatus; identical to SEQ ID NO: 3570

SEQ ID NO: 9464 - DNA, 1362 bp, Streptococcus mutans; identical to SEQ ID NO: 3571
  CDS (1)..(1362)

SEQ ID NO: 9465 - protein, 453 aa, Streptococcus mutans; identical to SEQ ID NO: 3572

SEQ ID NO: 9466 - DNA, 1725 bp, Shewanella oneidensis; identical to SEQ ID NO: 3573
  CDS (1)..(1725)

SEQ ID NO: 9467 - protein, 574 aa, Shewanella oneidensis; identical to SEQ ID NO: 3574

SEQ ID NO: 9468 - DNA, 1404 bp, Shewanella oneidensis; identical to SEQ ID NO: 3575
  CDS (1)..(1404)

SEQ ID NO: 9469 - protein, 467 aa, Shewanella oneidensis; identical to SEQ ID NO: 3576

SEQ ID NO: 9470 - DNA, 1407 bp, Oceanobacillus iheyensis; identical to SEQ ID NO: 3577
  CDS (1)..(1407)

SEQ ID NO: 9471 - protein, 468 aa, Oceanobacillus iheyensis; identical to SEQ ID NO: 3578

SEQ ID NO: 9472 - DNA, 1362 bp, Escherichia coli O6; identical to SEQ ID NO: 3579
  CDS (1)..(1362)

SEQ ID NO: 9473 - protein, 453 aa, Escherichia coli O6; identical to SEQ ID NO: 3580

SEQ ID NO: 9474 - DNA, 1668 bp, Corynebacterium efficiens; identical to SEQ ID NO: 3581
  CDS (1)..(1668)

SEQ ID NO: 9475 - protein, 555 aa, Corynebacterium efficiens; identical to SEQ ID NO: 3582

SEQ ID NO: 9476 - DNA, 1869 bp, Corynebacterium efficiens; identical to SEQ ID NO: 3583
  CDS (1)..(1869)

SEQ ID NO: 9477 - protein, 622 aa, Corynebacterium efficiens; identical to SEQ ID NO: 3584

SEQ ID NO: 9478 - DNA, 1557 bp, Bifidobacterium longum; identical to SEQ ID NO: 3585
  CDS (1)..(1557)

SEQ ID NO: 9479 - protein, 518 aa, Bifidobacterium longum; identical to SEQ ID NO: 3586

SEQ ID NO: 9480 - DNA, 1482 bp, Streptomyces globisporus; identical to SEQ ID NO: 3587
  CDS (1)..(1482)

SEQ ID NO: 9481 - protein, 493 aa, Streptomyces globisporus; identical to SEQ ID NO: 3588

SEQ ID NO: 9482 - DNA, 1686 bp, Streptococcus pyogenes; identical to SEQ ID NO: 3589
  CDS (1)..(1686)

SEQ ID NO: 9483 - protein, 561 aa, Streptococcus pyogenes; identical to SEQ ID NO: 3590

SEQ ID NO: 9484 - DNA, 1887 bp, Chlorobium tepidum; identical to SEQ ID NO: 3591
  CDS (1)..(1887)

SEQ ID NO: 9485 - protein, 628 aa, Chlorobium tepidum; identical to SEQ ID NO: 3592

SEQ ID NO: 9486 - DNA, 1515 bp, Chlorobium tepidum; identical to SEQ ID NO: 3593
  CDS (1)..(1515)

SEQ ID NO: 9487 - protein, 504 aa, Chlorobium tepidum; identical to SEQ ID NO: 3594

SEQ ID NO: 9488 - DNA, 1832 bp, Acinetobacter baumannii; identical to SEQ ID NO: 3595
  CDS (321)..(1637)

SEQ ID NO: 9489 - protein, 438 aa, Acinetobacter baumannii; identical to SEQ ID NO: 3596

SEQ ID NO: 9490 - DNA, 1356 bp, Xanthomonas campestris; identical to SEQ ID NO: 3597
  CDS (1)..(1356)

SEQ ID NO: 9491 - protein, 451 aa, Xanthomonas campestris; identical to SEQ ID NO: 3598

SEQ ID NO: 9492 - DNA, 1356 bp, Xanthomonas axonopodis; identical to SEQ ID NO: 3599
  CDS (1)..(1356)

SEQ ID NO: 9493 - protein, 451 aa, Xanthomonas axonopodis; identical to SEQ ID NO: 3600

SEQ ID NO: 9494 - DNA, 1476 bp, Xanthomonas axonopodis; identical to SEQ ID NO: 3601
  CDS (1)..(1476)

SEQ ID NO: 9495 - protein, 491 aa, Xanthomonas axonopodis; identical to SEQ ID NO: 3602

SEQ ID NO: 9496 - DNA, 1839 bp, Methanosarcina mazei; identical to SEQ ID NO: 3603
  CDS (1)..(1839)

SEQ ID NO: 9497 - protein, 612 aa, Methanosarcina mazei; identical to SEQ ID NO: 3604

SEQ ID NO: 9498 - DNA, 1362 bp, Fusobacterium nucleatum; identical to SEQ ID NO: 3605
  CDS (1)..(1362)

SEQ ID NO: 9499 - protein, 453 aa, Fusobacterium nucleatum; identical to SEQ ID NO: 3606

SEQ ID NO: 9500 - DNA, 1431 bp, Thermoanaerobacter tengcongensis; identical to SEQ ID NO: 3607
  CDS (1)..(1431)

SEQ ID NO: 9501 - protein, 476 aa, Thermoanaerobacter tengcongensis; identical to SEQ ID NO: 3608

SEQ ID NO: 9502 - DNA, 1683 bp, Methanosarcina acetivorans; identical to SEQ ID NO: 3609
  CDS (1)..(1683)

SEQ ID NO: 9503 - protein, 560 aa, Methanosarcina acetivorans; identical to SEQ ID NO: 3610

SEQ ID NO: 9504 - DNA, 1407 bp, Methanopyrus kandleri; identical to SEQ ID NO: 3611
  CDS (1)..(1407)

SEQ ID NO: 9505 - protein, 468 aa, Methanopyrus kandleri; identical to SEQ ID NO: 3612

SEQ ID NO: 9506 - DNA, 1299 bp, Pyrococcus furiosus; identical to SEQ ID NO: 3613
  CDS (1)..(1299)

SEQ ID NO: 9507 - protein, 432 aa, Pyrococcus furiosus; identical to SEQ ID NO: 3614

SEQ ID NO: 9508 - DNA, 1347 bp, Clostridium perfringens; identical to SEQ ID NO: 3615
  CDS (1)..(1347)

SEQ ID NO: 9509 - protein, 448 aa, Clostridium perfringens; identical to SEQ ID NO: 3616

SEQ ID NO: 9510 - DNA, 1530 bp, Ralstonia solanacearum; identical to SEQ ID NO: 3617
  CDS (1)..(1530)

SEQ ID NO: 9511 - protein, 509 aa, Ralstonia solanacearum; identical to SEQ ID NO: 3618

SEQ ID NO: 9512 - DNA, 1269 bp, Pyrobaculum aerophilum; identical to SEQ ID NO: 3619
  CDS (1)..(1269)

SEQ ID NO: 9513 - protein, 422 aa, Pyrobaculum aerophilum; identical to SEQ ID NO: 3620

SEQ ID NO: 9514 - DNA, 1479 bp, Arabidopsis thaliana; identical to SEQ ID NO: 3621
  CDS (1)..(1479)

SEQ ID NO: 9515 - protein, 492 aa, Arabidopsis thaliana; identical to SEQ ID NO: 3622

SEQ ID NO: 9516 - DNA, 1302 bp, Sulfolobus tokodaii; identical to SEQ ID NO: 3623
  CDS (1)..(1302)

SEQ ID NO: 9517 - protein, 433 aa, Sulfolobus tokodaii; identical to SEQ ID NO: 3624

SEQ ID NO: 9518 - DNA, 1056 bp, Thermoplasma volcanium; identical to SEQ ID NO: 3625
  CDS (1)..(1056)

SEQ ID NO: 9519 - protein, 351 aa, Thermoplasma volcanium; identical to SEQ ID NO: 3626

SEQ ID NO: 9520 - DNA, 2202 bp, Rhizobium loti; identical to SEQ ID NO: 3627
  CDS (1)..(2202)

SEQ ID NO: 9521 - protein, 733 aa, Rhizobium loti; identical to SEQ ID NO: 3628

SEQ ID NO: 9522 - DNA, 3859 bp, Brucella abortus; identical to SEQ ID NO: 3629
  CDS (341)..(2536): Xaa of translated CDS can stand for any naturally occuring amino acid which can be translated from respective CDS-codon

SEQ ID NO: 9523 - protein, 731 aa, Brucella abortus; identical to SEQ ID NO: 3630
  misc_feature (323)..(323): Xaa can be any naturally occuring amino acid
  misc_feature (602)..(602): Xaa can be any naturally occuring amino acid

SEQ ID NO: 9524 - DNA, 1410 bp, Bradyrhizobium japonicum; identical to SEQ ID NO: 3631
  CDS (1)..(1410)

SEQ ID NO: 9525 - protein, 469 aa, Bradyrhizobium japonicum; identical to SEQ ID NO: 3632

SEQ ID NO: 9526 - DNA, 2145 bp, Catharanthus roseus; identical to SEQ ID NO: 3633
  CDS (53)..(1879)

SEQ ID NO: 9527 - protein, 608 aa, Catharanthus roseus; identical to SEQ ID NO: 3634

SEQ ID NO: 9528 - DNA, 1551 bp, Pasteurella multocida; identical to SEQ ID NO: 3635
  CDS (1)..(1551)

SEQ ID NO: 9529 - protein, 516 aa, Pasteurella multocida; identical to SEQ ID NO: 3636

SEQ ID NO: 9530 - DNA, 1416 bp, Streptomyces coelicolor; identical to SEQ ID NO: 3637
  CDS (1)..(1416)

SEQ ID NO: 9531 - protein, 471 aa, Streptomyces coelicolor; identical to SEQ ID NO: 3638

SEQ ID NO: 9532 - DNA, 1350 bp, Xanthomonas albilineans; identical to SEQ ID NO: 3639
  CDS (1)..(1350)

SEQ ID NO: 9533 - protein, 449 aa, Xanthomonas albilineans; identical to SEQ ID NO: 3640

SEQ ID NO: 9534 - DNA, 1071 bp, Thermoplasma acidophilum; identical to SEQ ID NO: 3641
  CDS (1)..(1071)

SEQ ID NO: 9535 - protein, 356 aa, Thermoplasma acidophilum; identical to SEQ ID NO: 3642

SEQ ID NO: 9536 - DNA, 2986 bp, Buchnera aphidicola; identical to SEQ ID NO: 3643
  CDS (1)..(1566)

SEQ ID NO: 9537 - protein, 521 aa, Buchnera aphidicola; identical to SEQ ID NO: 3644

SEQ ID NO: 9538 - DNA, 2630 bp, Buchnera aphidicola; identical to SEQ ID NO: 3645
  CDS (1)..(1566)

SEQ ID NO: 9539 - protein, 521 aa, Buchnera aphidicola; identical to SEQ ID NO: 3646

SEQ ID NO: 9540 - DNA, 2591 bp, Buchnera aphidicola; identical to SEQ ID NO: 3647
  CDS (1)..(1560)

SEQ ID NO: 9541 - protein, 519 aa, Buchnera aphidicola; identical to SEQ ID NO: 3648

SEQ ID NO: 9542 - DNA, 1706 bp, Bordetella bronchiseptica; identical to SEQ ID NO: 3649
  CDS (75)..(1595)

SEQ ID NO: 9543 - protein, 506 aa, Bordetella bronchiseptica; identical to SEQ ID NO: 3650

SEQ ID NO: 9544 - DNA, 2027 bp, Buchnera aphidicola; identical to SEQ ID NO: 3651
  CDS (1)..(1587)

SEQ ID NO: 9545 - protein, 528 aa, Buchnera aphidicola; identical to SEQ ID NO: 3652

SEQ ID NO: 9546 - DNA, 1569 bp, Buchnera aphidicola; identical to SEQ ID NO: 3653
  CDS (1)..(1569)

SEQ ID NO: 9547 - protein, 522 aa, Buchnera aphidicola; identical to SEQ ID NO: 3654

SEQ ID NO: 9548 - DNA, 2124 bp, Oryza sativa; identical to SEQ ID NO: 3655
  CDS (19)..(1839)

SEQ ID NO: 9549 - protein, 606 aa, Oryza sativa; identical to SEQ ID NO: 3656

SEQ ID NO: 9550 - DNA, 1734 bp, Oryza sativa; identical to SEQ ID NO: 3657
  CDS (1)..(1734)

SEQ ID NO: 9551 - protein, 577 aa, Oryza sativa; identical to SEQ ID NO: 3658

SEQ ID NO: 9552 - DNA, 1888 bp, Lactococcus lactis; identical to SEQ ID NO: 3659
  CDS (147)..(1559)

SEQ ID NO: 9553 - protein, 470 aa, Lactococcus lactis; identical to SEQ ID NO: 3660

SEQ ID NO: 9554 - DNA, 1317 bp, Aeropyrum pernix; identical to SEQ ID NO: 3661
  CDS (1)..(1317)

SEQ ID NO: 9555 - protein, 438 aa, Aeropyrum pernix; identical to SEQ ID NO: 3662

SEQ ID NO: 9556 - DNA, 1788 bp, Arabidopsis thaliana; identical to SEQ ID NO: 3663
  CDS (1)..(1788)

SEQ ID NO: 9557 - protein, 595 aa, Arabidopsis thaliana; identical to SEQ ID NO: 3664

SEQ ID NO: 9558 - DNA, 2017 bp, Arthrobacter globiformis; identical to SEQ ID NO: 3665
  misc_feature (12)..(12): n is a, c, g, or t
  misc_feature (36)..(36): n is a, c, g, or t
  misc_feature (44)..(44): n is a, c, g, or t
  misc_feature (55)..(55): n is a, c, g, or t
  misc_feature (66)..(66): n is a, c, g, or t
  misc_feature (279)..(280): n is a, c, g, or t
  CDS (402)..(1997)

SEQ ID NO: 9559 - protein, 531 aa, Arthrobacter globiformis; identical to SEQ ID NO: 3666

SEQ ID NO: 9560 - DNA, 2199 bp, Azospirillum brasilense; identical to SEQ ID NO: 3667
  CDS (1)..(2199)

SEQ ID NO: 9561 - protein, 732 aa, Azospirillum brasilense; identical to SEQ ID NO: 3668

SEQ ID NO: 9562 - DNA, 1542 bp, Bacillus pumilus; identical to SEQ ID NO: 3669
  CDS (1)..(1542)

SEQ ID NO: 9563 - protein, 513 aa, Bacillus pumilus; identical to SEQ ID NO: 3670

SEQ ID NO: 9564 - DNA, 1527 bp, Bacillus stearothermophilus; identical to SEQ ID NO: 3671
  CDS (1)..(1527)

SEQ ID NO: 9565 - protein, 508 aa, Bacillus stearothermophilus; identical to SEQ ID NO: 3672

SEQ ID NO: 9566 - DNA, 1545 bp, Buchnera aphidicola; identical to SEQ ID NO: 3673
  CDS (1)..(1545)

SEQ ID NO: 9567 - protein, 514 aa, Buchnera aphidicola; identical to SEQ ID NO: 3674

SEQ ID NO: 9568 - DNA, 1593 bp, Buchnera aphidicola; identical to SEQ ID NO: 3675
  CDS (1)..(1593)

SEQ ID NO: 9569 - protein, 530 aa, Buchnera aphidicola; identical to SEQ ID NO: 3676

SEQ ID NO: 9570 - DNA, 3037 bp, Buchnera aphidicola; identical to SEQ ID NO: 3677
  CDS (1)..(1581)

SEQ ID NO: 9571 - protein, 526 aa, Buchnera aphidicola; identical to SEQ ID NO: 3678

SEQ ID NO: 9572 - DNA, 1557 bp, Corynebacterium glutamicum; identical to SEQ ID NO: 3679
  CDS (1)..(1557)

SEQ ID NO: 9573 - protein, 518 aa, Corynebacterium glutamicum; identical to SEQ ID NO: 3680

SEQ ID NO: 9574 - DNA, 1476 bp, Neisseria gonorrhoeae; identical to SEQ ID NO: 3681
  CDS (1)..(1476)

SEQ ID NO: 9575 - protein, 491 aa, Neisseria gonorrhoeae; identical to SEQ ID NO: 3682

SEQ ID NO: 9576 - DNA, 1476 bp, Neisseria meningitidis; identical to SEQ ID NO: 3683
  CDS (1)..(1476)

SEQ ID NO: 9577 - protein, 491 aa, Neisseria meningitidis; identical to SEQ ID NO: 3684

SEQ ID NO: 9578 - DNA, 1563 bp, Salmonella typhimurium; identical to SEQ ID NO: 3685
  CDS (1)..(1563)

SEQ ID NO: 9579 - protein, 520 aa, Salmonella typhimurium; identical to SEQ ID NO: 3686

SEQ ID NO: 9580 - DNA, 2502 bp, Serratia marcescens; identical to SEQ ID NO: 3687
  CDS (280)..(1839)

SEQ ID NO: 9581 - protein, 519 aa, Serratia marcescens; identical to SEQ ID NO: 3688

SEQ ID NO: 9582 - DNA, 1626 bp, Vibrio parahaemolyticus; identical to SEQ ID NO: 3689
  CDS (1)..(1626)

SEQ ID NO: 9583 - protein, 541 aa, Vibrio parahaemolyticus; identical to SEQ ID NO: 3690

SEQ ID NO: 9584 - DNA, 24 bp, Artificial sequence
  Primer sequence
atgcaaacacaaaaaccgactctc

SEQ ID NO: 9585 - DNA, 25 bp, Artificial sequence
  Primer sequence
ttagaaagtctcctgtgcatgatgc

SEQ ID NO: 9586 - DNA, 1476 bp, Escherichia coli K12; identical to SEQ ID NO: 2577
  CDS (1)..(1476)

SEQ ID NO: 9587 - protein, 491 aa, Escherichia coli K12; identical to SEQ ID NO: 2578

SEQ ID NO: 9588 - DNA, 1957 bp, Leuconostoc mesenteroides; identical to SEQ ID NO: 2857
  CDS (206)..(1666)

SEQ ID NO: 9589 - protein, 486 aa, Leuconostoc mesenteroides; identical to SEQ ID NO: 2858

SEQ ID NO: 9590 - DNA, 2110 bp, Drosophila melanogaster
  CDS (370)..(1944)
cattggcagtgcttgcttgggcgtttgtttgctgcggcggttcgcgccgcgcttcagtcagtcagggaacgatcgtgcttatcttcattactactaccgcttccaccgaggcttcgcgactccgtacccgtactcgctttgttttacgtttgcgctactagttagtgaatccgacgacgacgacctgcgcgtgcgattaaagcgccgcaactctttgtaattacacagccagagccgcagaggttgctcaaaatccagcgactggagaaatcgtatatcgagttggaaatccgaatcgaaaggcttgcgtatacatagttgtcacacttttgcttttaaacagaaaaatccattcacattcgggtcaagatggcaacgcaaaaggaagatcacaccgccctggatctcataatcaagtcactcaagtcgcctacaatggtctgcgagggaacccactttgacggcaagattccgcacacgttcgtcatctttggggcgtcgggcgatctggccaagaagaagatctaccccacgctctggtggctctaccgcgatgacctgctgcccaagccgaccaagttctgcggctatgcccgttccatgctgaccgtcgatagcatcaaggagcagtgtctgccgtacatgaaggtccagccgcacgagcagaagaagtacgaggagttctgggccctcaatgagtacgtgtccggcagatatgacggacgcactggcttcgagctgcttaaccagcagctggagattatggagaacaagaacaaggccaaccgcatcttctatctggccctgccgcccagcgtcttcgaggaggtgactgtcaacatcaagcagatctgcatgtcggtctgcggttggaaccgcgtgattatcgagaagcctttcggccgggatgacgcctcctcgcaggcgctgagcgaccatctggccggtctgttccaggaggatcagctgtaccgcatcgatcactacctgggcaaggagatggtgcagaacctgatgaccatacgcttcggcaacaagatcctcagctcgacgtggaaccgcgagaacatcgcctccgtgctgatcacgttcaaggagcccttcggcacgcagggtcgtggcggctacttcgacgagttcggcatcatacgcgacgtgatgcagaaccatctgctgcagatcctctcgctggtggccatggagaagccggtgagctgccacccggacgacattcgtgacgagaaggtcaaggtgctgaagagcatcgaggccctgacgctggatgacatggtgctgggccagtacctgggcaatccgcagggtacaaacgatgatgcgcgcacgggctacgtggaggaccccaccgttagcaacgattcgaacacgcccacctacgccctcggcgtgctcaagatcaacaacgagcgctggcagggagtgcccttcatcctgcgctgcggcaaggcgctgaacgagcgcaaggcggaggtgcgtatccagtaccaggacgtgcccggcgacatcttcgagggcaatacgaagcgcaacgagctggtcatccgcgtccagccgggcgaggccctgtactttaagatgatgaccaagagccccggcatcacgttcgacatcgaggagacggagctggacctcacctacgagcaccgctacaaggactcctacctgccggacgcgtacgagcgtctcatcctcgacgtcttctgcggctcccagatgcacttcgtccgctcggacgagctgcgcgaggcgtggcgcatatttacgcccattctgcaccagatcgagaaggagcacattcggccaatcacctaccagtacggatcgcgcggtcccaaggaggcggaccgcaagtgcgaggagaacaatttcaagtactccggctcctacaagtggcacggcggcaaggcggccacgtccaatcactgagcgtttggagcacaccaatccccgggctgggttcgcaggatactcctctctgtccgcacgtacatgtacatacatacatatatatgtatatatacatatatgcattctttggttatttgtaattcggtctgtacaagatttttttttattaaatatacaaaatagt

SEQ ID NO: 9591 - protein, 524 aa, Drosophila melanogaster
MATQKEDHTALDLIIKSLKSPTMVCEGTHFDGKIPHTFVIFGASGDLAKKKIYPTLWWLYRDDLLPKPTKFCGYARSMLTVDSIKEQCLPYMKVQPHEQKKYEEFWALNEYVSGRYDGRTGFELLNQQLEIMENKNKANRIFYLALPPSVFEEVTVNIKQICMSVCGWNRVIIEKPFGRDDASSQALSDHLAGLFQEDQLYRIDHYLGKEMVQNLMTIRFGNKILSSTWNRENIASVLITFKEPFGTQGRGGYFDEFGIIRDVMQNHLLQILSLVAMEKPVSCHPDDIRDEKVKVLKSIEALTLDDMVLGQYLGNPQGTNDDARTGYVEDPTVSNDSNTPTYALGVLKINNERWQGVPFILRCGKALNERKAEVRIQYQDVPGDIFEGNTKRNELVIRVQPGEALYFKMMTKSPGITFDIEETELDLTYEHRYKDSYLPDAYERLILDVFCGSQMHFVRSDELREAWRIFTPILHQIEKEHIRPITYQYGSRGPKEADRKCEENNFKYSGSYKWHGGKAATSNH

SEQ ID NO: 9592 - DNA, 1593 bp, Fugu rubripes (Japanese pufferfish); identical to SEQ ID NO: 2537
  CDS (1)..(1593)

SEQ ID NO: 9593 - protein, 530 aa, Fugu rubripes (Japanese pufferfish); identical to SEQ ID NO: 2538

SEQ ID NO: 9594 - DNA, 1506 bp, Vibrio cholerae; identical to SEQ ID NO: 2539
  CDS (1)..(1506)

SEQ ID NO: 9595 - protein, 501 aa, Vibrio cholerae; identical to SEQ ID NO: 2540

SEQ ID NO: 9596 - DNA, 1476 bp, Pseudomonas aeruginosa
  CDS (7)..(1476)
caacaaatgcctgatgtccgcgttctgccttgcacgttagcgctgttcggtgcgctgggcgatctcgccttgcgcaagctgttcccggcgctctaccaactcgatcgtgagaacctgctgcaccgcgatacccgcgtcctggccctggcccgtgacgaaggcgctcccgccgaacacctggcgacgctggagcagcgcctgcgcctggcagtgccggcgaaggagtgggacgacgtggtctggcagcgtttccgcgaacgcctcgactacctgagcatggacttcctcgacccgcaggcctatgtcggcttgcgcgaggcggtggatgacgaactgccgctggtcgcctacttcgccacgccggcctcggtgttcggcggcatctgcgagaacctcgccgccgccggtctcgccgagcgcacccgggtggtgctggagaagcccatcggtcatgacctggagtcgtcccgcgaggtcaacgaggcagtcgcccggttcttcccggaaagccgcatctaccggatcgaccattacctgggcaaggagacggtgcagaacctgatcgccctgcgcttcgccaacagcctcttcgagacccagtggaaccagaaccacatctcccacgtggagatcaccgtggccgagaaggtcggcatcgaaggccgctggggctacttcgaccaggccgggcaactgcgcgacatggtgcagaaccacctgctgcaactgctctgcctgatcgccatggatccgcccagcgacctttcggcggacagcattcgcgacgagaaggtcaaggtcctccgcgccctcgagccgattcccgcagaacaactggcttcgcgcgtggtgcgtgggcagtacaccgccggtttcagcgacggcaaggcagtgccgggctacctggaggaggaacatgcgaatcgcgacagcgacgcggaaaccttcgtcgccctgcgcgtggacatccgcaactggcgctggtcgggcgtgccgttctacctgcgcaccggcaagcgcatgccgcagaagctgtcgcagatcgtcatccacttcaaggagccgccgcactacatcttcgctcccgagcagcgttcgctgatcagcaaccggctgatcatccgcctgcagccggacgaaggtatctccctgcaagtgatgaccaaggaccagggcctgggcaagggcatgcaattgcgtaccggcccgctgcaactgagtttttccgagacctaccacgcggcgcggattcccgatgcctacgagcgtctgctgctggaggtcacccagggcaaccagtacctgttcgtgcgcaaggacgaggtggagttcgcctggaagtggtgcgaccagctgatcgctggctgggaacgcctgagcgaagcgcccaagccgtatccggctgggagttgggggccggtggcctcggtggccctggtggcccgcgatgggaggagttggtatggcgatttctga

SEQ ID NO: 9597 - protein, 489 aa, Pseudomonas aeruginosa; identical to SEQ ID NO: 2542

SEQ ID NO: 9598 - DNA, 1485 bp, Staphylococcus aureus
  CDS (1)..(1485)
atgagtactaaaaacaaacacatcccatgtttaatcacaatctttggtgcaactggtgacttaagccatcgtaagttgtttccatcaatattccatctctaccaacaagacaatttagatgaacatattgccatcatcggtattggacgtcgtgacattactaatgatgatttccgtaatcaagtaaaatcatcaattcaaaagcacgtaaaagatacaaacaaaattgacgcgtttatggaacatgtcttctatcatagacatgatgttagtaatgaagaaagctatcaagaattactagattttagtaatgaattagatagccaatttgaattaaaaggtaatcgactattctatttagcaatggcaccacaattctttggcgttatttctgattatctaaaatcttctggtcttactgatacaaaaggatttaaacgccttgttatcgaaaaaccattcggtagtgatttaaaatcagccgaagcattaaacaatcaaattcgtaaatcatttaaagaagaagaaatttatcgtattgaccactatttaggaaaagacatggttcaaaatatcgaggtattacgttttgcgaatgcgatgtttgaaccattatggaataacaaatatatttcaaacatccaagttacatcttctgaaatactaggtgttgaagatcgtggtggttattatgaatcaagtggcgcgctaaaagatatggtgcaaaaccacatgttacaaatggttgcattattagctatggaagcacctattagtttaaatagtgaagatatccgtgctgagaaagtaaaagtacttaaatcactgcgtcatttccaatctgaagatgttaaaaagaactttgttcgtggtcaatatggcgaaggctatatcgatggtaaacaagttaaagcataccgtgatgaagatcgcgttgcagatgactctaacacacctacctttgtttcaggtaaattaacaattgataactttagatgggctggtgtaccattctatattcgtactggtaaacgtatgaaatctaaaacaattcaagttgtcgttgaatttaaagaagtaccaatgaacttatactatgaaactgataaactgttagattcaaacctattagtaatcaatatccaacctaatgaaggtgtatctttacatctaaatgctaagaaaaatacacaaggtatcgaaacagaacctgtccaattgtcttactcaatgagcgctcaagataaaatgaatactgtagatgcatatgaaaatctattatttgattgtcttaaaggtgatgccactaacttcacgcactgggaagaattaaaatcaacatggaaatttgttgatgcaattcaagatgaatggaatatggttgatccagaattccctaactatgaatcaggtactaatggtccattagaaagtgatttactacttgctcgtgatggtaaccattggtgggacgatattcaatga

SEQ ID NO: 9599 - protein, 494 aa, Staphylococcus aureus; identical to SEQ ID NO: 2544

SEQ ID NO: 9600 - DNA, 1488 bp, Streptococcus pneumoniae; identical to SEQ ID NO: 2545
  CDS (1)..(1488)

SEQ ID NO: 9601 - protein, 495 aa, Streptococcus pneumoniae; identical to SEQ ID NO: 2546

SEQ ID NO: 9602 - DNA, 1476 bp, Salmonella enterica subsp. enterica serovar Typhi; identical to SEQ ID NO: 2547
  CDS (1)..(1476)

SEQ ID NO: 9603 - protein, 491 aa, Salmonella enterica subsp. enterica serovar Typhi; identical to SEQ ID NO: 2548

SEQ ID NO: 9604 - DNA, 1476 bp, Listeria monocytogenes
  CDS (1)..(1476)
atgacagatgagttagaacaaaaagcactgattactatttttggcggtacgggagatttggcaaatcgcaaactttacccttcgctatatcatttgtacagtaagggatctcttggcgacaattttgctgttattggaacggctcgtcgtgaatggagtaacgatttcttccgtgataaagtaaaagagtctatcaaagacattgacggttctgaaaaagacgcagatgcatttgcttctcacttctactatcaatctcatgatgtgacaaataaagaatcttatctaactttaaaagatttgtctgatgaattagatgcaaaatacgaattagatggcaatcgccttttctatcttgcaatggcgccaaatttctttggaactatcgcaagtcgcattaaatctgaaggctttgttgatacagacggtttccatcgtttaattatcgaaaaaccattcggccatgatttagctagtgcggaagaattaaacaattcacttcgtcaagctttcaaggaagatgaaatttatcgtattgaccattatttaggaaaagaaatgatccaaaatatttcggttattcgttttgcaaattctattattgaatcgctttggaataatcgttacatcgataatattcaagttactttaacagaggtacttggagtcgaagatcgtggacgctattacgatgaaagtggcgcacttcgagacatggttcaaaatcatatcttacaaatcgtttctttacttgcaatggagccaccgattaacttatctactcgcgagattcgtcatgaaaaagttcgcgcgcttcgttctttacgcgtttttgaaggaaaagaagtgcatcaaagctttatccgtggtcaatatggtcccggtgaagtggatggtaaagagttaaaaggttatcgtcaagaagataatgtggatccccattccaatacggaaacatttgttgcagccaaacttgaaatcgataatttccgctgggctggcgtaccattttacattcgcactggtaaacgtcttgcgaagaaaacaacgcaaattgcgattcagtttaaagatgtcccactaaacttattcgggcaacaacaatcacttggtggtaatgtgcttgttattcatatccaaccggacgaaggtattacacttcatttgaacgtaaaagaacctggtcaaggtatggttacgatgccagtcaacttgaattatattcattcctctccagacggcatgaacacacctgaggcttacgaaaaattgattctagactgtcttcgcggtgacgcgacttacttctctcactgggatgaagtatcgctatcatggaactttatcgaccatatagcagatgtttggacaaatacgaaagatcatttcccgaactacaaatccggttcaatggggccaaaagaagcagacgacctcattcaacgtgacggattccagtggttcccgatcgattaa

SEQ ID NO: 9605 - protein, 491 aa, Listeria monocytogenes
MTDELEQKALITIFGGTGDLANRKLYPSLYHLYSKGSLGDNFAVIGTARREWSNDFFRDKVKESIKDIDGSEKDADAFASHFYYQSHDVTNKESYLTLKDLSDELDAKYELDGNRLFYLAMAPNFFGTIASRIKSEGFVDTDGFHRLIIEKPFGHDLASAEELNNSLRQAFKEDEIYRIDHYLGKEMIQNISVIRFANSIIESLWNNRYIDNIQVTLTEVLGVEDRGRYYDESGALRDMVQNHILQIVSLLAMEPPINLSTREIRHEKVRALRSLRVFEGKEVHQSFIRGQYGPGEVDGKELKGYRQEDNVDPHSNTETFVAAKLEIDNFRWAGVPFYIRTGKRLAKKTTQIAIQFKDVPLNLFGQQQSLGGNVLVIHIQPDEGITLHLNVKEPGQGMVTMPVNLNYIHSSPDGMNTPEAYEKLILDCLRGDATYFSHWDEVSLSWNFIDHIADVWTNTKDHFPNYKSGSMGPKEADDLIQRDGFQWFPID

SEQ ID NO: 9606 - DNA, 1530 bp, Nostoc sp. PCC 7120; identical to SEQ ID NO: 2551
  CDS (1)..(1530)

SEQ ID NO: 9607 - protein, 509 aa, Nostoc sp. PCC 7120; identical to SEQ ID NO: 2552

SEQ ID NO: 9608 - DNA, 1386 bp, Agrobacterium tumefaciens; identical to SEQ ID NO: 2553
  CDS (1)..(1386)

SEQ ID NO: 9609 - protein, 461 aa, Agrobacterium tumefaciens; identical to SEQ ID NO: 2554

SEQ ID NO: 9610 - DNA, 1476 bp, Brucella melitensis; identical to SEQ ID NO: 2555
  CDS (1)..(1476)

SEQ ID NO: 9611 - protein, 491 aa, Brucella melitensis; identical to SEQ ID NO: 2556

SEQ ID NO: 9612 - DNA, 1458 bp, Zymomonas mobilis; identical to SEQ ID NO: 2557
  CDS (1)..(1458)

SEQ ID NO: 9613 - protein, 485 aa, Zymomonas mobilis; identical to SEQ ID NO: 2558

SEQ ID NO: 9614 - DNA, 1470 bp, Bacillus subtilis; identical to SEQ ID NO: 2559
  CDS (1)..(1470)

SEQ ID NO: 9615 - protein, 489 aa, Bacillus subtilis; identical to SEQ ID NO: 2560

SEQ ID NO: 9616 - DNA, 1401 bp, Mycobacterium tuberculosis
  CDS (1)..(1401)
atggttgacggcggaggtggcgcgtcagatctgttggtgatcttcggaattaccggtgacctggcccgcaagatgaccttccgcgcgttgtatcggctcgagcgccaccagttgctggactgccccatcctgggtgtggccagtgacgacatgtccgtcgggcagttggtcaagtgggctcgcgagtccatcggtcgtaccgaaaagatcgacgatgcggtgttcgaccggttggcgggccggttgtcctacctgcacggtgacgtcaccgacagccagctctacgattcgctggccgaactgattggctcggcctgtcggccgctgtattacctggaaatgccgccggcgctgttcgcgccgattgtcgaaaatctcgcgaacgtgcggctgttggagcgcgcacgcgttgccgtggaaaagccgttcggccacgacctggcctccgcgctcgaactcaacgcccggctgcgagcggtgttgggcgaagaccaaatcctgcgtgtggaccactttctgggcaagcagcccgtcgtcgagctggagtacctgaggttcgccaatcaggcgttagccgagctctgggatcgcaacagcatctccgagatccacatcaccatggccgaggacttcggggtggaggaccgcggcaagttttacgacgccgtcggtgccctgcgtgacgtggtgcaaaaccatctgctgcaggtgctggcgctggtgacgatggaaccgccggtcggttccagcgccgatgacctcaacgacaagaaggccgaggtcttccgggcgatggcgccgctggatcccgatcggtgcgtgcgtgggcagtacctcggctacaccgaagttgcgggcgtagcaagcgattcggcgaccgaaacgtatgtcgcgctgcgaaccgagatcgacaactggcgctgggccggggtgccgatcttcgtgcgggccggaaaagagctgcccgcgaaggtcaccgaagtacggctatttctacgccgagttccggcattggcctttctgcccaaccgccgaccggccgagcccaaccagattgtgctgcgtatcgaccccgatccgggtatgcgactgcagatttcggcccacaccgacgactcgtggcgagatatccacctggactcctcgttcgcggtggacctcggtgaaccgatacgaccctatgagcggctgctgtatgccggattggtcggcgatcaccagttgttcgcccgcgaggacagcatcgagcagacgtggcggatcgtgcagccgctgctcgacaacccgggtgaaatccatcggtacgatcgcggttcctggggtccggaagccgcgcagtcgttgctgcgcggtcaccgcggttggcagtcgccgtggctgccccgcggcacggacgcatga

SEQ ID NO: 9617 - protein, 466 aa, Mycobacterium tuberculosis; identical to SEQ ID NO: 2562

SEQ ID NO: 9618 - DNA, 1545 bp, Mycobacterium tuberculosis
  CDS (1)..(1545)
atgaaaccggcccacgccgcggcgtcgtggcgcaacccgctacgagacaagcgggacaagcgattacccagaatcgccggcccgtgcggcatggtgattttcggcgtcaccggcgacctggcccgcaagaaggtgatgccggccgtctacgatttggccaaccgcggcctgctgccgcccacattctcgctggtggggtttgcccgccgagactggagcacccaggatttcggtcaagtggtgtacaacgccgtccaagagcactgccgaacaccgtttcggcaacagaactgggaccggctggccgagggattccgttttgtgccaggcactttcgacgacgacgacgcgttcgcccaactcgccgagacgctggagaagctcgacgccgagcgcggcaccggcggcaaccacgccttctacctggcgatcccgcccaaatccttcccggtggtgtgtgagcagctgcacaagtccggcctggcccgcccgcaaggcgaccggtggagccgagtcgtgatagagaagccgttcggccacgacctggccagcgcacgcgagctgaacaaggcggtcaacgcggtcttcccggaggaagcggtcttccgcatcgaccactacctgggcaaagagacggtgcagaacatcctggcgctgcggttcgccaaccagctgttcgacccgatctggaatgcgcactacgtcgaccacgtacagatcaccatggccgaagacatcggcctgggcgggcgcgcgggctattacgacggcatcggcgcggcccgcgatgtcatccagaaccatctcatgcagctgctggcgctgaccgcgatggaggagccggtcagcttccacccggcagcgttgcaggccgagaagatcaaggtgctctcggccacccgccttgccgagccactcgaccagaccaccagccgcggccagtacgccgccggctggcaaggcggggagaaggtggttgggctgctcgacgaggaggggttcgccgaggactccaccaccgaaaccttcgccgctatcaccctggaagtcgatacgcgccggtgggccggcgtgccgttctatctgcgaacgggaaaacgattgggccgccgggtgaccgagatcgctctggtcttcaggcgggcgccgcatctgccgttcgacgccaccatgaccgacgagctgggcaccaacgcgatggtcatccgcgtgcagcccgacgaaggtgtcacattgcggttcggctccaaggtgccgggcaccgccatggaagtccgcgacgtcaacatggacttctcctacggctcggcattcgccgaagattcaccggaggcctacgagcggctcatcctcgacgtcctgctcggcgagccctcgctgtttccggtcaacgcggaggtcgaactggcgtgggagatcctcgatccagcgttggaacattgggcggcacacgggacgcccgacgcctacgaggcaggtacctggggtccggaatcatccttggagatgctgcgccgcaccggccgggaatggcggcggccatga

SEQ ID NO: 9619 - protein, 514 aa, Mycobacterium tuberculosis; identical to SEQ ID NO: 2564

SEQ ID NO: 9620 - DNA, 1320 bp, Chlamydia trachomatis; identical to SEQ ID NO: 2565
  CDS (1)..(1320)

SEQ ID NO: 9621 - protein, 439 aa, Chlamydia trachomatis; identical to SEQ ID NO: 2566

SEQ ID NO: 9622 - DNA, 1773 bp, Deinococcus radiodurans; identical to SEQ ID NO: 2567
  CDS (1)..(1773)

SEQ ID NO: 9623 - protein, 590 aa, Deinococcus radiodurans; identical to SEQ ID NO: 2568

SEQ ID NO: 9624 - DNA, 1467 bp, Pseudomonas aeruginosa; identical to SEQ ID NO: 2569
  CDS (1)..(1467)

SEQ ID NO: 9625 - protein, 488 aa, Pseudomonas aeruginosa; identical to SEQ ID NO: 2570

SEQ ID NO: 9626 - DNA, 1422 bp, Caulobacter crescentus; identical to SEQ ID NO: 2571
  CDS (1)..(1422)

SEQ ID NO: 9627 - protein, 473 aa, Caulobacter crescentus; identical to SEQ ID NO: 2572

SEQ ID NO: 9628 - DNA, 1512 bp, Agrobacterium tumefaciens
  CDS (1)..(1512)
atgatgccccaacctttgaagatcgagagaatcgatatgagcagtcagatcattcctgttgaaccttttgattgtgtcgttttcggcggcacgggcgatcttgccgagcgcaagcttctgccggccctttatcaccggcaggtcgaaggccagttcacggagccgacccgcatcatcggcgcgtcgcgttcggtcatgacccatgaggaatatcgcaaattcgcgcaggacgccctgaaggaacacctgaaggccggcgaatatgacgatgcgcaggtgaccctgttcctcaaccggcttttctacgtgcccgtcgatgccaagtccggcaatggctgggacgtgctgaagaaactgctcgatgagggcaaggaacgcatccgcgcgttttatctggccgtcgcacccggcattttcggcgacatcgccgacaagatccgtgagcacaagctgatcacccgctcgacccgcatcgtcgttgaaaagccgatcggccgggatctcgcatccgcgcaggaactgaacgacaccatcggtcacgtcttcaaggaagagcagatcttccgcatcgaccactatctcggcaaggagacggtgcagaacctgatggcgctgcgtttcgccaatgcgctttacgagccgctgtggaattccgcccatatcgaccacgttcagatcaccgttgccgaagcggtgggtcttgaaggtcgcgccggttattacgacaaggccggtgcgctgcgcgacatggtgcagaaccacattctccagctgctttgcctcgttgccatggagccgcccgcttccatgaaatcggaggcagtgcgcgacgaaaagctcaaggtactgcgctcgctgaagccaatcgataccagcaatgtcgaaaagctgacggtacgcggccagtaccgcgccggcgcttccgcaggcggccccgtcaagggttatctggaagagctggaaggcggcgtttccaacaccgaaaccttcgtcgccatcaaggctgaaatcgccaactggcgctgggccggcgttcccttctacatccgcaccggcaaacgcctcgcgacccgtgtttcggaaatcgtcgtcaccttcaagcagatcccgcactcgatcttcgacgatgcggctggcaagatcgaagccaacaagctggtcattcgcctgcagccggatgaaggcgtcaagcagtcgctcctcatcaaggatcccggtccaggcggcatgcgcctgcgtcaggtctcgctggacatgagctttgccgaagccttcaacgtgcgcagccccgatgcctatgagcggctgttgatggacaccattcgttccaaccagacattgttcatgcgccgcgacgaggtcgaggccgcgtgggactggatcgaccccatcttgaagagctgggaagagctgggacagagcgtacagggttacactgccggcacctggggcccgagcggttcgatcgcactgatcgagcgcgacggccgcacctggcacgatgccgactga

SEQ ID NO: 9629 - protein, 503 aa, Agrobacterium tumefaciens
MMPQPLKIERIDMSSQIIPVEPFDCVVFGGTGDLAERKLLPALYHRQVEGQFTEPTRIIGASRSVMTHEEYRKFAQDALKEHLKAGEYDDAQVTLFLNRLFYVPVDAKSGNGWDVLKKLLDEGKERIRAFYLAVAPGIFGDIADKIREHKLITRSTRIVVEKPIGRDLASAQELNDTIGHVFKEEQIFRIDHYLGKETVQNLMALRFANALYEPLWNSAHIDHVQITVAEAVGLEGRAGYYDKAGALRDMVQNHILQLLCLVAMEPPASMKSEAVRDEKLKVLRSLKPIDTSNVEKLTVRGQYRAGASAGGPVKGYLEELEGGVSNTETFVAIKAEIANWRWAGVPFYIRTGKRLATRVSEIVVTFKQIPHSIFDDAAGKIEANKLVIRLQPDEGVKQSLLIKDPGPGGMRLRQVSLDMSFAEAFNVRSPDAYERLLMDTIRSNQTLFMRRDEVEAAWDWIDPILKSWEELGQSVQGYTAGTWGPSGSIALIERDGRTWHDAD

SEQ ID NO: 9630 - DNA, 1437 bp, Borrelia burgdorferi (Lyme disease spirochete); identical to SEQ ID NO: 2573
  CDS (1)..(1437)

SEQ ID NO: 9631 - protein, 478 aa, Borrelia burgdorferi (Lyme disease spirochete); identical to SEQ ID NO: 2574

SEQ ID NO: 9632 - DNA, 1548 bp, Treponema pallidum subsp. pallidum (syphilis spirochete); identical to SEQ ID NO: 2579
  CDS (1)..(1548)

SEQ ID NO: 9633 - protein, 515 aa, Treponema pallidum subsp. pallidum (syphilis spirochete); identical to SEQ ID NO: 2580

SEQ ID NO: 9634 - DNA, 1278 bp, Helicobacter pylori
  CDS (1)..(1278)
atgttagattttgatttggttctttttggcgcgactggggatttagccatgcgaaagctctttgtttcgctctatgaaatttatactcattatggttttaaaaacgattctaggattatcgcatcggggcgtaaggagctatccaatgaagaatttttaacactcctttgtgagaaaacacaactgcattcaagagaaaagggtagggaatttttagcccatatcagttatttgtgcgttcgtttggataaccctaaagactttgaagaattgagtaaaatcgctacaaaaaataaacccttgattttctacttttctatctcgcctagtttttttgcaacgaccgcccaacatttggccaaaaacgcgctcaatcacgccaacacacgcttgattttagaaaagcctttagggcatgatttaaagacatgtaaagagattttccaaagcattagcgttttttttaaagaagaacaaatctttagaatcgatcattatttagggaaaaagggcgttcaaaatatccttgaattgcgcctgaataaccctattttaaatattttatgggatcaaatcagcgcagttgaaatctgcgtgtatgagactttgggggtggaagaaagaggcgaattttacgataaaatcggggctttaagggatatggttcaaaaccatctcttgcaagttttatcccttatcgctacagatttacccaacaatttaaaggatttgaggaaagaaaaaatcaaagttttaaaaaccttacaaccccctaaagattttaaaaaacaggttattcgggcccaatatcaaggctatagagatgaaaataaggtccataaagagagccagacagagacttttgttgctattaaagcctttttggatacgcccaaatttaaaggcgtgcctttctaccttaagcacgctaaaaaaatgccccacaaccaagcgagcgtgaaaatccattttaacgcggtcaatacgctagaatttttcctctctcaagataaaatcaccctcaccctaaaagatcatcaaaacccccttattttagaaacccataacaaacaagaatttttacggccctacgctaaattgctctatgatgcgatacaaaataaccacaataatttcgcccaccagttggaattagaagcgtcatgggtttttattgacacgctcatagagggttttatgaataacgccacgcccttatattcctatgaaagccaccatctaaacgaatcagaatttttaaaaccactctatcaataa

SEQ ID NO: 9635 - protein, 425 aa, Helicobacter pylori
MLDFDLVLFGATGDLAMRKLFVSLYEIYTHYGFKNDSRIIASGRKELSNEEFLTLLCEKTQLHSREKGREFLAHISYLCVRLDNPKDFEELSKIATKNKPLIFYFSISPSFFATTAQHLAKNALNHANTRLILEKPLGHDLKTCKEIFQSISVFFKEEQIFRIDHYLGKKGVQNILELRLNNPILNILWDQISAVEICVYETLGVEERGEFYDKIGALRDMVQNHLLQVLSLIATDLPNNLKDLRKEKIKVLKTLQPPKDFKKQVIRAQYQGYRDENKVHKESQTETFVAIKAFLDTPKFKGVPFYLKHAKKMPHNQASVKIHFNAVNTLEFFLSQDKITLTLKDHQNPLILETHNKQEFLRPYAKLLYDAIQNNHNNFAHQLELEASWVFIDTLIEGFMNNATPLYSYESHHLNESEFLKPLYQ

SEQ ID NO: 9636 - DNA, 1446 bp, Neisseria meningitidis; identical to SEQ ID NO: 2591
  CDS (1)..(1446)

SEQ ID NO: 9637 - protein, 481 aa, Neisseria meningitidis; identical to SEQ ID NO: 2592

SEQ ID NO: 9638 - DNA, 1296 bp, Aquifex aeolicus; identical to SEQ ID NO: 2597
  CDS (1)..(1296)

SEQ ID NO: 9639 - protein, 431 aa, Aquifex aeolicus; identical to SEQ ID NO: 2598

SEQ ID NO: 9640 - DNA, 1491 bp, Thermotoga maritima; identical to SEQ ID NO: 2599
  CDS (1)..(1491)

SEQ ID NO: 9641 - protein, 496 aa, Thermotoga maritima; identical to SEQ ID NO: 2600

SEQ ID NO: 9642 - DNA, 1518 bp, Saccharomyces cerevisiae; identical to SEQ ID NO: 2533
  CDS (1)..(1518)

SEQ ID NO: 9643 - protein, 505 aa, Saccharomyces cerevisiae; identical to SEQ ID NO: 2534

SEQ ID NO: 9644 - DNA, 1494 bp, Kluyveromyces marxianus var. lactis, Candida sphaerica; identical to SEQ ID NO: 2601
  CDS (1)..(1494)

SEQ ID NO: 9645 - protein, 497 aa, Kluyveromyces marxianus var. lactis, Candida sphaerica; identical to SEQ ID NO: 2602

SEQ ID NO: 9646 - DNA, 2813 bp, Erwinia chrysanthemi; identical to SEQ ID NO: 2603
  CDS (322)..(1797)

SEQ ID NO: 9647 - protein, 491 aa, Erwinia chrysanthemi; identical to SEQ ID NO: 2604

SEQ ID NO: 9648 - DNA, 1645 bp, Aspergillus niger
  CDS (68)..(1600)
cttccctcctccaccgaatctctcacctttccttcccatctcgtggttgttcacacatcagtaaaacatggccagcacaatagcacgcactgaggaacgccagaatgctggcaccatggagctcaaagatgacactgtcatcatagtactgggtgcctccggagatcttgcaaagaagaagaccttcccggcccttttcggcctttatcgcaacaagttcctccccaagggaatcaagatcgtcggatatgcccggacaaacatggaccatgaggagtacctgaggcgtgtgcgctcatacatcaagacccctaccaaggaaatcgaagagcagctggacagcttctgccagttctgcacctacatttccggtcaatatgacaaggatgactcgttcatcaacctcaacaagcacctcgaggagattgagaagggccagaaggagcagaacagaatctactacatggccctcccccccagcgttttcaccaccgtttccgaccaacttaagcgcaactgctaccccaagaacggcgttgcccgtatcatcgtagagaagcctttcggcaaggaccttcagagctcgcgcgatctccaaaaagccctggagcctaactggaaggaagaggagatcttccgtatcgaccactacctgggtaaggagatggtcaagaacatccttatcatgcgcttcggaaacgaattcttcaacgccacctggaaccgtcaccacatcgataacgttcagatcacattcaaggagcccttcggcactgagggacgtggtggttacttcgatgaattcggcatcatccgtgatgtcatgcagaaccaccttctccaggtgttgacgctgctcgctatggagcgccccatttccttctccgccgaggacatccgtgacgagaaggttcgtgtcctccgtgcgatggacgccattgagcccaagaacgtcattattggccagtacggaaagtctctggatggcagcaagcccgcctacaaggaggacgagaccgttccccaggattcccgctgccccaccttctgcgctatggtcgcctacatcaagaacgagaggtgggacggtgttcctttcatcatgaaggctggcaaggccttgaacgagcagaagaccgagatccgtatccagttccgtgacgttacctccggaattttcaaggacatccctcgcaacgagctcgttatccgcgtccagcccaacgagtccgtgtacatcaagatgaactccaagctgcctggcctgtccatgcagacggttgtgactgagctcgacctcacctaccgccgccgcttctccgacctcaagatccccgaagcctacgagtctctgatcctggatgctctgaagggcgaccactccaacttcgtccgtgacgatgagctggatgccagctggaggatcttcacccctctcctgcactacctggatgacaacaaggagatcatccccatggaatacccctacggctcccgcggacccgccgtccttgatgacttcaccgcgtccttcggctacaagttcagcgatgctgctggctaccagtggcccttgacttccacccccaaccgtctgtaaataagggcggtcggcaggttatgacggatgaggatgaaaaaaaaa

SEQ ID NO: 9649 - protein, 510 aa, Aspergillus niger
MASTIARTEERQNAGTMELKDDTVIIVLGASGDLAKKKTFPALFGLYRNKFLPKGIKIVGYARTNMDHEEYLRRVRSYIKTPTKEIEEQLDSFCQFCTYISGQYDKDDSFINLNKHLEEIEKGQKEQNRIYYMALPPSVFTTVSDQLKRNCYPKNGVARIIVEKPFGKDLQSSRDLQKALEPNWKEEEIFRIDHYLGKEMVKNILIMRFGNEFFNATWNRHHIDNVQITFKEPFGTEGRGGYFDEFGIIRDVMQNHLLQVLTLLAMERPISFSAEDIRDEKVRVLRAMDAIEPKNVIIGQYGKSLDGSKPAYKEDETVPQDSRCPTFCAMVAYIKNERWDGVPFIMKAGKALNEQKTEIRIQFRDVTSGIFKDIPRNELVIRVQPNESVYIKMNSKLPGLSMQTVVTELDLTYRRRFSDLKIPEAYESLILDALKGDHSNFVRDDELDASWRIFTPLLHYLDDNKEIIPMEYPYGSRGPAVLDDFTASFGYKFSDAAGYQWPLTSTPNRL

SEQ ID NO: 9650 - DNA, 1785 bp, Medicago sativa (alfalfa); identical to SEQ ID NO: 2607
  CDS (38)..(1585)

SEQ ID NO: 9651 - protein, 515 aa, Medicago sativa (alfalfa); identical to SEQ ID NO: 2608

SEQ ID NO: 9652 - DNA, 1689 bp, Solanum tuberosum (potato); identical to SEQ ID NO: 2609
  CDS (46)..(1581)

SEQ ID NO: 9653 - protein, 511 aa, Solanum tuberosum (potato); identical to SEQ ID NO: 2610

SEQ ID NO: 9654 - DNA, 1530 bp, Synechocystis sp; identical to SEQ ID NO: 2611
  CDS (1)..(1530)

SEQ ID NO: 9655 - protein, 509 aa, Synechocystis sp; identical to SEQ ID NO: 2612

SEQ ID NO: 9656 - DNA, 2047 bp, Arabidopsis thaliana (mouse-ear cress)
  CDS (51)..(1850)
gtttgcatccaaatccaattcataactcacactcgtctcaaattcgaaaaatgtcgtctctctcctgccctacctaccgctcccgcacttcgtcttcgtctcctttcttgtcgaatcatcatcattcttcgctgatcaatgttgttgacccacgccgctcactctccttccactacgcttctcctcaggggcttaatctagctgagctctgtgttgttagatcgcagaggaggtccgttcagagttctgttgtcgtgcaagatggatcagtagccaccgagtcaagctcgtccgaggaggcgaaagatgtaggggtgttaacgattccttcacttgaagctgacaaggttgtagcagagtctgatggcggtgaacaactttcaacagttagtatcacggtggtgggagcttctggtgatcttgccaagaagaaaatattcccagctcttttcgcactttactatgaaggctgtcttcctgagcattttaccatttttggctatgcaaggagtaagatgacagatgctgaacttagagttatggtcagcaaaacattgacatgtagaattgataagagggcaaactgcggtgaaaagatggaagagtttctcaagagatgtttttaccattcgggtcagtatgattctcaggaacattttgttgcattggacgagaagctcaaggagcatgagggtggaagactttcgaaccgtcttttctatctttcaatccctccaaatatctttgttgacgcggtgaaatgtgcaagctcatctgcttcatctgtcaatggatggactagggtcattgtcgagaaaccttttggccgggactccaaaacctcggctgcattaacaaagtctcttaagcagtacctggaggaagaccaaatatttaggatagaccattacttagggaaggagctggttgagaacttgtcggttcttcgattctcaaatcttatatttgaaccgctatggtcaaggcagtatataaggaacgtgcaattcattttttctgaggatttcggcactgaaggacgcggagggtacttcgacaattacggaataataagagatataatgcagaatcatctgcttcagatattagctcttttcgccatggaaacacctgtgagtttggatgcagaggatatcagaaatgaaaaggtaaaggtactacgttcaatgagaccaataaaacttgaagatgtggtgataggacagtacaagagccacagcataggaggagtcacttatccaagctatactgatgataaaactgtgccaaaaggtagtctgaccccgacatttgcagctgctgcactcttcatcgacaatgcaagatgggatggtgtaccttttctaatgaaagctgggaaagcactaaacacccgaagtgcggagataagagtccagttcaggcatgtgcctggaaatttatataaccggaattctggtactgatcgtgatcagaccacaaatgagcttgtcatccgcgtccaacctgatgaagctatctatttgaaaatcaacaacaaggtccctggtttaggaatgagattagatcagagtaacttaaatcttctctattcagcaaggtattcaaaggagattccagatgcatatgagaggcttttgttagatgcgatcgaaggtgaacgcagattgttcataagaagcgatgaacttgacgctgcttgggcgcttttcactccattgctcaaagagatagaagaaaagaagacaaccccagaattctatccttacggcagtcgtggtccagtcggtgcccattatctagccgcaaaacacaaggtccaatggggagacctaagtcttgatcagtgaaagagtggaagaacattttttgttcatagattcacgtcttagaattttcattatttgtgtggtttatggaaactttctttcgctttcagagataggagtgagttttgttcgattttgtatctggaataataagtaagaactaccctattcttgccaccctttttgctttcaataaaggaaacacaaatttaagtgta

SEQ ID NO: 9657 - protein, 599 aa, Arabidopsis thaliana (mouse-ear cress)
MSSLSCPTYRSRTSSSSPFLSNHHHSSLINVVDPRRSLSFHYASPQGLNLAELCVVRSQRRSVQSSVVVQDGSVATESSSSEEAKDVGVLTIPSLEADKVVAESDGGEQLSTVSITVVGASGDLAKKKIFPALFALYYEGCLPEHFTIFGYARSKMTDAELRVMVSKTLTCRIDKRANCGEKMEEFLKRCFYHSGQYDSQEHFVALDEKLKEHEGGRLSNRLFYLSIPPNIFVDAVKCASSSASSVNGWTRVIVEKPFGRDSKTSAALTKSLKQYLEEDQIFRIDHYLGKELVENLSVLRFSNLIFEPLWSRQYIRNVQFIFSEDFGTEGRGGYFDNYGIIRDIMQNHLLQILALFAMETPVSLDAEDIRNEKVKVLRSMRPIKLEDVVIGQYKSHSIGGVTYPSYTDDKTVPKGSLTPTFAAAALFIDNARWDGVPFLMKAGKALNTRSAEIRVQFRHVPGNLYNRNSGTDRDQTTNELVIRVQPDEAIYLKINNKVPGLGMRLDQSNLNLLYSARYSKEIPDAYERLLLDAIEGERRLFIRSDELDAAWALFTPLLKEIEEKKTTPEFYPYGSRGPVGAHYLAAKHKVQWGDLSLDQ

SEQ ID NO: 9658 - DNA, 1953 bp, Nicotiana tabacum (common tobacco); identical to SEQ ID NO: 2613
  CDS (43)..(1824)

SEQ ID NO: 9659 - protein, 593 aa, Nicotiana tabacum (common tobacco); identical to SEQ ID NO: 2614

SEQ ID NO: 9660 - DNA, 1869 bp, Nicotiana tabacum (common tobacco); identical to SEQ ID NO: 2615
  CDS (22)..(1788)

SEQ ID NO: 9661 - protein, 588 aa, Nicotiana tabacum (common tobacco); identical to SEQ ID NO: 2616

SEQ ID NO: 9662 - DNA, 2058 bp, Solanum tuberosum (potato); identical to SEQ ID NO: 2617
  CDS (41)..(1774)

SEQ ID NO: 9663 - protein, 577 aa, Solanum tuberosum (potato); identical to SEQ ID NO: 2618

SEQ ID NO: 9664 - DNA, 2049 bp, Spinacia oleracea (spinach); identical to SEQ ID NO: 2619
  CDS (147)..(1871)

SEQ ID NO: 9665 - protein, 574 aa, Spinacia oleracea (spinach); identical to SEQ ID NO: 2620

SEQ ID NO: 9666 - DNA, 2359 bp, Petroselinum crispum (parsley); identical to SEQ ID NO: 2621
  CDS (172)..(1986)

SEQ ID NO: 9667 - protein, 604 aa, Petroselinum crispum (parsley); identical to SEQ ID NO: 2622

SEQ ID NO: 9668 - DNA, 1848 bp, Petroselinum crispum (parsley); identical to SEQ ID NO: 2623
  CDS (41)..(1528)

SEQ ID NO: 9669 - protein, 495 aa, Petroselinum crispum (parsley); identical to SEQ ID NO: 2624

SEQ ID NO: 9670 - DNA, 1957 bp, Petroselinum crispum (parsley); identical to SEQ ID NO: 2625
  CDS (74)..(1678)

SEQ ID NO: 9671 - protein, 534 aa, Petroselinum crispum (parsley); identical to SEQ ID NO: 2626

SEQ ID NO: 9672 - DNA, 1569 bp, Caenorhabditis elegans; identical to SEQ ID NO: 2627
  CDS (1)..(1569)

SEQ ID NO: 9673 - protein, 522 aa, Caenorhabditis elegans; identical to SEQ ID NO: 2628

SEQ ID NO: 9674 - DNA, 1779 bp, Streptomyces coelicolor; identical to SEQ ID NO: 2629
  CDS (1)..(1779)

SEQ ID NO: 9675 - protein, 592 aa, Streptomyces coelicolor; identical to SEQ ID NO: 2630

SEQ ID NO: 9676 - DNA, 1524 bp, Streptomyces coelicolor; identical to SEQ ID NO: 2631
  CDS (1)..(1524)

SEQ ID NO: 9677 - protein, 507 aa, Streptomyces coelicolor; identical to SEQ ID NO: 2632

SEQ ID NO: 9678 - DNA, 1422 bp, Schizosaccharomyces pombe; identical to SEQ ID NO: 2633
  CDS (1)..(1422)

SEQ ID NO: 9679 - protein, 473 aa, Schizosaccharomyces pombe; identical to SEQ ID NO: 2634

SEQ ID NO: 9680 - DNA, 1503 bp, Schizosaccharomyces pombe; identical to SEQ ID NO: 2635
  CDS (1)..(1503)

SEQ ID NO: 9681 - protein, 500 aa, Schizosaccharomyces pombe; identical to SEQ ID NO: 2636

SEQ ID NO: 9682 - DNA, 1428 bp, Schizosaccharomyces pombe; identical to SEQ ID NO: 2637
  CDS (1)..(1428)

SEQ ID NO: 9683 - protein, 475 aa, Schizosaccharomyces pombe; identical to SEQ ID NO: 2638

SEQ ID NO: 9684 - DNA, 1862 bp, Arabidopsis thaliana (mouse-ear cress)
  CDS (43)..(1593)
ctacgtcagggtttggttagagtgttaaaaaactattggaagatgggttctggtcaatggcatatggagaagaggtctactttaaagaatgattcgtttgtaaaagaatacaatccaatcacggaaactgggagtctctctatcattgttcttggtgcttctggtgatcttgctaagaagaagacttttcctgcacttttcaatctatttcatcagggatttcttaatccagatgaagttcatatatttggatatgcaaggagtaagattactgatgaggagcttagagataaaatccgcggatatcttgttgatgagaagaatgcatctaagaaaacagaagctttgtccaagtttctaaagctgattaagtatgtgagtggaccttatgattctgaggaagggtttaagagattagacaaggcgattttggagcacgagatatctaaaaagactgctgaaggatcttcgaggagattgttttatcttgcacttcctccgtctgtataccctcctgtaagcaagatgatcaaggcatggtgcactaacaaatctgatcttggtggatggactaggattgttgttgagaaaccatttggaaaggatttggaatctgcagagcagctgagttctcagattggagccttgtttgaagaaccacagatttatcgtattgatcactatctgggaaaagagttagttcaaaacatgttggttcttcggtttgccaatcgcttgtttttgccactatggaaccgcgacaatattgcaaacgtacagatcgttttcagagaagattttggaactgaaggtcgcggtggatattttgatgaatacggaatcattcgtgatattattcaaaaccacttgctccaggttctttgccttgtcgccatggagaaaccaatctctcttaaacccgagcacatccgggatgagaaagtgaaggttcttcaatctgtgattcccataaaagatgaagaggtggttcttggacaatatgaaggatatagagatgatccaactgttccaaatgactcaaacactccaacgtttgccacaacaattcttcgcattaacaatgaaagatgggaaggtgttccttttatactgaaggccggaaaggcaatgagttcaaagaaggcagatattcgcattcagtttaaagatgttcctggcgacatattcaaatgtcaaaaccaagggaggaacgagtttgttatacgcttgcagccttcagaggccatgtacatgaagctaactgtgaagcaaccgggtctggagatgcaaaccgtgcagagtgaactagacctatcgtacaagcagcgttaccaagatgtctcaattccagaggcttacgaacgccttattcttgacacaatcagaggcgaccaacaacactttgttcgcagagacgaattaaaggcagcttgggaaatcttcactccactgcttcacaggatcgacaagggagaagtgaaatcggtcccatacaaacaaggtagccgtggcccagcggaagcagatcagctacttaagaaagctggttatatgcagactcatggctacatttggatccctcctacattgtaaatggtataatcatagagatgatgatgatgagtacacacaaaataagagggttttttttcttttttttccttgcttgctgaataaaaactcttcaccagtttggagtttgtttaagtgaatcttatgtatactagtgatcttcactaggacattgtttgtttatgccttgtagtttttgttgtactagtcccttgttttctttttttacataatgcaaaacagctttgtggaaaagctaattaaattaagaaaaaaaaaccctgacgtag

SEQ ID NO: 9685 - protein, 516 aa, Arabidopsis thaliana (mouse-ear cress)
MGSGQWHMEKRSTLKNDSFVKEYNPITETGSLSIIVLGASGDLAKKKTFPALFNLFHQGFLNPDEVHIFGYARSKITDEELRDKIRGYLVDEKNASKKTEALSKFLKLIKYVSGPYDSEEGFKRLDKAILEHEISKKTAEGSSRRLFYLALPPSVYPPVSKMIKAWCTNKSDLGGWTRIVVEKPFGKDLESAEQLSSQIGALFEEPQIYRIDHYLGKELVQNMLVLRFANRLFLPLWNRDNIANVQIVFREDFGTEGRGGYFDEYGIIRDIIQNHLLQVLCLVAMEKPISLKPEHIRDEKVKVLQSVIPIKDEEVVLGQYEGYRDDPTVPNDSNTPTFATTILRINNERWEGVPFILKAGKAMSSKKADIRIQFKDVPGDIFKCQNQGRNEFVIRLQPSEAMYMKLTVKQPGLEMQTVQSELDLSYKQRYQDVSIPEAYERLILDTIRGDQQHFVRRDELKAAWEIFTPLLHRIDKGEVKSVPYKQGSRGPAEADQLLKKAGYMQTHGYIWIPPTL

SEQ ID NO: 9686 - DNA, 1696 bp, Leuconostoc mesenteroides
  CDS (123)..(1583)
tctagtcatttaatcaatttttgacttgttcaacgcttaatatgtttgtgaatcccgtacttttccagacctttttgcgttataatggagagtgaatttaattataatataaggggaacatcatggtttcagaaatcaaaacgttggtaactttctttggcggaactggtgatttagcaaagcgtaagctttacccatcagttttcaacctctacaaaaaaggatacttacaagaacactttgccattgttgggacagcacgtcaacaattaagtgatgacgagtttaagcaattggttcgtgattcaattaaagactttactgaagatcaagcacaagccgaagcgtttattgcgcatttttcttaccgtgcgcacgatgtcacagatgccgcttcttatggtatcttgaagtcagcgatcgaagaagcagcaaccaaatttgacattgatggcaatcgtattttctatatgtcagttgcccctcgtttcttcggtacaatcgctaaatatttgaaatcagaaggtttgctagctgagactggctacaatcgtttgatgattgaaaagccttttggtacatcatacgccaccgcagaagaattgcaaagtgatttggaaaatgcatttgatgatgaccaactgttccgtattgaccactatcttggaaaagaaatggtacaaaatattgcagcattacgttttggtaacccaatctttgatgccgcttggaataaggactatatcaaaaacgtacaagtaactttggctgaagttctaggtgttgaagagcgtgctggttactacgataccactggcgcccttttggatatgattcaaaaccacacaatgcaaattgttggttggttagcaatggaaaaacctgaatcattcaatgataaggatatccgtgcagctaaaaacgccgccttcaatgcattaaagatttataacgaagaagaagtgaataagtacttcgttcgtgcacaatatggtgctggtgatacagctgattacaagccatatttggaagaagcagatgtccctgctgactcaaagaacaacacattcattgctggtgaattgcagttcgatttgccacgttgggaaggtgttcctttctatgttcgttcaggtaagcgtttggctgccaagcaaacacgtgttgatattgtatttaaggctggcacattcaactttggttcagaacaagaagcacaagaatcagtactctcaatcatcattgatccaaagggtgctattgaattgaagcttaacgctaagtcagttgaagatgccttcaacacccgcacaatcaacttggattgggcagtatctgatgaagacaagaagaacacaccagaaccatacgaacgtatgattcacgatacaatgaatggtgacggatcaaactttgctgattggaacggtgtatcaattgcttggaagtttgttgacgcaattactgccgtttacgatgcagataaagcaccattggagacatataagtcaggttcaatgggtcctgaagcatcagacaagctattagctgaaaatggcgatgcttgggtatttaaaggataagcacatttaaaaagaccatcaaacaaatctttgtttgacggtctttttatattgtctgatttaagatgcgtttggtttcacggaaaacggctgacaaattggtgtattgatcc

SEQ ID NO: 9687 - protein, 486 aa, Leuconostoc mesenteroides; identical to SEQ ID NO: 2640

SEQ ID NO: 9688 - DNA, 1545 bp, Corynebacterium glutamicum
  CDS (1)..(1545)
atgagcacaaacacgaccccctccagctggacaaacccactgcgcgacccgcaggataaacgactcccccgcatcgctggcccttccggcatggtgatcttcggtgtcactggcgacttggctcgaaagaagctgctccccgccatttatgatctagcaaaccgcggattgctgcccccaggattctcgttggtaggttacggccgccgcgaatggtccaaagaagactttgaaaaatacgtacgcgatgccgcaagtgctggtgctcgtacggaattccgtgaaaatgtttgggagcgcctcgccgagggtatggaatttgttcgcggcaactttgatgatgatgcagctttcgacaacctcgctgcaacactcaagcgcatcgacaaaacccgcggcaccgccggcaactgggcttactacctgtccattccaccagattccttcacagcggtctgccaccagctggagcgttccggcatggctgaatccaccgaagaagcatggcgccgcgtgatcatcgagaagcctttcggccacaacctcgaatccgcacacgagctcaaccagctggtcaacgcagtcttcccagaatcttctgtgttccgcatcgaccactatttgggcaaggaaacagttcaaaacatcctggctctgcgttttgctaaccagctgtttgagccactgtggaactccaactacgttgaccacgtccagatcaccatggctgaagatattggcttgggtggacgtgctggttactacgacggcatcggcgcagcccgcgacgtcatccagaaccacctgatccagctcttggctctggttgccatggaagaaccaatttctttcgtgccagcgcagctgcaggcagaaaagatcaaggtgctctctgcgacaaagccgtgctacccattggataaaacctccgctcgtggtcagtacgctgccggttggcagggctctgagttagtcaagggacttcgcgaagaagatggcttcaaccctgagtccaccactgagacttttgcggcttgtaccttagagatcacgtctcgtcgctgggctggtgtgccgttctacctgcgcaccggtaagcgtcttggtcgccgtgttactgagattgccgtggtgtttaaagacgcaccacaccagcctttcgacggcgacatgactgtatcccttggccaaaacgccatcgtgattcgcgtgcagcctgatgaaggtgtgctcatccgcttcggttccaaggttccaggttctgccatggaagtccgtgacgtcaacatggacttctcctactcagaatccttcactgaagaatcacctgaagcatacgagcgcctcattttggatgcgctgttagatgaatccagcctcttccctaccaacgaggaagtggaactgagctggaagattctggatccaattcttgaagcatgggatgccgatggagaaccagaggattacccagcgggtacgtggggtccaaagagcgctgatgaaatgctttcccgcaacggtcacacctggcgcaggccataa

SEQ ID NO: 9689 - protein, 514 aa, Corynebacterium glutamicum
MSTNTTPSSWTNPLRDPQDKRLPRIAGPSGMVIFGVTGDLARKKLLPAIYDLANRGLLPPGFSLVGYGRREWSKEDFEKYVRDAASAGARTEFRENVWERLAEGMEFVRGNFDDDAAFDNLAATLKRIDKTRGTAGNWAYYLSIPPDSFTAVCHQLERSGMAESTEEAWRRVIIEKPFGHNLESAHELNQLVNAVFPESSVFRIDHYLGKETVQNILALRFANQLFEPLWNSNYVDHVQITMAEDIGLGGRAGYYDGIGAARDVIQNHLIQLLALVAMEEPISFVPAQLQAEKIKVLSATKPCYPLDKTSARGQYAAGWQGSELVKGLREEDGFNPESTTETFAACTLEITSRRWAGVPFYLRTGKRLGRRVTEIAVVFKDAPHQPFDGDMTVSLGQNAIVIRVQPDEGVLIRFGSKVPGSAMEVRDVNMDFSYSESFTEESPEAYERLILDALLDESSLFPTNEEVELSWKILDPILEAWDADGEPEDYPAGTWGPKSADEMLSRNGHTWRRP

SEQ ID NO: 9690 - DNA, 2491 bp, Cricetulus griseus
  CDS (136)..(1683)
tgaggcgggtcagctcagtcaaagcacccgccctcctgcgttaaacgagccagctaagcgcacgccccggaaacgagctgtgcactccagaactgtaaacctgtttggcagcagcaactaaacacagaaaacaccatggcagagcaggtggccctgagccggacccaggtgtgtggcatcctgagggaagagttgtaccagggtgatgccttccaccaagctgatacacatatatttatcatcatgggtgcatcgggtgacctggccaagaagaagatctatcccactatctggtggctgttccgggatggccttctacccgaagacaccttcattgtgggctatgcccgctcccgactcacagtggatgacatccgcaagcagagtgagcccttctttaaagccaccccagaggaaagacccaagctggaggagttctttgcccgtaactcctatgtggctggccagtatgatgatccagcctcctacaagcacctcaacagccacatgaatgccctgcatcaggggatgcaggccaaccgcctattctacctggccttgccccccacagtctatgaagctgtcaccaagaacattcaagagacctgcatgagtcagacaggctggaaccgcatcatagtggagaagcccttcgggagagacctgcagagctccaaccagctgtcgaaccacatctcctctctgttccgtgaggaccagatctaccgcattgaccactacctgggcaaggagatggtccagaacctcatggtgctgagatttgccaacaggatctttggccccatctggaaccgagacaacattgcctgtgtgatcctcacatttaaagagccctttggtactgagggtcgtgggggctactttgatgaatttgggatcatcagggatgttatgcagaaccacctcctgcagatgttgtgtctggtggccatggaaaaacctgcctccacagattcagatgatgtccgtgatgagaaggtcaaagtgttgaaatgtatctcagaggtggaaaccagcaatgtggtccttggccagtatgtggggaaccccaatggagaaggagaagctaccaatgggtacttggatgaccccacagtgccccgtgggtccaccactgccacctttgcagcagctgtcctctatgtggagaatgagcggtgggatggggtacccttcatcctgcgctgtggcaaagccctgaatgaacgcaaggctgaggtgagactacagttccgagatgtggcaggcgacatcttccaccagcagtgcaagcgtaatgagctggtgattcgtgtgcagcccaatgaggctgtatacaccaagatgatgaccaagaagcctggcatgttcttcaaccctgaggagtcagagctggacttgacctatggcaacagatacaagaatgtgaagctccctgatgcctatgaacgcctcatcctggatgtcttctgtgggagccagatgcactttgtccgcagtgatgaactcagggaagcctggcgtatcttcacaccactgctgcacaagattgatcaagagaagccccagcctatcccctatgtttatggcagccgcggccccacagaggcagatgagctgatgaagagagtgggcttccagtatgagggcacctacaaatgggtgaaccctcacaagctctgagccttgggaacttataccatctgcactctgccccttttggacaccctttctgtgtctatccttcttaccacctaacctcatatttggactattagccccacattggaacgactttgggaccataggctttagccacacattccagtccctgggctcgtgccaccactctataccctatgctgctgctgctgctgctaccactgccaccaccaccatcactgctgctgctgctgttaccaccaccactgaccccagctacattcctcaactatcaaattctccaagttctcaaaactcactgtaatgctttcagggccaccattgaccctatctgagccacccatctctccacaagaagcaaatcacctcctcccctcactccagcccctgcaaagggaagaagaacagcctatcagtctgtccctagactcctcaagacaggagttaggaacaatggggaggaaccttgagcctcagagggataaagaccaaaccacactccctagtgtctatgggcaagctcctcaaaattcaaatgaaatggtcaaggacacccatgtgagaagacctgcccatggccacaccagcttcagtgccacttgacattcctcctcaccagctggaagagaccacatactgcctaacaatattgtggcactagagatgtcccctaaccaactccatactccatggtcatcatcccacccacaggcagccttctcaccaaaggaaggcagaagtagcagctatgatttccctaccccaaccttgcaattaaatcctccaacagttaaaaaaaaaaaaaaaa

SEQ ID NO: 9691 - protein, 515 aa, Cricetulus griseus
MAEQVALSRTQVCGILREELYQGDAFHQADTHIFIIMGASGDLAKKKIYPTIWWLFRDGLLPEDTFIVGYARSRLTVDDIRKQSEPFFKATPEERPKLEEFFARNSYVAGQYDDPASYKHLNSHMNALHQGMQANRLFYLALPPTVYEAVTKNIQETCMSQTGWNRIIVEKPFGRDLQSSNQLSNHISSLFREDQIYRIDHYLGKEMVQNLMVLRFANRIFGPIWNRDNIACVILTFKEPFGTEGRGGYFDEFGIIRDVMQNHLLQMLCLVAMEKPASTDSDDVRDEKVKVLKCISEVETSNVVLGQYVGNPNGEGEATNGYLDDPTVPRGSTTATFAAAVLYVENERWDGVPFILRCGKALNERKAEVRLQFRDVAGDIFHQQCKRNELVIRVQPNEAVYTKMMTKKPGMFFNPEESELDLTYGNRYKNVKLPDAYERLILDVFCGSQMHFVRSDELREAWRIFTPLLHKIDQEKPQPIPYVYGSRGPTEADELMKRVGFQYEGTYKWVNPHKL

SEQ ID NO: 9692 - DNA, 1852 bp, Nicotiana tabacum; identical to SEQ ID NO: 2643
  CDS (102)..(1634)

SEQ ID NO: 9693 - protein, 510 aa, Nicotiana tabacum; identical to SEQ ID NO: 2644

SEQ ID NO: 9694 - DNA, 1821 bp, Nicotiana tabacum; identical to SEQ ID NO: 2645
  CDS (88)..(1623)

SEQ ID NO: 9695 - protein, 511 aa, Nicotiana tabacum; identical to SEQ ID NO: 2646

SEQ ID NO: 9696 - DNA, 1539 bp, Chlamydia trachomatis
  CDS (1)..(1539)
atgctaggttgtaccttggaagaaattaaagactttggccccacattaccagcctgccctccctgtatcgtggttatttttggtgctacaggagacttgacctctaggaagctctttcctgctttatacaatttaacaaaggaaggacgtctatccgaaaactttgtttgtgttgggtttgctaggcgacctaagtctcatgagcaatttctcgaagaaatgaagcttgccgttcagcatttctctcactcatcggaaatagatattcgagtttgggaaagtctggaaaatagaatcttttaccaccaagctaatttttctgatgccgaaggctactctgctctgaaagcttatttggagcaactagatcaacaatatggaacacaagggaatcgtcttttttatttatcaacaccaccagattatttccaggaaatcatccgcaatttaaatcggcatcagctattctatcatgaacaaggagcacaacagccttggtctcggctaattatagaaaagccttttggagttaatttagaaacagctcgagagcttcaacaatgcattgatgccaatattgatgaagagtcggtttatcgaatagaccattatttaggaaaagaaacggttcaaaacattctgactattcgttttgctaatactctctttgagtcttgctggaattctcagtacatagatcatgtgcaaatcagcgttagcgaatcaattggtataggatctcgagggaatttcttcgaaaagtcgggcatgctacgagacatggtacagaatcatttgacgcagctgctatgtctactgactatggaacctccttctgaattttcttcagaagaaataaaaaaagaaaaaattaaaattctaaagaaaattcttcctatccgcgaagaagatgctgttcgtggccaatatggtgaagggattgtgcaagatgtttcagttctgggctatcgggaggaagaaaatgtcgatccgaattcttcagtagaaacctacgttgcattaaaattatttatcgacaatcctcgctggaaaggggttcccttttacttacaagcagggaaacgtcttactaaaagaacaacagatatcgctgtgatctttaaaaaatccagctacaatttattcaatgcagagaattgtcctttgtgtccgttagaaaatgatttacttattattcgtattcaaccggatgaaggtgttgcgctacaatttaactgcaaggttccaggaacaaataagctcgtacgtcctgtaaaaatggacttccgttacgacagctattttaatactgttactcccgaagcttatgaacggttactgtgcgactgtatccttggggacagaacgctattcactagcaatgaagaagtcttagcatcttgggaactattttctcctctattagaaaaatggtctcaagtacaccctatattccctaactatatggccggatctttacgtcctcaagaagctgatgaactattatctagagatggaaaagcttggcggccctattaa

SEQ ID NO: 9697 - protein, 512 aa, Chlamydia trachomatis; identical to SEQ ID NO: 2648

SEQ ID NO: 9698 - DNA, 1581 bp, Vibrio vulnificus; identical to SEQ ID NO: 2689
  CDS (1)..(1581)

SEQ ID NO: 9699 - protein, 526 aa, Vibrio vulnificus; identical to SEQ ID NO: 2690

SEQ ID NO: 9700 - DNA, 1476 bp, Photorhabdus luminescens; identical to SEQ ID NO: 2691
  CDS (1)..(1476)

SEQ ID NO: 9701 - protein, 491 aa, Photorhabdus luminescens; identical to SEQ ID NO: 2692

SEQ ID NO: 9702 - DNA, 1539 bp, Gloeobacter violaceus; identical to SEQ ID NO: 2693
  CDS (1)..(1539)

SEQ ID NO: 9703 - protein, 512 aa, Gloeobacter violaceus; identical to SEQ ID NO: 2694

SEQ ID NO: 9704 - DNA, 1539 bp, Gloeobacter violaceus; identical to SEQ ID NO: 2695
  CDS (1)..(1539)

SEQ ID NO: 9705 - protein, 512 aa, Gloeobacter violaceus; identical to SEQ ID NO: 2696

SEQ ID NO: 9706 - DNA, 1479 bp, Chromobacterium violaceum; identical to SEQ ID NO: 2697
  CDS (1)..(1479)

SEQ ID NO: 9707 - protein, 492 aa, Chromobacterium violaceum; identical to SEQ ID NO: 2698

SEQ ID NO: 9708 - DNA, 1476 bp, Neurospora crassa; identical to SEQ ID NO: 2703
  CDS (1)..(1476)

SEQ ID NO: 9709 - protein, 491 aa, Neurospora crassa; identical to SEQ ID NO: 2704

SEQ ID NO: 9710 - DNA, 1524 bp, Synechococcus sp; identical to SEQ ID NO: 2705
  CDS (1)..(1524)

SEQ ID NO: 9711 - protein, 507 aa, Synechococcus sp; identical to SEQ ID NO: 2706

SEQ ID NO: 9712 - DNA, 1455 bp, Rhodopirellula baltica; identical to SEQ ID NO: 2707
  CDS (1)..(1455)

SEQ ID NO: 9713 - protein, 484 aa, Rhodopirellula baltica; identical to SEQ ID NO: 2708

SEQ ID NO: 9714 - DNA, 1524 bp, Prochlorococcus marinus subsp; identical to SEQ ID NO: 2709
  CDS (1)..(1524)

SEQ ID NO: 9715 - protein, 507 aa, Prochlorococcus marinus subsp; identical to SEQ ID NO: 2710

SEQ ID NO: 9716 - DNA, 1524 bp, Prochlorococcus marinus; identical to SEQ ID NO: 2711
  CDS (1)..(1524)

SEQ ID NO: 9717 - protein, 507 aa, Prochlorococcus marinus; identical to SEQ ID NO: 2712

SEQ ID NO: 9718 - DNA, 1521 bp, Prochlorococcus marinus; identical to SEQ ID NO: 2713
  CDS (1)..(1521)

SEQ ID NO: 9719 - protein, 506 aa, Prochlorococcus marinus; identical to SEQ ID NO: 2714

SEQ ID NO: 9720 - DNA, 1488 bp, Haemophilus ducreyi; identical to SEQ ID NO: 2715
  CDS (1)..(1488)

SEQ ID NO: 9721 - protein, 495 aa, Haemophilus ducreyi; identical to SEQ ID NO: 2716

SEQ ID NO: 9722 - DNA, 1497 bp, Candidatus Blochmannia floridanus; identical to SEQ ID NO: 2717
  CDS (1)..(1497)

SEQ ID NO: 9723 - protein, 498 aa, Candidatus Blochmannia floridanus; identical to SEQ ID NO: 2718

SEQ ID NO: 9724 - DNA, 1548 bp, Bos indicus; identical to SEQ ID NO: 2721
  CDS (1)..(1548)

SEQ ID NO: 9725 - protein, 515 aa, Bos indicus; identical to SEQ ID NO: 2722

SEQ ID NO: 9726 - DNA, 1485 bp, Bacillus anthracis
  CDS (10)..(1485)
ttggaatcaatgacctttgttttatttggagcgacaggggacttagcgaaacgcaaaatttaccccgcactatataacttatatagagatcaaaagcttccaaagcaaatatccgttatcgggcttgggagacgtgaagtatctcatgtagattttcaaaaaagaataaaagaatcaatagagacgttttctcgtcatagagaagaaggtactccagaactcgaaggttttttagataattttcgctattgtccattagatgtgagtaagccggaagactatgagagattattacaagtcgttcgtgaaagggaagaagagctacatataaaagggaatagaatgttctatctttccggtgctcctgaattttttgagacaatcgctttaaatattaaggaaagcggacttgataaaacggatggatggaaacgcctaatgattgagaaaccgttcgggcacgaccttacatctgctcgtgagctgaatgataagcttagtcgcacgtttgaagaagacgagatataccgtattgatcattatttaggtaagccgatgattcaaaaccttgaagcactagagtttgcaaatcctgttttacaatcgatttggaataaagaacatatagcgaatgtacaaatcacagcgagtgaaacagttggtgttgaagaaagggcaggatattatgatcaggcaggagccattcgagatatggttcaaaatcatatgttacaaatattaatgatgactgctatgaatttgccggaaaaggttaatgcatgtgaaattcgagaggaaaagcgaaaggtaatggaggcgcttcgtaaagtgaaaaaagaagacgttcaaaaccatatcattcgcggacaatatggtgcaggtgagataaatggcgggcaagttgtagcatataaagaggagccaggagtaaatccctcttctaatatagacacatttattgctgctcgcttgtggatcgataatccattttggactggcgttcccttttatatacgaacaggcaaacgaatgaaagaaaagtctactcgtattgtaatcgaatttaaaaatacgttaaaacagcaatatcaagatagtaatccaaatgcagcacctaacttgttaataattgaaattagcccaggtgagaacgtttcattacagttaaatagtaaaaatccattgaaaaatggagaaattgaaccgatccgtattaactttacttgtgagcaagcggatgtgggagtacctgaagcgtatgaaagactcattcatgatgctgtgagtggagacgctacattctttgcacattggagagaagttgaattgtcatgggaatgggtacaaccaattcttgaagcattcgaggaaaacttattaccacttcatgaatatgagtctggttcatatggtccagaggcatctaatgaattattgcaagaaagtggatttaaatggtggttagatcaagaaacgaaaaaatga

SEQ ID NO: 9727 - protein, 491 aa, Bacillus anthracis
MTFVLFGATGDLAKRKIYPALYNLYRDQKLPKQISVIGLGRREVSHVDFQKRIKESIETFSRHREEGTPELEGFLDNFRYCPLDVSKPEDYERLLQVVREREEELHIKGNRMFYLSGAPEFFETIALNIKESGLDKTDGWKRLMIEKPFGHDLTSARELNDKLSRTFEEDEIYRIDHYLGKPMIQNLEALEFANPVLQSIWNKEHIANVQITASETVGVEERAGYYDQAGAIRDMVQNHMLQILMMTAMNLPEKVNACEIREEKRKVMEALRKVKKEDVQNHIIRGQYGAGEINGGQVVAYKEEPGVNPSSNIDTFIAARLWIDNPFWTGVPFYIRTGKRMKEKSTRIVIEFKNTLKQQYQDSNPNAAPNLLIIEISPGENVSLQLNSKNPLKNGEIEPIRINFTCEQADVGVPEAYERLIHDAVSGDATFFAHWREVELSWEWVQPILEAFEENLLPLHEYESGSYGPEASNELLQESGFKWWLDQETKK

SEQ ID NO: 9728 - DNA, 1536 bp, Chlamydophila caviae; identical to SEQ ID NO: 2723
  CDS (1)..(1536)

SEQ ID NO: 9729 - protein, 511 aa, Chlamydophila caviae; identical to SEQ ID NO: 2724

SEQ ID NO: 9730 - DNA, 1524 bp, Streptomyces avermitilis; identical to SEQ ID NO: 2725
  CDS (1)..(1524)

SEQ ID NO: 9731 - protein, 507 aa, Streptomyces avermitilis; identical to SEQ ID NO: 2726

SEQ ID NO: 9732 - DNA, 1647 bp, Streptomyces avermitilis; identical to SEQ ID NO: 2727
  CDS (1)..(1647)

SEQ ID NO: 9733 - protein, 548 aa, Streptomyces avermitilis; identical to SEQ ID NO: 2728

SEQ ID NO: 9734 - DNA, 1491 bp, Nitrosomonas europaea; identical to SEQ ID NO: 2729
  CDS (1)..(1491)

SEQ ID NO: 9735 - protein, 496 aa, Nitrosomonas europaea; identical to SEQ ID NO: 2730

SEQ ID NO: 9736 - DNA, 1524 bp, Enterococcus faecalis
  CDS (1)..(1524)
atgaatgaaaaagtagcattatttactattttcggggggacaggtgatcttgccaaacgtaaattgtatccttccctgttccgcttatataaaaaaggattattagctgagcgttttgcggtgattggtaccgcacgtcgggaatggacagacgaatactatcgtgaaatcgtccgtgaaaccattcaagacttaaatcccacggccgaagaggcaactgaattttctagtcatttctattaccaatcacataatgtgaatgatacggaacattataataccttaaaagaattatctgatcgcctaaatgaacaataccacttagaaggcaatcatgtttactatttagctatggcccctcaattctttggaaccattgttaatcacttgaaatcacaacatattatttcggaagaaggctttgatcgtctaattatcgaaaagccatttggttctgattatgaatctgcctacgaattaaatgaagaaattcgtgctgcatttcctgaacaagatattttccgaattgaccattacttaggcaaagaaatgatccaaaatatttcagccattcgttttgccaataatatttttgaatcacaatggaacaatcgttacattgataatgtccaaatcaccttcgctgaaagcttaggtgtcgaggatcgtggcggctattatgaccacagtggcgcactaaaagatatggttcaaaatcatattttacaagtcgttgcattgctttctatggagcctcctgttgccttttctgaaaaagaaattcggactgaaaaagtaaaagctttacgtgccatccgcctttattctgaagaagaagcccttcaaaatttcgtgcgtggacaatacggcgaaggtcagctagctgatcaaacatttgcagcctatcgtgatgaaccaaatgtggcagaaacttcatccactgaaacttttgttgctggtaaatttttaattgataatttccgttggtctggcgtccctttctatgttcgcacaggtaaacgattaactgaaaaaggcacacgcattaacatcgtctttaaacaagtacctattaatgtcttcaaagatgatacgtgtgaagaatgcgataaaaccgatttaccaccgaatgttttaactatctatatccaaccaactgaaggattttcattaaccttaaatggaaaagaaatcggtcaagggttcaatacaactccagtgaaacttgatttccgtcaaagtgctgaaatgactgaaaatagtccagaagcatacgaaaaacttctattagactgcctaaatggcgatagtacaaacttctctcattgggacgaagttgcccaatcttggcgcattgttgacattattcgacatgcttgggataaaacagacgtttctttccctaattatgccgctggcacaatgggcccgcaagctgccttcgacttattagaaaaagatggctttacttgggaatggcaaccagataactggtaccgtgaccgcggtcaacttgatcaatga

SEQ ID NO: 9737 - protein, 507 aa, Enterococcus faecalis; identical to SEQ ID NO: 2732

SEQ ID NO: 9738 - DNA, 1464 bp, Tropheryma whipplei; identical to SEQ ID NO: 2733
  CDS (1)..(1464)

SEQ ID NO: 9739 - protein, 487 aa, Tropheryma whipplei; identical to SEQ ID NO: 2734

SEQ ID NO: 9740 - DNA, 2145 bp, Leishmania mexicana; identical to SEQ ID NO: 2735
  CDS (298)..(1986)

SEQ ID NO: 9741 - protein, 562 aa, Leishmania mexicana; identical to SEQ ID NO: 2736

SEQ ID NO: 9742 - DNA, 1494 bp, Dictyostelium discoideum; identical to SEQ ID NO: 2737
  CDS (1)..(1494)

SEQ ID NO: 9743 - protein, 497 aa, Dictyostelium discoideum; identical to SEQ ID NO: 2738

SEQ ID NO: 9744 - DNA, 1503 bp, Xylella fastidiosa; identical to SEQ ID NO: 2739
  CDS (1)..(1503)

SEQ ID NO: 9745 - protein, 500 aa, Xylella fastidiosa; identical to SEQ ID NO: 2740

SEQ ID NO: 9746 - DNA, 1506 bp, Vibrio parahaemolyticus; identical to SEQ ID NO: 2741
  CDS (1)..(1506)

SEQ ID NO: 9747 - protein, 501 aa, Vibrio parahaemolyticus; identical to SEQ ID NO: 2742

SEQ ID NO: 9748 - DNA, 1533 bp, Pseudomonas syringae; identical to SEQ ID NO: 2743
  CDS (1)..(1533)

SEQ ID NO: 9749 - protein, 510 aa, Pseudomonas syringae; identical to SEQ ID NO: 2744

SEQ ID NO: 9750 - DNA, 1470 bp, Pseudomonas syringae; identical to SEQ ID NO: 2745
  CDS (1)..(1470)

SEQ ID NO: 9751 - protein, 489 aa, Pseudomonas syringae; identical to SEQ ID NO: 2746

SEQ ID NO: 9752 - DNA, 1458 bp, Pseudomonas putida; identical to SEQ ID NO: 2747
  CDS (1)..(1458)

SEQ ID NO: 9753 - protein, 485 aa, Pseudomonas putida; identical to SEQ ID NO: 2748

SEQ ID NO: 9754 - DNA, 1506 bp, Pseudomonas putida; identical to SEQ ID NO: 2749
  CDS (1)..(1506)

SEQ ID NO: 9755 - protein, 501 aa, Pseudomonas putida; identical to SEQ ID NO: 2750

SEQ ID NO: 9756 - DNA, 1470 bp, Pseudomonas putida; identical to SEQ ID NO: 2751
  CDS (1)..(1470)

SEQ ID NO: 9757 - protein, 489 aa, Pseudomonas putida; identical to SEQ ID NO: 2752

SEQ ID NO: 9758 - DNA, 1485 bp, Lactobacillus plantarum; identical to SEQ ID NO: 2753
  CDS (1)..(1485)

SEQ ID NO: 9759 - protein, 494 aa, Lactobacillus plantarum; identical to SEQ ID NO: 2754

SEQ ID NO: 9760 - DNA, 1440 bp, Clostridium tetani; identical to SEQ ID NO: 2755
  CDS (1)..(1440)

SEQ ID NO: 9761 - protein, 479 aa, Clostridium tetani; identical to SEQ ID NO: 2756

SEQ ID NO: 9762 - DNA, 1512 bp, Bradyrhizobium japonicum; identical to SEQ ID NO: 2757
  CDS (1)..(1512)

SEQ ID NO: 9763 - protein, 503 aa, Bradyrhizobium japonicum; identical to SEQ ID NO: 2758

SEQ ID NO: 9764 - DNA, 1497 bp, Bacteroides thetaiotaomicron; identical to SEQ ID NO: 2759
  CDS (1)..(1497)

SEQ ID NO: 9765 - protein, 498 aa, Bacteroides thetaiotaomicron; identical to SEQ ID NO: 2760

SEQ ID NO: 9766 - DNA, 1485 bp, Staphylococcus epidermidis; identical to SEQ ID NO: 2763
  CDS (1)..(1485)

SEQ ID NO: 9767 - protein, 494 aa, Staphylococcus epidermidis; identical to SEQ ID NO: 2764

SEQ ID NO: 9768 - DNA, 1590 bp, Yersinia pestis; identical to SEQ ID NO: 2765
  CDS (1)..(1590)

SEQ ID NO: 9769 - protein, 529 aa, Yersinia pestis; identical to SEQ ID NO: 2766

SEQ ID NO: 9770 - DNA, 1506 bp, Vibrio vulnificus
  CDS (1)..(1506)
atgatggtaataccagaaaacagcagcatcgtaatttttggtgcttcaggtgatttaacatatcgcaagttgatccctgctttataccacctctacgcaagtaagcagctaccagaaaactttgctattttaggtgtcagccgcactgaatacagcgatgaatcttatcgcgaaaagttaaagcgctctcttcaggaaatggagaaaacggaaccagctattctggattcatttatcgaccatcttcactatcaagccatcaacacgtcagacacaaaagactacgcgaagttggttgtacgtttagatgaattggccgctcaataccagttcgaacaacgtaatacactgttttatctggccacaccgccaagcctttacagtgttattcctgcaagccttgctcatcacggtctcaatagtgaagaggatggttggaagcgcctgatcattgaaaaaccgtttggttatgatttggcttcggcacgtcagctcgacaaagaaatacacgattgcttccaagagcatcagatctatcgcatcgaccactaccttggaaaagagaccgtacaaaacttacttgttttccgtttctctaacgccatgtttgaacctctgtggaaccgcaacttcattgattatgtggaaatcacaggtgccgaattccttggtgtggaagagcgcggtggttattacgacggctccggcgctgtgcgcgatatgttccaaaaccacctactgcaagtgttggcgatggtgggcatggagccgccagcacaaattaacgccgattccatgcgtgatgaagtagtgaaagttctgcagtgtttaaaaccgcttgaggaagatgatctgcgtaacaacctagttttgggtcaatacaccgcatcagacgtgcgcggacaacatctgcttggctaccgtgaagaaaacggcgtagcggacgattctcgtaccgagacttacattggtcttaaagcgtacatcaataactggcgttggaatggcgtaccattctacgtgcgcacgggtaagcgtcttccaactcgcgtgacagaagtggttatccacttcaaacaaacaccgcatccggtatttggccaaaacgctccagaaaacaaactgatcattcgtattcagcctgatgaaggcattcaaatgagcttcggtttgaaagaacccggtgcaggctttaaagccaaagaagtgaagatgaacttccattatgcttcgttgcaagagacgcaaatgctgaccgcctatgagcgtctgcttcttgatgcgttaaacggcgacgcaacgctgtttgctcgcagcgatgcggtcgaagcgtgttggaaatacgttcaacctatcctcgatttcaaacaagatccacaagcactctttggttatgcttgcggtacttgggggccaaaagagtcggacgatttgctgcagcgtgatgatcgcgcgtggcgtttcccatgcaaaaacctaacagatacggactactgcgaactatga

SEQ ID NO: 9771 - protein, 501 aa, Vibrio vulnificus
MMVIPENSSIVIFGASGDLTYRKLIPALYHLYASKQLPENFAILGVSRTEYSDESYREKLKRSLQEMEKTEPAILDSFIDHLHYQAINTSDTKDYAKLVVRLDELAAQYQFEQRNTLFYLATPPSLYSVIPASLAHHGLNSEEDGWKRLIIEKPFGYDLASARQLDKEIHDCFQEHQIYRIDHYLGKETVQNLLVFRFSNAMFEPLWNRNFIDYVEITGAEFLGVEERGGYYDGSGAVRDMFQNHLLQVLAMVGMEPPAQINADSMRDEVVKVLQCLKPLEEDDLRNNLVLGQYTASDVRGQHLLGYREENGVADDSRTETYIGLKAYINNWRWNGVPFYVRTGKRLPTRVTEVVIHFKQTPHPVFGQNAPENKLIIRIQPDEGIQMSFGLKEPGAGFKAKEVKMNFHYASLQETQMLTAYERLLLDALNGDATLFARSDAVEACWKYVQPILDFKQDPQALFGYACGTWGPKESDDLLQRDDRAWRFPCKNLTDTDYCEL

SEQ ID NO: 9772 - DNA, 1530 bp, Synechococcus elongatus; identical to SEQ ID NO: 2767
  CDS (1)..(1530)

SEQ ID NO: 9773 - protein, 509 aa, Synechococcus elongatus; identical to SEQ ID NO: 2768

SEQ ID NO: 9774 - DNA, 1473 bp, Shewanella oneidensis; identical to SEQ ID NO: 2769
  CDS (1)..(1473)

SEQ ID NO: 9775 - protein, 490 aa, Shewanella oneidensis; identical to SEQ ID NO: 2770

SEQ ID NO: 9776 - DNA, 1476 bp, Oceanobacillus iheyensis; identical to SEQ ID NO: 2771
  CDS (1)..(1476)

SEQ ID NO: 9777 - protein, 491 aa, Oceanobacillus iheyensis; identical to SEQ ID NO: 2772

SEQ ID NO: 9778 - DNA, 1344 bp, Corynebacterium efficiens; identical to SEQ ID NO: 2773
  CDS (1)..(1344)

SEQ ID NO: 9779 - protein, 447 aa, Corynebacterium efficiens; identical to SEQ ID NO: 2774

SEQ ID NO: 9780 - DNA, 1545 bp, Corynebacterium efficiens; identical to SEQ ID NO: 2775
  CDS (1)..(1545)

SEQ ID NO: 9781 - protein, 514 aa, Corynebacterium efficiens; identical to SEQ ID NO: 2776

SEQ ID NO: 9782 - DNA, 1668 bp, Bifidobacterium longum; identical to SEQ ID NO: 2777
  CDS (1)..(1668)

SEQ ID NO: 9783 - protein, 555 aa, Bifidobacterium longum; identical to SEQ ID NO: 2778

SEQ ID NO: 9784 - DNA, 1284 bp, Rhodococcus opacus; identical to SEQ ID NO: 2779
  CDS (1)..(1284)

SEQ ID NO: 9785 - protein, 427 aa, Rhodococcus opacus; identical to SEQ ID NO: 2780

SEQ ID NO: 9786 - DNA, 2358 bp, Solanum tuberosum
  CDS (160)..(1905)
ctccacttggcggaagaaactaatgtttatttagcaaaggcgaaacaccctttcggagatctcaagagactaatcccaactccttttacgccataaccccccattcatatttcattcccctcacttctatcgaacccatcttctctgatttatcaagatatggtaaccctttattcttccccttccactaactgttctggggctttttcatcttactccaattcttctattggcttctacaattatcacaacaacttccctatttcatccagaaagtttggttctcacaagatttctttgcaaattaatgccattcgcatgcaagatggtgctgttgtggctcaacctagcaaaacccaagatgaaactcctttgaagaaattaaaagatggaattttgtcaaaggagcagaaacatacatttgattttgatagcaacaaagataaatcaactgtcagtattactgttgttggtgcttcaggagatcttgccaaaaaaaagatatttcctgcactttttgcactttattatgagggttgcttaccggagcatttcactatttttggttatgcccggagtaagatgactgatgatgaactcaggaacatggtcagcaagacacttacttgcaggattgataagagggaaaattgtggtgaaaagatggaacagtttctagaaaggtgtttctaccatagtggacaatatgattcccaagaaaactttgcagagcttgataaaaaactgaaagaacatgaggctggaaggttttccaatcgtctgttttacttgtccattccaccaaatatttttataaatgctgtacgatgtgcaagccttgcgtcatctgctcatggatggactagagtcattgtagagaaaccctttggtcgggattctgaatcctctgctgcattaacaggagcacttaagcagtacttgaaggaagatcaaattttcaggattgatcactatttagggaaggagcttgtggaaaacctttctgtccttcgtttctccaacttgatatttgaacccttatggtcaaggcagtatataaggaacgtgcaatttattttctctgaagattttggcactgaaggaaggggaggttattttgatcattatgggataattagagacattatgcaaaaccatttgcttcaaattcttgccctctttgccatggaaacacctgtcagtttggatgcagaagatatcaggaatgaaaaggtaaaagttctgcgttctatgagacctttacaactagatgatgttattgtcgggcagtacaaaagtcacacaaaagggggtgttaactatcctggttataccgacgacaagactgtacccaaggacagtctaaccccaacttttgctgcagctgctcttttcatagataatgcaagatgggatggtgtgcctttccttatgaaggctggaaaagctttacataccaggagtgcggaaataagagtacaattcaggcacgtgccaggaaacttatacaataagaactttggctcggatctagatcaggcaacaaacgagcttgttatccgtgttcaacctgacgaagctatatacctaaagatcaataacaaagttcccggtttaggaatgagattggatcgcagtaatcttaatctgctttactcagcaagatactcaaaggagatccctgatgcatatgagcggctacttcttgatgccatagaaggtgaacgtaggctttttatccgtagtgatgaactggatgctgcttggtctcttttcacaccagtgttgaaagaccttgagcataagaaaatagtaccggaaagctacccctatggaagtcgaggacctattggagcacattaccttgcagcacgatataaagtaagatggggtgatcttgcttagacaaagtaatttgctattgctatgagaaaccatatgtagccttacaagttcttctgcttagtatggtgcaaccaaatttgttgttgggattccagtatcaagactaacaaagcttgaagttgcttactgtcaaggcagatgacaatagagaacacaagttagtgaaacaaaagaagaggagaatctgggtttattttgttattcaaataaatcttttctattgcaccaatgcatatccagtggtagcatcttttttcatgtagcatttagtataccttgttagaatctaataattcgaaaagtcatcgtcttcttatcaagtattcatacatgcagctttctggttccgaactatattaaattttattgcatgaaatgtactatgaaatagaaggtttgttgccttcaatatttcttcaaaaaaaaaaaaaaaaaaaaaaaaaaaaaaaaaaa

SEQ ID NO: 9787 - protein, 581 aa, Solanum tuberosum
MVTLYSSPSTNCSGAFSSYSNSSIGFYNYHNNFPISSRKFGSHKISLQINAIRMQDGAVVAQPSKTQDETPLKKLKDGILSKEQKHTFDFDSNKDKSTVSITVVGASGDLAKKKIFPALFALYYEGCLPEHFTIFGYARSKMTDDELRNMVSKTLTCRIDKRENCGEKMEQFLERCFYHSGQYDSQENFAELDKKLKEHEAGRFSNRLFYLSIPPNIFINAVRCASLASSAHGWTRVIVEKPFGRDSESSAALTGALKQYLKEDQIFRIDHYLGKELVENLSVLRFSNLIFEPLWSRQYIRNVQFIFSEDFGTEGRGGYFDHYGIIRDIMQNHLLQILALFAMETPVSLDAEDIRNEKVKVLRSMRPLQLDDVIVGQYKSHTKGGVNYPGYTDDKTVPKDSLTPTFAAAALFIDNARWDGVPFLMKAGKALHTRSAEIRVQFRHVPGNLYNKNFGSDLDQATNELVIRVQPDEAIYLKINNKVPGLGMRLDRSNLNLLYSARYSKEIPDAYERLLLDAIEGERRLFIRSDELDAAWSLFTPVLKDLEHKKIVPESYPYGSRGPIGAHYLAARYKVRWGDLA

SEQ ID NO: 9788 - DNA, 2879 bp, Leishmania guyanensis; identical to SEQ ID NO: 2781
  misc_feature (1992)..(2321): n is a, c, g, or t
  misc_feature (2700)..(2700): n is a, c, g, or t
  misc_feature (2840)..(2840): n is a, c, g, or t
  CDS (205)..(1893)

SEQ ID NO: 9789 - protein, 562 aa, Leishmania guyanensis; identical to SEQ ID NO: 2782

SEQ ID NO: 9790 - DNA, 2916 bp, Leishmania amazonensis; identical to SEQ ID NO: 2785
  misc_feature (2191)..(2311): n is a, c, g, or t
  CDS (207)..(1895)

SEQ ID NO: 9791 - protein, 562 aa, Leishmania amazonensis; identical to SEQ ID NO: 2786
  misc_feature (463)..(463): Xaa can be any naturally occuring amino acid
  misc_feature (481)..(481): Xaa can be any naturally occuring amino acid

SEQ ID NO: 9792 - DNA, 1440 bp, Chlorobium tepidum; identical to SEQ ID NO: 2787
  CDS (1)..(1440)

SEQ ID NO: 9793 - protein, 479 aa, Chlorobium tepidum; identical to SEQ ID NO: 2788

SEQ ID NO: 9794 - DNA, 2187 bp, Methylobacterium extorquens; identical to SEQ ID NO: 2789
  CDS (640)..(2187)

SEQ ID NO: 9795 - protein, 515 aa, Methylobacterium extorquens; identical to SEQ ID NO: 2790

SEQ ID NO: 9796 - DNA, 1476 bp, Bartonella henselae; identical to SEQ ID NO: 2791
  CDS (1)..(1476)

SEQ ID NO: 9797 - protein, 491 aa, Bartonella henselae; identical to SEQ ID NO: 2792

SEQ ID NO: 9798 - DNA, 2266 bp, Toxoplasma gondii; identical to SEQ ID NO: 2793
  CDS (169)..(1851)

SEQ ID NO: 9799 - protein, 560 aa, Toxoplasma gondii; identical to SEQ ID NO: 2794

SEQ ID NO: 9800 - DNA, 1455 bp, Corynebacterium glutamicum
  CDS (1)..(1455)
atggtgatcttcggtgtcactggcgacttggctcgaaagaagctgctccccgccatttatgatctagcaaaccgcggattgctgcccccaggattctcgttggtaggttacggccgccgcgaatggtccaaagaagactttgaaaaatacgtacgcgatgccgcaagtgctggtgctcgtacggaattccgtgaaaatgtttgggagcgcctcgccgagggtatggaatttgttcgcggcaactttgatgatgatgcagctttcgacaacctcgctgcaacactcaagcgcatcgacaaaacccgcggcaccgccggcaactgggcttactacctgtccattccaccagattccttcacagcggtctgccaccagctggagcgttccggcatggctgaatccaccgaagaagcatggcgccgcgtgatcatcgagaagcctttcggccacaacctcgaatccgcacacgagctcaaccagctggtcaacgcagtcttcccagaatcttctgtgttccgcatcgaccactatttgggcaaggaaacagttcaaaacatcctggctctgcgttttgctaaccagctgtttgagccactgtggaactccaactacgttgaccacgtccagatcaccatggctgaagatattggcttgggtggacgtgctggttactacgacggcatcggcgcagcccgcgacgtcatccagaaccacctgatccagctcttggctctggttgccatggaagaaccaatttctttcgtgccagcgcagctgcaggcagaaaagatcaaggtgctctctgcgacaaagccgtgctacccattggataaaacctccgctcgtggtcagtacgctgccggttggcagggctctgagttagtcaagggacttcgcgaagaagatggcttcaaccctgagtccaccactgagacttttgcggcttgtaccttagagatcacgtctcgtcgctgggctggtgtgccgttctacctgcgcaccggtaagcgtcttggtcgccgtgttactgagattgccgtggtgtttaaagacgcaccacaccagcctttcgacggcgacatgactgtatcccttggccaaaacgccatcgtgattcgcgtgcagcctgatgaaggtgtgctcatccgcttcggttccaaggttccaggttctgccatggaagtccgtgacgtcaacatggacttctcctactcagaatccttcactgaagaatcacctgaagcatacgagcgcctcattttggatgcgctgttagatgaatccagcctcttccctaccaacgaggaagtggaactgagctggaagattctggatccaattcttgaagcatgggatgccgatggagaaccagaggattacccagcgggtacgtggggtccaaagagcgctgatgaaatgctttcccgcaacggtcacacctggcgcaggccatga

SEQ ID NO: 9801 - protein, 484 aa, Corynebacterium glutamicum
MVIFGVTGDLARKKLLPAIYDLANRGLLPPGFSLVGYGRREWSKEDFEKYVRDAASAGARTEFRENVWERLAEGMEFVRGNFDDDAAFDNLAATLKRIDKTRGTAGNWAYYLSIPPDSFTAVCHQLERSGMAESTEEAWRRVIIEKPFGHNLESAHELNQLVNAVFPESSVFRIDHYLGKETVQNILALRFANQLFEPLWNSNYVDHVQITMAEDIGLGGRAGYYDGIGAARDVIQNHLIQLLALVAMEEPISFVPAQLQAEKIKVLSATKPCYPLDKTSARGQYAAGWQGSELVKGLREEDGFNPESTTETFAACTLEITSRRWAGVPFYLRTGKRLGRRVTEIAVVFKDAPHQPFDGDMTVSLGQNAIVIRVQPDEGVLIRFGSKVPGSAMEVRDVNMDFSYSESFTEESPEAYERLILDALLDESSLFPTNEEVELSWKILDPILEAWDADGEPEDYPAGTWGPKSADEMLSRNGHTWRRP

SEQ ID NO: 9802 - DNA, 1923 bp, Xanthomonas campestris; identical to SEQ ID NO: 2795
  CDS (1)..(1923)

SEQ ID NO: 9803 - protein, 640 aa, Xanthomonas campestris; identical to SEQ ID NO: 2796

SEQ ID NO: 9804 - DNA, 1431 bp, Xanthomonas campestris; identical to SEQ ID NO: 2797
  CDS (1)..(1431)

SEQ ID NO: 9805 - protein, 476 aa, Xanthomonas campestris; identical to SEQ ID NO: 2798

SEQ ID NO: 9806 - DNA, 1839 bp, Xanthomonas axonopodis; identical to SEQ ID NO: 2799
  CDS (1)..(1839)

SEQ ID NO: 9807 - protein, 612 aa, Xanthomonas axonopodis; identical to SEQ ID NO: 2800

SEQ ID NO: 9808 - DNA, 1431 bp, Xanthomonas axonopodis; identical to SEQ ID NO: 2801
  CDS (1)..(1431)

SEQ ID NO: 9809 - protein, 476 aa, Xanthomonas axonopodis; identical to SEQ ID NO: 2802

SEQ ID NO: 9810 - DNA, 1458 bp, Thermoanaerobacter tengcongensis; identical to SEQ ID NO: 2803
  CDS (1)..(1458)

SEQ ID NO: 9811 - protein, 485 aa, Thermoanaerobacter tengcongensis; identical to SEQ ID NO: 2804

SEQ ID NO: 9812 - DNA, 1446 bp, uncultured proteobacterium
  CDS (1)..(1446)
atgaccggagtcgacctaattatttttggcgcttccggagacctttcagcaagaaagctctttcccgcactgtttcaactcgaccgcgccgaattactgcccagcgacctgcgcatcacagcaattgctagagatcaggtcgacgtaaatacttttttggaaggcctaagacagcgaatgcatgcctacatgggctctgagtcgccttccgatgccgagtggcagcactactcacgacattttcaatatgtgggcgccgacttcgccaacgctgacagctattccagtatcagggcaactctagatgatacccgtatcagcttattttacttggctacaccacccagcatcttcgccctaatttgcaacaatctggccactaataattgcctcaccggcgactgccgaatcgtactcgaaaaacccattggcgaatgtctagcctcgtcaaaggaagtcaatgaaacgctggctcgctactttgacgaaggatctatttatcgcatagatcactacctgggaaaggagaccgttcagaacttactcgcgctgcgctttgcaaaccgatttattaatagtcagtgggatgccaactgtatcgaccatgttcaaatcaccgtcggcgaaatcgtcggtattgagggtcgctggtcttactatgaccgcgttggccagctccgcgacatggttcaaaaccaccttatgcagttactctgtctcgtcgctatggagccccccaatagcctagaagccgatagcatccgcgacgaaaaagtcaaaatcgtcaaggccttgagacgcatcgactctgatcaggtctctgagcacgtgattaaagggcaatacagccagggttggtcttcaggtgcggccgtgcctgggtaccttgaggagcccggttgtgagcgcccggacagcgataccgagacgtttatcgcgatcaaagctcatgtagacaactggcgctgggccggcgttccattttacctgcgaacaggaaaacgcgttcctgaaaaattaactgaaatcatcattcagtacaaagaccttccccacaacatttttagcggcggcaccagcgcgaacaagttaatcattcggttacagcccagggaaggcatcgagctaacaatggcatcgaaacgccagacgctgcgagaaaaactgtccttacagaaccataccttggatttagattttcgggaaaccaccggcatgaatcgaattcccgacgcctacgaacgattatttcttgatgcaattaatggcgatcagtcgctgtttgtaggtcgagaggagatcgaagaaagctggcgctggtgtgatgaactgattgacgcctgcaaccaaaagaacatagagaccaagccctatcacgctggatcttggggcccacctaaagccgagcttttaattgaaaaggatgggcgtagctggcatgtctga

SEQ ID NO: 9813 - protein, 481 aa, uncultured proteobacterium; identical to SEQ ID NO: 2668

SEQ ID NO: 9814 - DNA, 1762 bp, Oryza sativa; identical to SEQ ID NO: 2805
  CDS (41)..(1558)

SEQ ID NO: 9815 - protein, 505 aa, Oryza sativa; identical to SEQ ID NO: 2806

SEQ ID NO: 9816 - DNA, 1305 bp, Encephalitozoon cuniculi; identical to SEQ ID NO: 2807
  CDS (1)..(1305)

SEQ ID NO: 9817 - protein, 434 aa, Encephalitozoon cuniculi; identical to SEQ ID NO: 2808

SEQ ID NO: 9818 - DNA, 2125 bp, Drosophila melanogaster; identical to SEQ ID NO: 2809
  CDS (158)..(1738)

SEQ ID NO: 9819 - protein, 526 aa, Drosophila melanogaster; identical to SEQ ID NO: 2810

SEQ ID NO: 9820 - DNA, 1470 bp, Ralstonia solanacearum; identical to SEQ ID NO: 2811
  CDS (1)..(1470)

SEQ ID NO: 9821 - protein, 489 aa, Ralstonia solanacearum; identical to SEQ ID NO: 2812

SEQ ID NO: 9822 - DNA, 1521 bp, Enterococcus mundtii; identical to SEQ ID NO: 2813
  CDS (1)..(1521)

SEQ ID NO: 9823 - protein, 506 aa, Enterococcus mundtii; identical to SEQ ID NO: 2814

SEQ ID NO: 9824 - DNA, 2630 bp, Homo sapiens
  CDS (474)..(2021)
agggacagcccagaggaggcgtggccacgctgccggcggaagtggagcctaccgcgagcgcgcgaggccgccggggcaggcggggaaaccggacataggggcggggccgggccggcgatggggatgcgggagcactacgcggagctgcacccgtgcccgccggaattggggatgcagagcagcggcagcgggtatggcaggcagccggcgggccggcctccagcgcaggtgcccgagaggcaggggctggcctgggatgcgcgcgcacctgccctcgccccgccccgcccgcacgaggggtggtggccgaggccccgccccgcacgcctcgcctgaggcgggtccgctcagcccaggcgcccgcccccgcccccgccgattaaatgggccggcggggctcagcccccggaaacggtcgtacacttcggggctgcgagcgcggagggcgacgacgacgaagcgcagacagcgtcatggcagagcaggtggccctgagccggacccaggtgtgcgggatcctgcgggaagagcttttccagggcgatgccttccatcagtcggatacacacatattcatcatcatgggtgcatcgggtgacctggccaagaagaagatctaccccaccatctggtggctgttccgggatggccttctgcccgaaaacaccttcatcgtgggctatgcccgttcccgcctcacagtggctgacatccgcaaacagagtgagcccttcttcaaggccaccccagaggagaagctcaagctggaggacttctttgcccgcaactcctatgtggctggccagtacgatgatgcagcctcctaccagcgcctcaacagccacatgaatgccctccacctggggtcacaggccaaccgcctcttctacctggccttgcccccgaccgtctacgaggccgtcaccaagaacattcacgagtcctgcatgagccagataggctggaaccgcatcatcgtggagaagcccttcgggagggacctgcagagctctgaccggctgtccaaccacatctcctccctgttccgtgaggaccagatctaccgcatcgaccactacctgggcaaggagatggtgcagaacctcatggtgctgagatttgccaacaggatcttcggccccatctggaaccgggacaacatcgcctgcgttatcctcaccttcaaggagccctttggcactgagggtcgcgggggctatttcgatgaatttgggatcatccgggacgtgatgcagaaccacctactgcagatgctgtgtctggtggccatggagaagcccgcctccaccaactcagatgacgtccgtgatgagaaggtcaaggtgttgaaatgcatctcagaggtgcaggccaacaatgtggtcctgggccagtacgtggggaaccccgatggagagggcgaggccaccaaagggtacctggacgaccccacggtgccccgcgggtccaccaccgccacttttgcagccgtcgtcctctatgtggagaatgagaggtgggatggggtgcccttcatcctgcgctgcggcaaggccctgaacgagcgcaaggccgaggtgaggctgcagttccatgatgtggccggcgacatcttccaccagcagtgcaagcgcaacgagctggtgatccgcgtgcagcccaacgaggccgtgtacaccaagatgatgaccaagaagccgggcatgttcttcaaccccgaggagtcggagctggacctgacctacggcaacagatacaagaacgtgaagctccctgacgcctacgagcgcctcatcctggacgtcttctgcgggagccagatgcacttcgtgcgcagcgacgagctccgtgaggcctggcgtattttcaccccactgctgcaccagattgagctggagaagcccaagcccatcccctatatttatggcagccgaggccccacggaggcagacgagctgatgaagagagtgggtttccagtatgagggcacctacaagtgggtgaacccccacaagctctgagccctgggcacccacctccacccccgccacggccaccctccttcccgccgcccgaccccgagtcgggaggactccgggaccattgacctcagctgcacattcctggccccgggctctggccaccctggcccgcccctcgctgctgctactacccgagcccagctacattcctcagctgccaagcactcgagaccatcctggcccctccagaccctgcctgagcccaggagctgagtcacctcctccactcactccagcccaacagaaggaaggaggagggcgcccattcgtctgtcccagagcttattggccactgggtctcactcctgagtggggccagggtgggagggagggacaagggggaggaaaggggcgagcacccacgtgagagaatctgcctgtggccttgcccgccagcctcagtgccacttgacattccttgtcaccagcaacatctcgagccccctggatgtcccctgtcccaccaactctgcactccatggccaccccgtgccacccgtaggcagcctctctgctataagaaaagcagacgcagcagctgggacccctcccaacctcaatgccctgccattaaatccgcaaacagcc

SEQ ID NO: 9825 - protein, 515 aa, Homo sapiens [sequence omitted]

SEQ ID NO: 9826 - DNA, 1491 bp, Pasteurella multocida; identical to SEQ ID NO: 2823
  CDS (1)..(1491)

SEQ ID NO: 9827 - protein, 496 aa, Pasteurella multocida; identical to SEQ ID NO: 2824

SEQ ID NO: 9828 - DNA, 1470 bp, Pseudomonas putida; identical to SEQ ID NO: 2825
  CDS (1)..(1470)

SEQ ID NO: 9829 - protein, 489 aa, Pseudomonas putida; identical to SEQ ID NO: 2826

SEQ ID NO: 9830 - DNA, 1566 bp, Trypanosoma brucei; identical to SEQ ID NO: 2827
  CDS (1)..(1566)

SEQ ID NO: 9831 - protein, 521 aa, Trypanosoma brucei; identical to SEQ ID NO: 2828

SEQ ID NO: 9832 - DNA, 1904 bp, Triticum aestivum; identical to SEQ ID NO: 2829
  CDS (153)..(1682)

SEQ ID NO: 9833 - protein, 509 aa, Triticum aestivum; identical to SEQ ID NO: 2830

SEQ ID NO: 9834 - DNA, 1924 bp, Triticum aestivum
  CDS (161)..(1702)
cgattgggcaaggaaggggccacccccctccccattcctacccacccagcatctcggcagtaactctcctccctcccaccggcgcgcccgctcgccgcgcgcgcgaatctcggtcgcaactggtgtactgttgaaggaaggaaaaatcatcctatttgtcatggcgggaactgactcctcggcgtcatcgagacaaagcagtttcaactcattagcaaaggacctagaacttcctttggagcaagggtgcctcaccatcgttgtacttggggcttctggagatcttgccaagaagaaaacgttcccggcactctaccacctttttgagcaggggttcttacaatctggtgaagtgcatatagtggggtatgcgagaacaaatctttctgatgatgggttgagagggcgcatccgtgcataccttaaaggagcctcagaggaacatgtttcagaattcttgcaattgataaaatatgtcagtggttcctatgacagtggagaaggttttgaaaaactgaacaaggaaatatcagattatgagatgtcaaacaactcaggaagctcccgtaggctcttttatttggcattgcctccatctgtctacccttcagtgtgcaaaatgatccgaacatattgcatgagtccaacttctcgcgctggatggactagagtaattgttgagaagccctttggaagggacctggactctgcagaagaattgagttcccaacttggggagctattcgaggaagatcaactctacaggattgaccactacttgggaaaagagttggtccaaaacttgcttgtgcttcgttttgcgaaccgtttgttcttaccactttggaaccgtgacaatgttgataatatacagattgtattcagggaggacttcggaactgatggacgtggaggatattttgatcaatatggaatcatccgtgatatcattcagaaccatttgttgcaggttttctgtttggttgcaatggaaaagcctgtatctcttaagcctgagcacatcagagatgagaaagtcaaggttctgcaatccgtgaacccgataaaggacgaagaggtagtccttggacaatatcagggctacaaggatgaccctacagtgccagatgactctaataccccaacgtttgcatctattgtacttagggtacacaatgaaagatgggaaggtgttcctttcattcttaaagctggtaaagcattaaactcaagaaaagcagaaattcgtgtgcagttcaaggatgttcccggtgacatttttaaatgtaagaagcagggaagaaatgagtttgtcatacgcctccagccatcagaagccatgtacatgaaactaactgaattcgtgcaggtgaagaaacctggattggaaatggctactgaacagagtgaacttgatctgtcatatgggatgcgttaccaagatgtcaaaattccagaggcatacgagcgcctcattttggatacaataagaggggaccagcaacactttgtgcgccgagatgagctgaaggctgcctggcagatcttcactcccttgttgcacgacatcgacgctggcaagctgaaggctgtttcatacaagcctggcagccgaggccccaaggaagctgatgaactgagtgagaaggttgggtacatgcagacccacggttacatctggataccacccacccttgcatagagtgcctccctcgatccttgtaggtttgtttagctaggaagagtgaaagtatcacggataaaaatcttacgaattttagctgtactgcggtttacctggcgttgtaataacggatctgttcgacggagtatacctcaccacggtgtgaaataaaaaatggagtgtttcaaaaaaaaaaaaaaaaaagggtcgcgcgatcgatgccgaatcactagtgaattc

SEQ ID NO: 9835 - protein, 513 aa, Triticum aestivum
MAGTDSSASSRQSSFNSLAKDLELPLEQGCLTIVVLGASGDLAKKKTFPALYHLFEQGFLQSGEVHIVGYARTNLSDDGLRGRIRAYLKGASEEHVSEFLQLIKYVSGSYDSGEGFEKLNKEISDYEMSNNSGSSRRLFYLALPPSVYPSVCKMIRTYCMSPTSRAGWTRVIVEKPFGRDLDSAEELSSQLGELFEEDQLYRIDHYLGKELVQNLLVLRFANRLFLPLWNRDNVDNIQIVFREDFGTDGRGGYFDQYGIIRDIIQNHLLQVFCLVAMEKPVSLKPEHIRDEKVKVLQSVNPIKDEEVVLGQYQGYKDDPTVPDDSNTPTFASIVLRVHNERWEGVPFILKAGKALNSRKAEIRVQFKDVPGDIFKCKKQGRNEFVIRLQPSEAMYMKLTEFVQVKKPGLEMATEQSELDLSYGMRYQDVKIPEAYERLILDTIRGDQQHFVRRDELKAAWQIFTPLLHDIDAGKLKAVSYKPGSRGPKEADELSEKVGYMQTHGYIWIPPTLA

SEQ ID NO: 9836 - DNA, 2098 bp, Solanum tuberosum; identical to SEQ ID NO: 2831
  CDS (27)..(1775)

SEQ ID NO: 9837 - protein, 582 aa, Solanum tuberosum; identical to SEQ ID NO: 2832

SEQ ID NO: 9838 - DNA, 1924 bp, Dunaliella bioculata; identical to SEQ ID NO: 2833
  CDS (68)..(1840)

SEQ ID NO: 9839 - protein, 590 aa, Dunaliella bioculata; identical to SEQ ID NO: 2834

SEQ ID NO: 9840 - DNA, 1976 bp, Cyanidium caldarium; identical to SEQ ID NO: 2835
  CDS (46)..(1848)

SEQ ID NO: 9841 - protein, 600 aa, Cyanidium caldarium; identical to SEQ ID NO: 2836

SEQ ID NO: 9842 - DNA, 1777 bp, Mesembryanthemum crystallinum; identical to SEQ ID NO: 2839
  CDS (39)..(1589)

SEQ ID NO: 9843 - protein, 516 aa, Mesembryanthemum crystallinum; identical to SEQ ID NO: 2840

SEQ ID NO: 9844 - DNA, 1587 bp, Mus musculus
  CDS (31)..(1572)
atgcagtggcaactaaactaggaaaacatcatggcagagcaggtgaccctaagccggacccaagtgtgtgggatcctgagggaagagttgtaccaaaatgatgccttccaccaagctgatacacacatatttatcatcatgggtgcatcgggtgacctggccaagaagaagatctatcccaccatctggtggctgttccgggatggtcttctacccaaagaaaccttcattgtgggctatgcccgctcacaactcacagtggatgacatccaaaagcagagtgagcccttctttaaggccactccagaagaaagacccaagctggaggagttcttcacgcgtaactcctatgtagttggccagtatgatgatccagcctcctataagcacctcaacagctacattaatgccctgcaccaggggatgcaggccaaccatctattctacctggccttgccccccacagtctatgaagcagtcaccaagaacattcaagagacctgcatgagtcagacaggctttaaccgcatcatagtggagaaacccttcgggagagacctgcagagctccaatcaattgtctaaccacatctcctctcttttccgtgaagaccagatctaccgcattgaccactacctggacaaagagatggtccagaacctcatggtgctgaggtttgctaacaggatctttggccctatctggaatggagacaacattgtttgtgtgatcctcacatttaaagagccctttggtactgagggtcgtgggggctattttgatgaatttgggatcatcagggatgttatgcagagccacctcctgcagatgttgtgtctggtggccatggaaaagcctgctaccacagattcagatgatgtccgtaatgagaaggtcaaagtgttgaaatgtatctcagaggtggaaactgacaatgtgatccttggccagtatgtggggaaccccaatggagaaggagaagctgccaatggatacttagatgaccccacagtaccccgtgggtccacaactgccacctttgctgcagctgtcctctatgtgaagaatgaacggtgggatggggtacccttcatactgcgctgtggcaaagccctgaatgaacgcaaagctgaagtgagactgcaattccgagatataccaggcgacatcttccaccagaagtgcaagcgtaatgagctggtcatccgtatgcagcccaatgaggcagtatacaccacgatgatgaccaagaagcctggcatgttctttaaccctgaggagtcggagctggacctaacttatggcaacaaatacaagaatgtgaagctccctggtgcctatgaacgcctcatcctggatgtcttctgtgggtgccagatgcactttgtccgtactgatgaactcagggaaggctggcgtatcttcacaccactgctgcacaagattgaacgagaaaagccccagcccttcccctatgtatatggcagccgtggccccacagaggcagatgagctgatgaggagagtgggcttccagtacaagggtacctacaagggtactcacaagcactgagccctggaacttctg

SEQ ID NO: 9845 - protein, 513 aa, Mus musculus; identical to SEQ ID NO: 2842

SEQ ID NO: 9846 - DNA, 1485 bp, Actinobacillus actinomycetemcomitans; identical to SEQ ID NO: 2843
  CDS (1)..(1485)

SEQ ID NO: 9847 - protein, 494 aa, Actinobacillus actinomycetemcomitans; identical to SEQ ID NO: 2844

SEQ ID NO: 9848 - DNA, 1473 bp, Buchnera aphidicola; identical to SEQ ID NO: 2845
  CDS (1)..(1473)

SEQ ID NO: 9849 - protein, 490 aa, Buchnera aphidicola; identical to SEQ ID NO: 2846

SEQ ID NO: 9850 - DNA, 1473 bp, Buchnera aphidicola; identical to SEQ ID NO: 2847
  CDS (1)..(1473)

SEQ ID NO: 9851 - protein, 490 aa, Buchnera aphidicola; identical to SEQ ID NO: 2848

SEQ ID NO: 9852 - DNA, 2049 bp, Ceratitis capitata; identical to SEQ ID NO: 2849
  CDS (60)..(1640)

SEQ ID NO: 9853 - protein, 526 aa, Ceratitis capitata; identical to SEQ ID NO: 2850

SEQ ID NO: 9854 - DNA, 1524 bp, Chlamydia muridarum; identical to SEQ ID NO: 2851
  CDS (1)..(1524)

SEQ ID NO: 9855 - protein, 507 aa, Chlamydia muridarum; identical to SEQ ID NO: 2852

SEQ ID NO: 9856 - DNA, 1536 bp, Emericella nidulans; identical to SEQ ID NO: 2855
  CDS (1)..(1536)

SEQ ID NO: 9857 - protein, 511 aa, Emericella nidulans; identical to SEQ ID NO: 2856

SEQ ID NO: 9858 - DNA, 1962 bp, Macropus robustus
  CDS (1)..(1548)
atggcagagcaggtggcactgagccggacccaagtgtgtggaattctccgggaagaattgtaccagggtgatgccttccaccagtcagacacacacatattcatcatcatgggagcctcgggtgacttagcaaagaagaaaatctaccctacaatctggtggctgttccgtgatgggcttctccccgaagacaccttcattgtgggctatgctcgctcaaacctcactgtggatgacatccgaaagcaaagcgagccctattttaaggccaccccggaagagaacctgaagctggaggagttcttctctcgaaattcctacgtggcaggccaatacgatgagccagcttcctttcagcgtctcaatgcccacatgaactccctgcatcatgggtcacaggccaaccgcctcttctacctggccttgccacccaccgtctatgaagctgtcactaagaacatcaaagagacttgcatgagccagataggttggaaccgggtcattgtggagaagccttttggaaaagatcttcagagctctgacaaactgtcaaaccacatttcctcactcttccatgaggaccagatctaccggatcgatcactacctgggcaaggaaatggtacagaacctcatggtgctaagatttggtaacaggatctttggaccgatctggaaccgagacaacattgcctgtgtcatcttcaccttcaaggagccctttggcactcttggccgagggggctattttgatgagtttgggatcattcgagacgtgatgcagaaccacctcttgcagatgctttgcctagtggccatggaaaaacctgcctccaccaactctgatgatgtccgggatgaaaaggtgaaggtcctgaagtgtatctcagaggtgagagcaactgatgtggtcttgggccagtatgtggggaacccagatggagaaggggaagccaccaaaggctatttggatgatcccacagtgccccggggctccaccactgccacctttgctgctgtggtcctctatgtggaaaatgaaagatgggacggagtcccctttatcctccgctgtggaaaggccctgaatgaacgcaaagcagaagtgaggttacagttccgggatgtggctggtgatatcttccagcgccagtgtaagcggaatgagctggtgatccgcgtgcagcccaacgaggctgtctacaccaagatgatgaccaagaagccagggatgttcttcaaccccgaagagtcagagctggacctgacctatggcaacagatacaaagatgtgaagctgcccgatgcttatgagcgccttatcctggatgtcttctgtggaagccagatgcactttgtgcgcagtgatgagcttcgggaagcctggaggatctttacgcccctgctgcaccacattgagaaggagaagacccagcccattgcctacgtctatggcagccgaggccctcctgaagcagacgaactgatgaagagagtgggcttccagtatgagggcacctacaagtgggtaaacccccacaagctctgaggcagcctggcagcccactagcttcctcccccttgtttcccatccccagcctccatgctcatccttttagccctttggcctcacttagggtctgtctctctgcccatcccctgttcatgttctactcaggcagaaactcttgggaccacaagaccaggagcccgtccctgggggagatggagggccccattgagagattccctgggccctttccactcccagaaggcccggggacccggccaccaacttctcagccctgtttacagctgcattaggtctgccattcagcagctaccagatacttcctcctgctttgagctcccagagccagctacattccaatagcagtcgctggaggtgtcctctgtttcccttcaggacagcagctttataaatacagagaattaccagtca

SEQ ID NO: 9859 - protein, 515 aa, Macropus robustus; identical to SEQ ID NO: 2860

SEQ ID NO: 9860 - DNA, 1530 bp, Nostoc punctiforme; identical to SEQ ID NO: 2861
  CDS (1)..(1530)

SEQ ID NO: 9861 - protein, 509 aa, Nostoc punctiforme; identical to SEQ ID NO: 2862

SEQ ID NO: 9862 - DNA, 1476 bp, Rhizobium meliloti; identical to SEQ ID NO: 2863
  CDS (1)..(1476)

SEQ ID NO: 9863 - protein, 491 aa, Rhizobium meliloti; identical to SEQ ID NO: 2864

SEQ ID NO: 9864 - DNA, 1731 bp, Arabidopsis thaliana
  CDS (1)..(1731)
atggcgacacattctatgatcattccttctccttcttcttcttcctcgtctctcgctactgctgcgtctccgtttaaagagactctaccactctttagtagatctctcacattcccgagaaaatccttgttttctcaggttcgcttgagattcttcgccgagaaacattctcagcttgatacttcaaatgggtgtgccactaatttcgcttctttacaagattctggagatcaacttacagaggaacatgttacaaaaggagagtctactcttagtattacagttgttggagcgtcaggggacttagccaagaagaagatatttcctgcattgtttgctctcttttatgagggttgtcttcctcaggacttttctgtttttggttatgctcggactaaactcactcatgaagagcttcgtgacatgattagtagtactttaacttgccggattgatcagagggaaaaatgtggggataagatggagcagttcttgaaaagatgcttttaccattcgggtcagtataactcggaagaggattttgcggaactaaacaagaagctcaaagagaaagaggcaggaaagatatcaaacaggctgtactatttgtcgatacccccaaacatattcgttgatgtggttaggtgtgcaagtcttagagcctcctcagagaatggctggacaagggtcattgtggaaaagccatttggtcgtgactctgaatcatccggagagttaactagatgtctgaaacagtatcttacagaggagcaaatcttcaggattgatcactatttgggaaaggagcttgttgagaacctttcagtgctccgattctcaaatcttgttttcgagcctctgtggtcaagaaattacatacgcaacgttcagctgattttttctgaggatttcggaacagaagggcgtggaggttactttgatcaatatggaatcatacgagacatcatgcaaaaccatctcttgcaaatacttgcactttttgcaatggagacgccagtgagcttagatgctgaggacataagaagtgaaaaggtgaaagttttgagatcaatgaaaccgttgcggcttgaagatgtggttgttggtcaatacaaaggccataacaagggaggaaaaacttatccaggttatacagacgatccaacggttccaaatcacagtctcactcctacatttgctgcagcagccatgttcatcaacaatgcgagatgggacggtgttccttttcttatgaaagctggaaaagctctccataccagaggagcagagatcagagttcagttcagacatgtcccaggaaacttgtacaagaaaagttttgctactaatttagacaatgcaacaaatgaactagtgattagagttcagcctgatgaagggatatacctgaggatcaacaacaaagttcctggtcttggaatgagactagatcgcagcgaccttaaccttctatatcgatccaggtatccaagagagataccagatgcatatgaaagactgcttctcgatgcaatcgaaggagagaggaggttgtttatcagaagtgatgagctagatgcagcatgggatctattcacaccggctttgaaggaactagaggagaagaaaatcattcctgagctctatccatatggaagcagaggtcctgttggtgcacattaccttgcatctaagtacaatgtgagatggggagatcttggagaagcttaa

SEQ ID NO: 9865 - protein, 576 aa, Arabidopsis thaliana; identical to SEQ ID NO: 2868

SEQ ID NO: 9866 - DNA, 2112 bp, Arabidopsis thaliana; identical to SEQ ID NO: 2869
  CDS (142)..(1932)

SEQ ID NO: 9867 - protein, 596 aa, Arabidopsis thaliana; identical to SEQ ID NO: 2870

SEQ ID NO: 9868 - DNA, 1909 bp, Arabidopsis thaliana
  CDS (1)..(1878)
atgtctctctccagttgcttgcttcccttttctcaatcagcgacggctccgtcttcctccgtctgctcttgccatctcgccgcctctttttctaattttccggtttcgtcaagagactatagtttctccagaagtggaagccttgttctcaacggaggaggctcgaatctctgccggagattctgtggtttgaaactgtggatacttaagagcttgaatcgtagacaaggcaacaacagaaaacatcagcctgtaaacgagcttacaacacactcaaagcacactttcctcagcgatgatgaacgaggttttgctgaagaaactagagctgaagatttacgaccagaagagaatattctgggaacggatttgaatgatgggtttcacaatgttggagacttaccacctgtgtcaaaacaactctcggatgatctttcagatgttcgaagaagggcctcactttgcattgctgttgtaggagccactggtgagctagcaagagggaagattttcccggcattgtttgcgttgtattatagcggctaccttcctgaggatgttgctatatttggggtttcaagaaagaatctgacagatgaagacctcagatccatcattgcatcaacgctgacttgccgtgttgatcatcaggagaattgtgggggcaagatggatgcatttcagagtagaacatactatatcaatggaggttataataacagggatgggatgtcccgacttgccgagagaatgaaacagattgagggagaatcagaagcaaatagaatcttttacctctcagtacctcaagaagctctggtggatgtggcatgcaccattggagataacgctcaggcaccacgaggctggactcgaataatagttgagaaaccttttggttttaactcacattcgtctcatcagttaacaaagtcacttctctctaagtttgaagagaagcaaatctacaggatagatcacatgttaggaagaaacctcattgaaaatctgacagtgttaaggttttcaaatctagtttttgaaccactatggaacagaacatacatacgcaatatacaggttattatatcagaatcaattgcgcaaacagaaaagttttctgatggatatggaataatacgggacatagtgcacagccatatacttcagacaatcgcattacttgccatggaacctccgataagtctcgatggtgaagatatccgaaatgaaaaggtgaaggttttaagatcaattcgcaagatagacccgcgtgatgtcatccttggccagtataaatccagttcccgagacaagaacggtgtgatcttgaacggtgtagaccctacatattgtgcagcagccttgtatattgataatgcacgttgggatggtgtacctttccttgtaagagttggcactggcctcattaaacacagagtggagattcatgtgcaattccggcatgttcctggaaacctataccgagaaaatattggaataaacatagatttggggacaaatgagcttattctacgtgacgaacctgatgaggccatcctggtgaaaatcaacaacaaggttcctggtttaggtcttcagctagacgcttctgaacttaacttgctctataaagacaggtataaaaccgaagtaccagactcatatgaacacctaattcatgatgtaattgacggagacaatcatctgttcatgagaagcgatgaggttgcagcagcatggaacattcttagtccggttctagaagagatagacaagcatcacacagctccggagttgtatgaatttggtggacgaggaccagttgcggcatactatctttgggccaagcacggtgtcccatgggcagatgactgaagaagaaacatagatgcagcaacaaacaaat

SEQ ID NO: 9869 - protein, 625 aa, Arabidopsis thaliana; identical to SEQ ID NO: 2872

SEQ ID NO: 9870 - DNA, 1548 bp, Arabidopsis thaliana
  CDS (1)..(1548)
atgggatctggtcaatggcacgttgagaaaaggtctacgtttaggaatgattcgtttgtgagagaatatggtatagttccagaaactggttgtctttcaatcatagttcttggtgcttctggtgatcttgctaagaagaagacttttcctgctctttttaacttataccgtcagggatttctcaatccagatgaagttcatattttcgggtatgcgaggactaagatttctgatgaagagctgagagataggattcgtggatatcttgttgatgagaagaatgctgagcaagctgaagctttgtcaaagtttctgcagctgattaagtatgtgagtggcccttatgatgctgaggaggggttccagagattagacaaggcaatttcagagcacgaaatctccaaaaatagtactgaagggtcttccagaagactgttttatcttgcacttccaccgtctgtttatccttctgtatgcaagatgatcaagacgtgctgcatgaacaaatctgatcttggtggatggacacggattgttgtggagaagccatttggcaaggaccttgaatctgcagagcaactgagttctcagattggagagttatttgatgaatcacagatctatcgtatagaccattatcttgggaaggaattagttcaaaacatgttggtcctccggtttgcaaatcgctttttcttgccactttggaaccgtgacaatatcgagaacgtgcagattgttttcagggaagattttggaactgaagggcgtggcggatattttgacgaatatggaataatccgtgatattattcaaaaccatctgctacaggttctttgccttgttgccatggagaaaccaatatctcttaaacctgagcatatccgggatgagaaagtgaaggtgcttcaatctgtggttccgataagcgatgacgaggtagttcttggacaatacgaaggatatagggatgatgatactgttccaaacgactcaaacactccaacatttgccacaacaatccttcgcatacacaacgaaagatgggaaggtgttccatttatattaaaggccggaaaagcgttgaattcaaggaaggcagaaattcgcattcaattcaaggatgtcccaggcgacatattcagatgtcaaaagcaaggaaggaacgagtttgtgatacgcttgcaaccttcagaggcaatgtacatgaaactaactgttaagcaaccaggtctagatatgaatactgtgcaaagtgaactagacttgtcgtatgggcaacggtatcaaggtgtcgctatccctgaggcatacgagcgcttaattcttgacacaatcaaaggcgatcaacaacatttcgttcgtagagacgaattaaaggttgcgtgggagatcttcacgccgctactccacaggatcgacaaaggagaagtaaagtcaatcccatacaaaccaggaagccgaggaccgaaagaagctgatcagctactagagaaagctggttatcttcagactcacggctatatctggatccctcctacactataa

SEQ ID NO: 9871 - protein, 515 aa, Arabidopsis thaliana [sequence omitted]

SEQ ID NO: 9872 - DNA, 1719 bp, Drosophila melanogaster
  CDS (1)..(1719)
atgcaatatctatcactaatcttttttaaattacaactatttattcttggccaaaatttgacgttaccttgctttcttttattctctcaaaattatacttcaattaaattacccgaaatgatttccatggacccccacaatgaggaggcgtattccatcgtggtcttcggagcctcaggcggattggccaaaaagaaggtgtttccggcgctttgggctctcttccgggagaatcggctgccccagggcaccaaaatatttactttcacccggtccccgctgcagacgaagacgtaccggttgcagattcttccctatatggagctggacaagcatcgggaccccaagaagtacaacctcttttggacgaccgtgcactgtgtgcagggcgagtacgacaagccggagaactacgtggcactcacggaggcgatggtacaccaggagacaaagcacaatcaggtgcgcgcgaatcgaatcttctacctggcgctgccaccgatcgttttcgatcaggtgaccctcaatgtcagtcgaaaatgcagctcgaccacgggatggaaccgcataatagtggagaagcccttcgcgcgggacgacatctcctacaaggcctttcaaacctcgctgtgcaactgcttccgggagtcgcagatttacctgatggaccacctcctcagccggcaggtgatgcagaacttctttgcgctgcgctactcaaaccacttgtgggccgagaccctgaaccaccgccacgtggcggcggtgatgatatccataaagtgtgagctgccggtgtcggtgaatcgggcagactactttaatcagtttggcattattcgcgacctgatgaccaaccacatgatccagatgctggccatgctggctatggatcagccgtacgccaacactgctgacgacctgcgtgccgaacggctgaaggttcttcgccaggtgctaactcccaacataggcgacgtcgtcttggctcaataccgcaacaaccggcgggagactgaccccgcgaagtgcggctacacggagcacacctacatcccgaaggactcctttacgcccacattcgctctggtggtgctgcacatcaacaaccgccgttggaccggggtacccttcattctcagagcgggaaaagccttgaacgacaccaagtcggaggtgcgtatccagtacaagccggtggactgcgacaccttccacagcgacagtactgacattcgtaacgagctagtcctgagatccttccccacggaagaggtctttatgcgcatgcgcctcaagcggcagggcgaggatatctgccttcgggagagcgagatcaacctgcgagtggatgatcggggaccgaagggactccaaggactgcccggctacctgctcaacgtgtttcaaggcgaccagacgctcttcatgcgctccgatgagcagtgcgagatttggcgcatattctcccccgttctcgccaccatcgattcggatcgtccccgcccgttgcactatgactttggatcacggggtcctttgctggcctatcgcaaggccgagcgcgctggcttcgtattcttcgccacggacgagtggcatcagagcgaagagacgttagaatacacggtcaagaatagcaagcagctaatcggaccccataccgccctcaagccagtaagagatcctcggtccaagaggtcgaattccaatccttag

SEQ ID NO: 9873 - protein, 572 aa, Drosophila melanogaster; identical to SEQ ID NO: 2838

SEQ ID NO: 9874 - DNA, 1503 bp, Xenopus laevis; identical to SEQ ID NO: 2877
  CDS (1)..(1503)

SEQ ID NO: 9875 - protein, 500 aa, Xenopus laevis; identical to SEQ ID NO: 2878

SEQ ID NO: 9876 - DNA, 1545 bp, Mycobacterium paratuberculosis; identical to SEQ ID NO: 2679
  CDS (1)..(1545)

SEQ ID NO: 9877 - protein, 514 aa, Mycobacterium paratuberculosis; identical to SEQ ID NO: 2680

SEQ ID NO: 9878 - DNA, 1410 bp, Mycobacterium paratuberculosis; identical to SEQ ID NO: 2675
  CDS (1)..(1410)

SEQ ID NO: 9879 - protein, 469 aa, Mycobacterium paratuberculosis; identical to SEQ ID NO: 2676

SEQ ID NO: 9880 - DNA, 1874 bp, Oryza sativa
  CDS (9)..(1742)
ggctccaaatggccggcaccggcttacgattccggcagggcgccatcttcttctcaggagctcatgctgctgctcatccaagaacaaggactcctcaccaccattgctcacctcagaggacgcacgatgcgagaggaaggtgccgcctcacggctaagtccgcaaatggacgcccacagatcagtgcctccttcagagatgtggcgatagatggggcacagtctgaagatggggcgccagagcagggaggatccaccgtcagcatcaccgtcgtcggcgcctccggcgatctcgccaagaagaagatctttcccgcgcttttcgccctgtactacgaggactgcctcccggagcattttacagtttttggttatgctcgtagcaagatgagcgatgaagagctcaggaacatgattagcttgactctgacatgccggattgatcagagggagaactgcagtgacaagatggaacagtttctgaagagatgcttttatcaatctgggcagtacaattcagaggaagggttttctgaactggacagaaagctaaaagaaaaggaggctggcaaggtaccaaacaggctcttttacctgtcgattccaccgaacatatttgtcgatgtggtgagatctgctagtcgcacagcatcatctcaagacggatggacaaggttcatagtggagaagccattcggccgcgattccgagtcgtcaggggagctcactcgaaacttgaagaagtacttggccgaggagcagatattcaggattgaccattatttggggaaggagctggttgagaacctctcggtgctccgtttctccaatctcgtcttcgagccactgtggtcgaggaactacatcaggaatgtgcagctcatattttctgaagatttcggcacggagggtcgaggcggccacttcgacaactacgggatcatcagggacataatgcagaaccacctgctgcagatcctggccctgttcgccatggagactccggtcagcctcgacgccgaggacatccgcaacgagaaggtgaaagtgctgaggtcgatgaggcagctgaggctggaggacgtggtggtgggtcagtacaaggggcacagcaagggcgggaagacgtacccggcgtacgtggacgacccgacggtgccgagcggcagcatcacgccgacgttcgccgccgccgccctcttcatcgacaacgcccgctgggacggcgtccccttcctcatgaaggccggcaaggccctgcacacgcgacgggcggagatcagggtgcagttccggcgggtgccggggaacctgtacgggcggcggagccggagcgtgggcggcggcgggacgacagcgacgagggagctggagaaggcgacgaacgagctggtgctgcgggtgcagcccgacgaggcgatctacctcaagatcaacagcaaggtgcccgggctggggatgaggctggacagcagcgacctcaacctgctctactccgagcgctaccccgccgagatccccgacgcctacgagcgcctgctgctcgacgccatcgagggcgagcgccgcctcttcatccgcagcgacgagctcgacgccgcctgggccatcttcacccccgtcctcgccgacctcgaggccaacaaggtggcacccgagctctacccgtacggcagccggggacccgtcggagcgcactacctcgccgccaaccacaacgtccgctggggtgacattagctagctcagaaaatgaaaagatcgatcggagtcgctgttaccgtgcttgctataatcttcatttaccatttgcattgatgaattctttattggactgctcagggacgaaattaataaaacaaagctctagtcattc

SEQ ID NO: 9881 - protein, 577 aa, Oryza sativa
MAGTGLRFRQGAIFFSGAHAAAHPRTRTPHHHCSPQRTHDARGRCRLTAKSANGRPQISASFRDVAIDGAQSEDGAPEQGGSTVSITVVGASGDLAKKKIFPALFALYYEDCLPEHFTVFGYARSKMSDEELRNMISLTLTCRIDQRENCSDKMEQFLKRCFYQSGQYNSEEGFSELDRKLKEKEAGKVPNRLFYLSIPPNIFVDVVRSASRTASSQDGWTRFIVEKPFGRDSESSGELTRNLKKYLAEEQIFRIDHYLGKELVENLSVLRFSNLVFEPLWSRNYIRNVQLIFSEDFGTEGRGGHFDNYGIIRDIMQNHLLQILALFAMETPVSLDAEDIRNEKVKVLRSMRQLRLEDVVVGQYKGHSKGGKTYPAYVDDPTVPSGSITPTFAAAALFIDNARWDGVPFLMKAGKALHTRRAEIRVQFRRVPGNLYGRRSRSVGGGGTTATRELEKATNELVLRVQPDEAIYLKINSKVPGLGMRLDSSDLNLLYSERYPAEIPDAYERLLLDAIEGERRLFIRSDELDAAWAIFTPVLADLEANKVAPELYPYGSRGPVGAHYLAANHNVRWGDIS

SEQ ID NO: 9882 - DNA, 1449 bp, Lactobacillus johnsonii; identical to SEQ ID NO: 2681
  CDS (1)..(1449)

SEQ ID NO: 9883 - protein, 482 aa, Lactobacillus johnsonii; identical to SEQ ID NO: 2682

SEQ ID NO: 9884 - DNA, 1485 bp, Bacillus cereus; identical to SEQ ID NO: 2673
  CDS (1)..(1485)

SEQ ID NO: 9885 - protein, 494 aa, Bacillus cereus; identical to SEQ ID NO: 2674

SEQ ID NO: 9886 - DNA, 1539 bp, Ashbya gossypii; identical to SEQ ID NO: 2683
  CDS (1)..(1539)

SEQ ID NO: 9887 - protein, 512 aa, Ashbya gossypii; identical to SEQ ID NO: 2684

SEQ ID NO: 9888 - DNA, 2074 bp, Oryza sativa
  CDS (138)..(1904)
gcggctagactttcgtcgatatccccgataaaatccacccgtctcccctcctccccactcgccttcgcctccatcctcctcctcctcctgccggcttgcatccgctcttccttcctccaggaggaaggcatacaggcatggcgctctcctgcatgaggtgctccccggccgccggcgccgtacgacgaggattggcatcggcggctccgccggcggcgctctccttcgccagatgcggcctccgtagagcggccgcgctcgggtggcgcgtcgccgccgtcaccactacgggagtgcagggtgccaaggatgctggtctggagaaggctgccagaagtgcttcccaatcaaaggtggaaaatggctcaccttcagaaatcattttagatgattttgaagacttgagccctctatcagaaaatgatgactccactgttagtatcactgtagtcggagcatctggtgaccttgccaagaagaagatatttcctgcactttttgctctatactatgaagattgtcttccaaagcatttcactatcttcggatatgcacgcagcaagatgacagatgctgaattgagaaacatggtcagcaaaacactgacatgcagaatagataaaagggaaaactgtaatgagaagatggaagagtttttaaagagatgcttctatcattcaggccaatatgattcagaggagcatttcatggaccttgacaagaagctgaaacaacatgagggttccagagtttctaaccgtcttttctacttgtcaataccaccaaatatattccttgatgttgtaaaatgtgcaagcaaatcagcatcatctgggaatggttggacaagggtaattgttgagaaaccttttggtcgtgactcagattcatcttctgcattaacaaggggtctgaagcagtacctggtagaggaccaaatcttcaggattgaccactacttgggaaaggaactagtggagaacctgtctgtccttcgcttctcaaatcttgtttttgaacctctatggtcaaggcagtatataaggaatgtgcagctgatattctcagaggatttcggcactgaaggacgaggagggtactttgataggtatggtattatccgtgacataatgcagaatcatcttcttcagatactagccctatttgcaatggaaactcctgttagcttggaggcagaggacataagaaacgaaaaggttaaagttctgcgttccatgaagcccctgcaactggaagatgtggtgataggacagtacaaaagtcatacaaagggtggtaccacataccctggatacactgaagataagacggtgcccaaggatagtgtaaccccaacatttgctgcagctgcacttttcataaataatgctagatgggatggagttccttttcttatgaaagctgggaaggctttacatacaaagggggctgagattagagtacagttccgacatgttcctggtaatctttataagaggagttttgggactgatcttgatacagccactaatgaacttgtcatacgtgtgcaacctgatgaagctatctacttgaagattaacaacaaaattcctggtcttggtatgagactagatagaagtaatttgaatcttcactatgcagcaaggtactccaaggagataccagatgcttatgagaggctcttacttgatgccattgaaggagagcgaaggctttttatccgttctgatgagttggatgccgcatgggagctcttcactcccttactcaaggagctggaagagaagcggatagcccctgagctatacccttatggaagccgcggtcctgtaggggctcactaccttgcagcaaagtacaacgtcagatggggtgatttgaccacagaacagaaggcatgagacagatgatatctattttcgctccttttttttcttttgccattgcatttctgtaagattgcatgctcagttagtgggacagatggaaaataaggcaatcagttagcttaggttgcaaggcctgtaaccattagactataaatagctttgtggtatattcactattgggt

SEQ ID NO: 9889 - protein, 588 aa, Oryza sativa
MALSCMRCSPAAGAVRRGLASAAPPAALSFARCGLRRAAALGWRVAAVTTTGVQGAKDAGLEKAARSASQSKVENGSPSEIILDDFEDLSPLSENDDSTVSITVVGASGDLAKKKIFPALFALYYEDCLPKHFTIFGYARSKMTDAELRNMVSKTLTCRIDKRENCNEKMEEFLKRCFYHSGQYDSEEHFMDLDKKLKQHEGSRVSNRLFYLSIPPNIFLDVVKCASKSASSGNGWTRVIVEKPFGRDSDSSSALTRGLKQYLVEDQIFRIDHYLGKELVENLSVLRFSNLVFEPLWSRQYIRNVQLIFSEDFGTEGRGGYFDRYGIIRDIMQNHLLQILALFAMETPVSLEAEDIRNEKVKVLRSMKPLQLEDVVIGQYKSHTKGGTTYPGYTEDKTVPKDSVTPTFAAAALFINNARWDGVPFLMKAGKALHTKGAEIRVQFRHVPGNLYKRSFGTDLDTATNELVIRVQPDEAIYLKINNKIPGLGMRLDRSNLNLHYAARYSKEIPDAYERLLLDAIEGERRLFIRSDELDAAWELFTPLLKELEEKRIAPELYPYGSRGPVGAHYLAAKYNVRWGDLTTEQKA

SEQ ID NO: 9890 - DNA, 1900 bp, Gluconobacter oxydans
  CDS (301)..(1767)
ttttgctttctgcatccatgtccggtttccttcctgaggcgtaagtcttggctgtattttccggcgctgcacgaacacagcatccgccgcgcggcttatcgtgatgagggccagacggtcaacggaattatgtgcacgtttcatgaacgcgtgaagatgacgaagcttttctcccgaggtcgtgcagggcccgtcccttgacaggaagggccctgacagggaactagacggtgcctgaaaaggcctgaaccctaacccttttttcccggtctgcgggttcgagaggtcagagagtcttccatggaacatttccagcaggtcgagcctttcgactatgtcatcttcggtgccactggcgatctcacgatgcgcaagctgctgcccgcgctctacaaccgccttcggatgggccagattccggatgatgcgtgcatcatcggagccgcccgtacggagctggaccgggaggcctatgtcgcgcgggcccgagacgcccttgagcggtttcttccctcagacatcctgggcccggggctggtcgagcgtttcctcgcccgtctcgattacgtgacgctggacagcagccgcgagggcccgcagtgggacgccctgaagtccctgctggccaaggcacagcctgaccgggtgcgcgtctatatttcgcaaccgcaccgcagcttacggcagcatctgcgagacctgaaccgctacgagctgatcacccccacgtcgcgggttgttctcgaaaagccgatcggtacgaacatggccaccgccaccgccatcaatgacggggtcggccagtattttccggaaaagcagatctaccggatcgatcattatctcgggaaagagacggtccagaacgttctcgccctgcgttttgcaaacccgctcatgaacgctgcctggtccggcgagcatatcgagagcgtgcagatcacggcggtcgagaccgtgggcgtcgaaggtcgtgcggcctattacgacacgtctggcgcgcttcgcgacatgatccagaaccacctgctccaggtactgtgtctggttgcgatggaagcccccgattcccttgaggccgatgccgtccgcaacgccaaactggccgtcctgaacgccctgcgccccatcacggatgccacagccgccaccgagacggtgcgcgcgcagtacacggcaggcgtggtcgatggcgagaatgttccgggttatcttgaagagctcggcaagcccagcgcgacggaaacctatgccgcaatccgcgcctgggtggacacgccgcgctggaagaacgtgccgttctacatccgcacggccaagcggtccggcaagaaggtcagcgagatcgtcgtgacgttccgcccggctgcgaccaccatgttcggcgccaccccggccagcaacaggctggtcctgcgcatccagcccaacgaaggcgtggacctgcgtctgaacgtcaagaaccctgcgctggatgtcttcaacctgcggacggcggatcttgatacctccatccgcatggaaggcggcctgcccttcccggattcctatgagcggcttcttctggatgccgtgcggggtgatccggtactgttcatccgccgcgacgaggtcgaggccgcatggcgctgggtcgagcccatccttgaggcctggaaacatgacaaggcgcccatgcagacctacagtgcgggttcctatgggccggaacaggcaacacaactgctcgccagccatggcgacacctggcatgaagcgtcggagtaaccgcatttgagcgacgataaaagcgcaacgccccgcctgggtcgcactccgggccggggcacgcgccggcagccccgcagcttcaaacagctccttctgcggcggcttctggtcgtcatcccggcttttctgc

SEQ ID NO: 9891 - protein, 488 aa, Gluconobacter oxydans; identical to SEQ ID NO: 2688

SEQ ID NO: 9892 - DNA, 1515 bp, Rhodopseudomonas palustris; identical to SEQ ID NO: 2663
  CDS (1)..(1515)

SEQ ID NO: 9893 - protein, 504 aa, Rhodopseudomonas palustris; identical to SEQ ID NO: 2664

SEQ ID NO: 9894 - DNA, 1650 bp, Corynebacterium diphtheriae; identical to SEQ ID NO: 2665
  CDS (1)..(1650)

SEQ ID NO: 9895 - protein, 549 aa, Corynebacterium diphtheriae; identical to SEQ ID NO: 2666

SEQ ID NO: 9896 - DNA, 1602 bp, Nonomuraea sp; identical to SEQ ID NO: 2669
  CDS (1)..(1602)

SEQ ID NO: 9897 - protein, 533 aa, Nonomuraea sp; identical to SEQ ID NO: 2670

SEQ ID NO: 9898 - DNA, 1551 bp, Parachlamydia sp; identical to SEQ ID NO: 2661
  CDS (1)..(1551)

SEQ ID NO: 9899 - protein, 516 aa, Parachlamydia sp; identical to SEQ ID NO: 2662

SEQ ID NO: 9900 - DNA, 1500 bp, Photobacterium profundum; identical to SEQ ID NO: 2659
  CDS (1)..(1500)

SEQ ID NO: 9901 - protein, 499 aa, Photobacterium profundum; identical to SEQ ID NO: 2660

SEQ ID NO: 9902 - DNA, 26 bp, Artificial sequence
  Primer sequence
atgaaggataaagtgtataagcgtcc

SEQ ID NO: 9903 - DNA, 27 bp, Artificial sequence
  Primer sequence
ttaggcagcgttaattacaaactgttc

SEQ ID NO: 9904 - DNA, 1212 bp, Escherichia coli K12
  CDS (1)..(1212)
atgaaaaacagaaccctgggaagtgtttttatcgtggcgggaaccacaattggcgcaggcatgctggcaatgccgctggctgcggccggtgttggttttagcgttacgttaatcttgttgattgggctttgggcgttgatgtgctacacggcgctattactgctggaggtgtaccagcatgttccggcagataccggtctgggcacgctggcaaaacgctatctgggacgctacggtcaatggctgacgggcttcagtatgatgttcttaatgtatgctctgactgcggcatacatcagcggtgccggtgaattgttggcctccagcatcagcgactggacaggtatttctatgtcggcaaccgctggcgtgctgttgttcacttttgttgccggtggcgtggtttgtgtcggaacttcactggtcgatttatttaaccgttttctgttcagcgccaagattatttttctggtggtaatgctggtactactgctgccgcatattcacaaagtgaatcttttaaccctgccgttgcaacaggggctggctctgtctgcaatcccggtgatttttacgtcgtttggttttcacggtagcgtgccgagtattgtcagctatatggatggcaacattcgtaagctacgctgggtgtttataatcggtagtgcgatccccctggtggcatatattttctggcaggtggcgacgcttggcagcattgattcaacaacctttatgggattgctggctaatcatgctggattaaacgggctgttacaggcgttacgcgaaatggtggcctctccgcatgttgagctggcagtgcatttatttgctgatttagccctcgccacgtcatttctcggcgttgcgttaggcttatttgattatctggctgatttatttcagcgttcaaataccgttggtggacggttgcaaactggtgcaattacgtttctgccgccgttggcgtttgcactgttttatccacgaggatttgtgatggcgctgggttacgccggtgtggcgctggcggtactggcattgattatcccttcgctgttgacctggcaaagcagaaagcacaatcctcaggcgggttaccgggtcaaaggtggtcgtccggcgctggtggtggtgtttctctgtggtattgctgtgattggcgtgcaatttttgattgcggcagggttgttaccagaagtggggtga

SEQ ID NO: 9905 - protein, 403 aa, Escherichia coli K12
MKNRTLGSVFIVAGTTIGAGMLAMPLAAAGVGFSVTLILLIGLWALMCYTALLLLEVYQHVPADTGLGTLAKRYLGRYGQWLTGFSMMFLMYALTAAYISGAGELLASSISDWTGISMSATAGVLLFTFVAGGVVCVGTSLVDLFNRFLFSAKIIFLVVMLVLLLPHIHKVNLLTLPLQQGLALSAIPVIFTSFGFHGSVPSIVSYMDGNIRKLRWVFIIGSAIPLVAYIFWQVATLGSIDSTTFMGLLANHAGLNGLLQALREMVASPHVELAVHLFADLALATSFLGVALGLFDYLADLFQRSNTVGGRLQTGAITFLPPLAFALFYPRGFVMALGYAGVALAVLALIIPSLLTWQSRKHNPQAGYRVKGGRPALVVVFLCGIAVIGVQFLIAAGLLPEVG

SEQ ID NO: 9906 - DNA, 1245 bp, Escherichia coli
  CDS (1)..(1245)
atggcaacactaaccaccacccaaacgtcaccgtcgctgcttggcggcgtggtgattatcggcggcaccattattggcgcagggatgttttctctgccagtggtcatgtccggggcgtggtttttctggtcaatggcggcgctgatctttacctggttctgtatgctgcattccggcttgatgattctggaagctaacctgaattacagaatcggttcgagttttgacaccatcaccaaagatttgctgggcaaaggctggaacgtggtcaacggcatttccattgcctttgtgctctatatcctgacctatgcctatatttctgccagtggttcgattctgcatcacaccttcgcagagatgtcactaaacgtcccggcacgggcggcgggttttggttttgcattgctggtagcgtttgtggtgtggttgagcactaaagccgtcagtcgcatgacagcgattgtgctgggggcgaaagtcattaccttcttcctcacctttggtagcctgctggggcatgtgcagcctgcgacattgttcaacgtcgccgaaagcaatgcgtcttatgcaccgtatctgttgatgaccctgccgttctgtctggcatcgtttggttatcacggtaacgtgccaagcctgatgaagtattacggcaaagatccgaaaaccatcgtgaaatgtctggtgtacggtacgctgatggcgctggcgctgtataccatctggttgctggcgacgatgggtaacatcccgcgtccggagtttatcggtattgcagagaagggcggtaatattgatgtgctggtacaggcgttaagcggcgtactgaacagccgtagtctggatctgctgctggtcgtgttctcaaactttgcggtagcgagttcgttcctcggcgtaacgctgggtttgtttgactatctggcagatctgtttggtttcgacgactcggctgtgggccgcttgaaaacggcattgctgacctttgccccgccagttgtgggggggctgttgttcccgaacggattcctgtacgccattggttatgctggtttagcggctaccatctgggcggcaattgttccggcgctgttagcccgtgcatcgcgtaaacgctttggcagcccgaaattccgcgtctggggtggcaagccgatgattgcgctgattctggtgtttggcgtcggcaacgcactggtgcatattttatcgagctttaatttactgccggtgtatcagtaa

SEQ ID NO: 9907 - protein, 414 aa, Escherichia coli
MATLTTTQTSPSLLGGVVIIGGTIIGAGMFSLPVVMSGAWFFWSMAALIFTWFCMLHSGLMILEANLNYRIGSSFDTITKDLLGKGWNVVNGISIAFVLYILTYAYISASGSILHHTFAEMSLNVPARAAGFGFALLVAFVVWLSTKAVSRMTAIVLGAKVITFFLTFGSLLGHVQPATLFNVAESNASYAPYLLMTLPFCLASFGYHGNVPSLMKYYGKDPKTIVKCLVYGTLMALALYTIWLLATMGNIPRPEFIGIAEKGGNIDVLVQALSGVLNSRSLDLLLVVFSNFAVASSFLGVTLGLFDYLADLFGFDDSAVGRLKTALLTFAPPVVGGLLFPNGFLYAIGYAGLAATIWAAIVPALLARASRKRFGSPKFRVWGGKPMIALILVFGVGNALVHILSSFNLLPVYQ

SEQ ID NO: 9908 - DNA, 1248 bp, Escherichia coli
  CDS (1)..(1248)
atgactgatcaagctgaaaaaaagcactctgcattttggggtgttatggttatagcaggtacagtaattggtggaggtatgtttgctttacctgttgatcttgccggtgcctggtttttctggggtgcctttatccttatcattgcctggttttcaatgcttcattccgggttattgttattagaagcaaatttaaattatcccgtcggctccagttttaacaccatcaccaaagatttaatcggtaacacctggaacattatcagcggtattaccgttgccttcgttctctatatcctcacttatgcctatatctctgctaatggtgcgatcattagtgaaacgatatcaatgaatttgggttatcacgctaatccacgtattgtcgggatctgcacagccattttcgttgccagcgtattgtggttaagttcgttagccgccagtcgtattacctcattgttcctcgggctgaagattatctcctttgtgatcgtgtttggttcttttttcttccaggtcgattactccattctgcgcgacgccaccagctccactgcgggaacgtcttacttcccgtatatctttatggctttgccggtgtgtctggcgtcatttggtttccacggcaatattcccagcctgattatttgctatggaaaacgcaaagataagttaatcaaaagcgtggtatttggttcgctgctggcgctggtgatttatctcttctggctctattgcaccatggggaatattccgcgagaaagctttaaggcgattatctcctcaggcggcaacgttgattcgctggtgaaatcgttcctcggcaccaaacagcacggcattatcgagttttgcctgctggtgttctctaacttagctgttgccagttcgttctttggtgtcacgctggggttgttcgattatctggcggacctgtttaagattgataactcccacggcgggcgtttcaaaaccgtgctgttaaccttcctgccacctgcgttgttgtatctgatcttcccgaacggctttatttacgggatcggcggtgccgggctgtgcgccaccatctgggcggtcattattcccgcagtgcttgcaatcaaagctcgcaagaagtttcccaatcagatgttcacggtctggggcggcaatcttattccggcgattgtcattctctttggtataaccgtgattttgtgctggttcggcaacgtctttaacgtgttacctaaatttggctaa

SEQ ID NO: 9909 - protein, 415 aa, Escherichia coli
MTDQAEKKHSAFWGVMVIAGTVIGGGMFALPVDLAGAWFFWGAFILIIAWFSMLHSGLLLLEANLNYPVGSSFNTITKDLIGNTWNIISGITVAFVLYILTYAYISANGAIISETISMNLGYHANPRIVGICTAIFVASVLWLSSLAASRITSLFLGLKIISFVIVFGSFFFQVDYSILRDATSSTAGTSYFPYIFMALPVCLASFGFHGNIPSLIICYGKRKDKLIKSVVFGSLLALVIYLFWLYCTMGNIPRESFKAIISSGGNVDSLVKSFLGTKQHGIIEFCLLVFSNLAVASSFFGVTLGLFDYLADLFKIDNSHGGRFKTVLLTFLPPALLYLIFPNGFIYGIGGAGLCATIWAVIIPAVLAIKARKKFPNQMFTVWGGNLIPAIVILFGITVILCWFGNVFNVLPKFG

SEQ ID NO: 9910 - DNA, 1233 bp, Pseudomonas aeruginosa
  CDS (1)..(1233)
atgggtatgcgagaagcgaacgacaacgcatcgggcctcaaggcccatcccctgggctcgctcgagacgatcgcgatcatcatcggcaccaacatcggcgccggcgtgctgagcatggcctacgccgcccgcaaggtcggctacgtgccgttgctggtatgcctggccctgacctgcctcttctgcatcgtcaccatgctctacgtgaccgaagcctgcctgagaacccgcggcaacaaccagctcagcggcctctcccggcgttacctgggcccgctcggcggctggctgatcttcatcgcggtggcggccaacagctacggggccctggtcgcctacatgaccggcagcggcaacatcatgctcgagttcttcggccagtacggcctcacgcgccaggtcggcagcctgatcttcttcgtcccctcggcgctggtgctctacctgggcctgaaggcgctcggcgtgggcgagaagctgatcagcgccggcatggtggccatcgtctgcatcctcatcggcgctaccctgatgcacgacgacgcccgtctcgcccacctttggcagagccagtggcaatacgtggttccagtgttcaacctggcggtcttcgtgttcggcgcgcagttcctggttccggagctggtgcgcggcaacctggcaacccccgggcgcgtgccgcgcctgatcgtggtcggcatgctgctgaccttcctgctggtggcggccattcctgcctcggtcatcgccctggtcggccccgacaacctcagcgaggtggcgaccttgagctggggacgctccctcggccaatgggcctactacgtggcgaacaccttcgccttgctggcgatgctgacctcctactggggactcggcgggtgcctgttcaccaatatcttcgaccacttccgcctgggcagcgaaaccaaccggcgcaaacgcctggcggtgctcgccgcggtctcggtcccgccgttcctgctggcctatgcggggctcggcggcttcgtgaacgcgctgtacttcgccggtaccttcggcggcgtactgatgggcatcatccccatcctcctgctcaacgcggcgcggcgccacggcgaccaactgccggcattcagctgcggctggtatgcccatccgctgatacaggggctgatcgtcctggtgttcgcctccagcggggtctacgcgatcgcctcggcactggggatgctgcccgccagttggtga

SEQ ID NO: 9911 - protein, 410 aa, Pseudomonas aeruginosa
MGMREANDNASGLKAHPLGSLETIAIIIGTNIGAGVLSMAYAARKVGYVPLLVCLALTCLFCIVTMLYVTEACLRTRGNNQLSGLSRRYLGPLGGWLIFIAVAANSYGALVAYMTGSGNIMLEFFGQYGLTRQVGSLIFFVPSALVLYLGLKALGVGEKLISAGMVAIVCILIGATLMHDDARLAHLWQSQWQYVVPVFNLAVFVFGAQFLVPELVRGNLATPGRVPRLIVVGMLLTFLLVAAIPASVIALVGPDNLSEVATLSWGRSLGQWAYYVANTFALLAMLTSYWGLGGCLFTNIFDHFRLGSETNRRKRLAVLAAVSVPPFLLAYAGLGGFVNALYFAGTFGGVLMGIIPILLLNAARRHGDQLPAFSCGWYAHPLIQGLIVLVFASSGVYAIASALGMLPASW

SEQ ID NO: 9912 - DNA, 1209 bp, Yersinia pestis
  CDS (1)..(1209)
atgaagaatcgcactctgggcagtatatttatcgttgcaggtaccaccattggtgcgggcatgttggccatgccactggcggcggccggcgtagggtttggcgtcacactggccttgcttgtttctctttggttattaatgtgttacaccgcattattgctggtggaagtttatcaatatgaagcggctgataccgggcttggtacattagccaaacgttacctcggtggccatggtcaatggctgacgggttttagtatgatgtttctgatgtatgcgcttactgcggcttatatcagtggtgctggcgagttattggcaaccagtatcagccaatggactcagcaatcattcccgacctatctcggcgttttactgtttaccctagtcgccggaggagtggtttgcatcggtacccattcggtcgatttgttcaatcgtatcctgttcagtgccaaaatcattttcctgatcgtaatgctggcactgatgatgccgcatatcgaaaaaaccaacctactgacattgccgctagagcaagggctagcactctctgcgatcccggtaatttttacgtcattcggtttccacggcagcgtacccagcattgttaattatatgggcggtaatatccgtaaactgcgctgggtatttatcatcggcagtgcgataccgcttatcgcttatatcttctggcaattagcgacactgggggcgatttcctctcatacttttgtcggtattctggcccagcaagcgggtttgaacggtttactccaggctgtgcgcgacgtcgtggcctctccccatgtcgaactggcggtgcatttgtttgctgatctggcactggcaacctcattcctgggggtagcattagggctatttgactatttggctgatttatttaaacgccgaaattccatacgtggtcgtttacaaacggggttaattacctttacgccgccattactgtttgcgctgttttatccgcgtggctttattatggcgttgggttttgccgctgtggcattgtcagtattggcattaattctgcctgcaatgttagcgtggaaagcccgtaaacttcatcagggcaaatatcaggtttggggtgggagacccgcgctggcaatcgtgtttgcctgtggtgttaccgtgattggtattcagattggtattgtcactggcgcattacctgcggtagggtga

SEQ ID NO: 9913 - protein, 402 aa, Yersinia pestis
MKNRTLGSIFIVAGTTIGAGMLAMPLAAAGVGFGVTLALLVSLWLLMCYTALLLVEVYQYEAADTGLGTLAKRYLGGHGQWLTGFSMMFLMYALTAAYISGAGELLATSISQWTQQSFPTYLGVLLFTLVAGGVVCIGTHSVDLFNRILFSAKIIFLIVMLALMMPHIEKTNLLTLPLEQGLALSAIPVIFTSFGFHGSVPSIVNYMGGNIRKLRWVFIIGSAIPLIAYIFWQLATLGAISSHTFVGILAQQAGLNGLLQAVRDVVASPHVELAVHLFADLALATSFLGVALGLFDYLADLFKRRNSIRGRLQTGLITFTPPLLFALFYPRGFIMALGFAAVALSVLALILPAMLAWKARKLHQGKYQVWGGRPALAIVFACGVTVIGIQIGIVTGALPAVG

SEQ ID NO: 9914 - DNA, 1212 bp, Salmonella enterica subsp. enterica serovar Typhi
  CDS (1)..(1212)
atgaaaaacagaactctgggcagtatttttatcgtggcaggcaccactatcggcgccgggatgctggcaatgccgctggcagcggctggcgttggtttcagcgtcacgctgggattgttgattggtctgtgggcgctgatgtgttataccgcgctactattactggaagtatatcaacatgttccggcggataccgggctgggctcgttggcaaaacgctatcttggacgttacggacagtggcttacgggattcagcatgatgttcttaatgtatgcgctcaccgccgcctacatttccggagccggagaattactggcatccagtattaataactggcttggcgccacgctctcgcccgctgccggggtgctgctgttcacctttgttgccggtggggtggtgtgtgtgggcacctcgctggtcgacctttttaaccgcttcctgtttagcgcgaagatcatttttctggtcatcatgcttgcgttgctcacgccacatattcataaagtaaatcttcttacgcttcctttacagcaggggctggcattgtccgccataccggtcattttcacctcgtttggttttcacggaagcgtaccgagtattgtgagttatatgaacggcaacattcgccggctgcgttgggtctttatgacgggtagcgccattccgctagtggcctatattttttggcagctcgccacgctgggaagtatcgactcgccgacattcagagggctactggccagccatgccgggttaaatggcctgctgcaggcgctcagagaagtggtcgcttcgccacatgtcgaactggcggtccacctgttcgccgatctggcgctggcgacctcttttctgggcgtagcgctaggattatttgattacctggccgatctattccagcgccgcagtacggtgtccggacgcctgcaaaccgggctgattacctttctgccgccgctggcgtttgcgcttttctacccacgtggatttgtgatggcattaggctatgccggcgtagcgctggcagtgctggcactactcatccctgccatgctggtctggcaatgccgtaaacagagccctcaggcgggatatcgtgtggcaggcggcacgccagcgctggcgctggtgtttatctgcggcattgtcgtgattggcgtccagttttcgatcgcactggggttcctgcccgatccaggttaa

SEQ ID NO: 9915 - protein, 403 aa, Salmonella enterica subsp. enterica serovar Typhi
MKNRTLGSIFIVAGTTIGAGMLAMPLAAAGVGFSVTLGLLIGLWALMCYTALLLLEVYQHVPADTGLGSLAKRYLGRYGQWLTGFSMMFLMYALTAAYISGAGELLASSINNWLGATLSPAAGVLLFTFVAGGVVCVGTSLVDLFNRFLFSAKIIFLVIMLALLTPHIHKVNLLTLPLQQGLALSAIPVIFTSFGFHGSVPSIVSYMNGNIRRLRWVFMTGSAIPLVAYIFWQLATLGSIDSPTFRGLLASHAGLNGLLQALREVVASPHVELAVHLFADLALATSFLGVALGLFDYLADLFQRRSTVSGRLQTGLITFLPPLAFALFYPRGFVMALGYAGVALAVLALLIPAMLVWQCRKQSPQAGYRVAGGTPALALVFICGIVVIGVQFSIALGFLPDPG

SEQ ID NO: 9916 - DNA, 1245 bp, Yersinia pestis
  CDS (1)..(1245)
atgtcgatggccttatcccaaccgttgtcacggccttccgttttgggtggcgcgatgattgtcgcaggtaccgcagtgggtgcgggcatgttctcaatcccaatcgtgacagccggggtatggttcagcggctcagtggtgctgctgatctacacctgggcatgtatgttagtgtccgggctgatgattctggaagctaacctgaactacccaagtggcgccagtttccacaccatggtgcaagacctgctaggcaaggtgtggagctcaattaacgggctgtccattacctttgtgctctacattctgacctacgcctatatctccgccggtggttcgatcatcgcccatacgctgcaaaacgtagccggaattggccagaccagcgcaggctttatctttgcacttttggtggcctttatcgtgtggttatccacccgagcagtggatcgcctcagtacaatattaatcggcggcatggttatcacatttgtcatgtctgtcggtgatatgttcagccatgtagaaagtgcggtgttgtttaatcagacagacagtaatgcccactatctgccctatgcactggcggcattgccttatttgctgacctcttttggctaccacggcaatgtgccgggcctggtgaagtactacaacaaagacagcaaagccgttgtgcgcagcctgctgtacggaacattgattgccttggtgatttatctcctttggcagtatgccattcagggcaatatcgcccgggatgctttcaaacaggttattgccgatggcggtaatatcggcaatctattgcaacaaatggacaccgtttctgccagtaaagccaccagccagctactcaatgccttctcttatatggcactggccagttcgttccttggcgtgtcgctcgggttgtttgattatatttctgatttatttgactttaccgatgaccgcagcgggcgaactaaatcagcattaatgacctttgtccctccgactctcggtgccctgctgttcccggatggcttcttatatgccattggctttgcggggttagccgccaccatttgggcggttattgtgcccgcattaatggcgcgagccagccgtaaacgcttcccacaagcccgttaccgtgctcccggaggccgttttatgattggttttattatcctgtttggcctggtcaatgcggtagcccatatttcagccttgttcggcctattgccggtttatcaatag

SEQ ID NO: 9917 - protein, 414 aa, Yersinia pestis
MSMALSQPLSRPSVLGGAMIVAGTAVGAGMFSIPIVTAGVWFSGSVVLLIYTWACMLVSGLMILEANLNYPSGASFHTMVQDLLGKVWSSINGLSITFVLYILTYAYISAGGSIIAHTLQNVAGIGQTSAGFIFALLVAFIVWLSTRAVDRLSTILIGGMVITFVMSVGDMFSHVESAVLFNQTDSNAHYLPYALAALPYLLTSFGYHGNVPGLVKYYNKDSKAVVRSLLYGTLIALVIYLLWQYAIQGNIARDAFKQVIADGGNIGNLLQQMDTVSASKATSQLLNAFSYMALASSFLGVSLGLFDYISDLFDFTDDRSGRTKSALMTFVPPTLGALLFPDGFLYAIGFAGLAATIWAVIVPALMARASRKRFPQARYRAPGGRFMIGFIILFGLVNAVAHISALFGLLPVYQ

SEQ ID NO: 9918 - DNA, 1245 bp, Salmonella enterica subsp. enterica serovar Typhi
  CDS (1)..(1245)
atggcaacacttaccaccacccaaacgtcaccttcgctgcttggcggcgtggtgattatcggcggcaccatcattggcgcggggatgttctccctgccggtggtcatgtccggggcgtggttcttctggtcgatggcggcgctggtctttacctggttttgtatgctgcactccgggctgatgatcctcgaagctaaccttaactaccgcattggttcgagtttcgacaccatcaccaaagatctgttggggaaaggctggaacgtggtaaatggcatctctattgcctttgtgctctacatcctgacttacgcctatatctcggcgagcggctcaattctgcatcatacctttgctgagatgtcgctgaacgttccggcgcgagcggcaggttttgcctttgcgctgctggtggcgtttgtcgtgtggctgagtacgaaggcggtcagccggatgacggcgattgtgctgggcgcgaaagtgattactttcttcctgaccttcggcagcctgttagggcacgttcagccgaccacgttgtttaacgtggctgaaagccacgcgtcatatacgccgtacctgctgatgacgctgccattttgtctggcctcttttggttatcacggtaacgtaccgagcctgatgaaatattacggcaaagatccgcgcaccatcgtgaaatgcctgatttatgggacgttactggcgctggcgctctattccgtctggctgctggggacgatgggcaacatcccacgtccggaatttatcggcattgcgcagaaaggcggcaatattgatgtgctggtacaggcgttgagcggcgtgctgaacagccgcagcctggatctgctgctggtggtgttctctaactttgcggtcgccagttccttccttggcgtgacgctggggctgtttgactatctggcggatctgtttggttttgatgactcggcaatgggacgttttaaaacggcgctgctgactttcctgccgccgatgattggtggcctgctgtacccgaacggttttctgtacgccattggctatgcaggtttagctgcaactatctgggcggccattgtgcctgcgctgttggcgcgcaaatctcgcgaacgtttcggcagcccaaaatttcgcgtctggggcggtaaaccgatgattgccctgattctggtcttcggtgtcggcaacgcggttatccatattctgtcgagctttaatttgctgccggtgtaccagtaa

SEQ ID NO: 9919 - protein, 414 aa, Salmonella enterica subsp. enterica serovar Typhi
MATLTTTQTSPSLLGGVVIIGGTIIGAGMFSLPVVMSGAWFFWSMAALVFTWFCMLHSGLMILEANLNYRIGSSFDTITKDLLGKGWNVVNGISIAFVLYILTYAYISASGSILHHTFAEMSLNVPARAAGFAFALLVAFVVWLSTKAVSRMTAIVLGAKVITFFLTFGSLLGHVQPTTLFNVAESHASYTPYLLMTLPFCLASFGYHGNVPSLMKYYGKDPRTIVKCLIYGTLLALALYSVWLLGTMGNIPRPEFIGIAQKGGNIDVLVQALSGVLNSRSLDLLLVVFSNFAVASSFLGVTLGLFDYLADLFGFDDSAMGRFKTALLTFLPPMIGGLLYPNGFLYAIGYAGLAATIWAAIVPALLARKSRERFGSPKFRVWGGKPMIALILVFGVGNAVIHILSSFNLLPVYQ

SEQ ID NO: 9920 - DNA, 1203 bp, Haemophilus influenzae
  CDS (1)..(1203)
atgaacaaaactgtaggcagcacacttcttgttgctggtacgatgattggcgcgggaatgttggctatgccactcacttccgctggcattggcttcggctttactttagtcttgttattggggctttgggcattattaacttttagcgcacttttattcgttgaactctatcaaactgcggaaagtgatgcaggtatcggcacacttgcagaacaatattttggtaaaacaggacgcattattgccacagccgtgctaattattttcttatacgcattaattgccgcttatatcagcggtggcggttcactactaaaagatttattaccagaaagttttggcgataaagttagcgtcttattatttaccgtgattttcggttcatttattgtcatcggcacacatagcgtagataaaattaatcgcgtgttatttttcgttatgcttgctgcctttgccgtggtgttaagcttaatgttgccagaaatcaaatttgataacttaatggcgacgccaattgataaggctttaattatctctgcaagccctgtatttttcacggcatttggtttccacggttccattccaagtttaaataaatacttagatggcaatgtaaaagcattgcgcttctctattttggtcggctctgccataacactttgtgcttatattctatggcaactatccacgcacggcttgcttacacaaaatgaatttttacaaatcttaaaagaagatgcgactttaaatggcttagtaaaagcaaccttcgccatcactggaagcaatgtgatcgcaagtgcggtaaaattattttctacattagcacttatcacttctttcttaggtgtgggattaggattattagaatgtattgaagatttactaaaacgttcatttaacgttacagcaggtagaatttcacttggtttactgacttttattccaccacttgtttttgcattattttacccagaaggttttattttagcactaggctacgcaggtcaaatgtttgcattctacgccgtagtattgccagttagccttgtttggaaagctcgtcgtgcccacgctaatttgccatacaaagtgtggggaggaaatctgactttaattatcgtattggtattaggcgtgctcattacatccattccatttgcgattcgtgcgggttatttaccctttgttgtaggttaa

SEQ ID NO: 9921 - protein, 400 aa, Haemophilus influenzae
MNKTVGSTLLVAGTMIGAGMLAMPLTSAGIGFGFTLVLLLGLWALLTFSALLFVELYQTAESDAGIGTLAEQYFGKTGRIIATAVLIIFLYALIAAYISGGGSLLKDLLPESFGDKVSVLLFTVIFGSFIVIGTHSVDKINRVLFFVMLAAFAVVLSLMLPEIKFDNLMATPIDKALIISASPVFFTAFGFHGSIPSLNKYLDGNVKALRFSILVGSAITLCAYILWQLSTHGLLTQNEFLQILKEDATLNGLVKATFAITGSNVIASAVKLFSTLALITSFLGVGLGLLECIEDLLKRSFNVTAGRISLGLLTFIPPLVFALFYPEGFILALGYAGQMFAFYAVVLPVSLVWKARRAHANLPYKVWGGNLTLIIVLVLGVLITSIPFAIRAGYLPFVVG

SEQ ID NO: 9922 - DNA, 1254 bp, Proteus vulgaris
  CDS (1)..(1254)
atggaaaatacttcagtaaataaagaaccctcaattattgtagggggatttgttctgggtggtgctatgataggtgcaggtatgtttagcctgccaacaataatgtctggtgcttggtttataaactcactatttatattgtttattgtttgtttctttatgttccactcggggatatatattcttgaatgtatttctaaatatggcgcaggaacaaattactttgatatatccaaagagttattaccgaagtgggcttgttatattgccaatgcttcattgatctttgtattatatatattgatctatgcttatatctctgcggcgggttctattatctatgaagcatcactgttatatggtattaattttaatctgagagctatattttttatttttacgatagcccttggtgctacaatatggtggggtggcgcttgtgctagccgtttaacctcaattttcttattcattaagatagtattatttatattagcgttttcgggtttgttttttaaagcaaaaggtgatttattatttagtgcaacttttgcaggaaaaagccaattatatctttatccttttatttttattatcattccttatgccattacctcatttggatatcatggtaatgtttgtagtctttataagctttataatcaaaacgaaagaaaagtagttaagagttgtatcattggttgcttgttagcattagtcatctatttactttggatgattggcactatgggtaatttaccgagagaacaatttattactattatccaaaaaggcggtaacttagatgcctttattgattcactctatacggtattaaatagtaaatatattgaaggatttttattatggttctctattagtgctgttttttgctcttttttaggtgtcgcgataggtctttttgattatattttagcgtcattaaaatttaaagataataaaacagggcgattgaaatcaggtgtgctttgttttacacctccattgctattatgtctatttttccctaatggtttcttaattgctattgcgtatgcaggcactgctgcttgtgtatgggccattatttgtccggcagtaatggcactgaaagcacgacagaagtttcctaactcaggctttaaagtatggggtggtaaaaagctgatttatgcagttattgcttttggtgttgttggtattatttgtcaatcgtggcgcaatttaatttactgcctatttatcgttaaataa

SEQ ID NO: 9923 - protein, 417 aa, Proteus vulgaris
MENTSVNKEPSIIVGGFVLGGAMIGAGMFSLPTIMSGAWFINSLFILFIVCFFMFHSGIYILECISKYGAGTNYFDISKELLPKWACYIANASLIFVLYILIYAYISAAGSIIYEASLLYGINFNLRAIFFIFTIALGATIWWGGACASRLTSIFLFIKIVLFILAFSGLFFKAKGDLLFSATFAGKSQLYLYPFIFIIIPYAITSFGYHGNVCSLYKLYNQNERKVVKSCIIGCLLALVIYLLWMIGTMGNLPREQFITIIQKGGNLDAFIDSLYTVLNSKYIEGFLLWFSISAVFCSFLGVAIGLFDYILASLKFKDNKTGRLKSGVLCFTPPLLLCLFFPNGFLIAIAYAGTAACVWAIICPAVMALKARQKFPNSGFKVWGGKKLIYAVIAFGVVGIICQSWRNLIYCLFIVK

SEQ ID NO: 9924 - DNA, 1248 bp, Chlamydia trachomatis
  CDS (1)..(1248)
atggaatcgagaagtcgcaaatccatgcgactctctaaaaaaggtattctcatgataaacaaaatgttgggcggagccttgcttgtcgcaggaacaaccattggcgccggagtattagccgtccccgtttctacctcagaagggggattcctgcctacgacgttactctatattgtttcttggttcattgctgtggcttccgggtattgctttttggaagtattgacctggacacattcaagaaagaatgtaaatatggtctctatggcagagtatactttaggccataaaagcaagatcattatgtggttggtatacctactgctcttttattccctcttggtggcttatttttgtgatggtgggaatattctcatgcgagtcatgggatgtcgcagttgggatactccttggattcgacatgctatgcctgtagtattttttgctttgttttccccattattaatggcgaaaacatccattatcgatcaatgtaacagggttttcgtttttggcttaggaatcgcattcgctatgttttgctatttcggtttccctcttatgaaaacggatttgttagtaagatctgcttggggagctaccttaaaaggatttcccattttatttttggcatttggatttcaaaacgttgttcctacgttgtatcactacatggataagaacgtaaaagatgtgaagaaggccattgttattggaagttcgattcctttggttctgtacatcatttgggaagccattgtgttaggagccgttcctatttctttcttagaacaagcgaaagtagagggatggactgctattggagcattacaaacagctttgaaatgctcggctttttatgttgcaggggagttttttggattttttgctttgatttcctcatttattggcgtctctttgggtttaaaagacttttttatagatgcttttcaatgggatgagaaaaagcgtaaagtggaaatctttttcttagtttttgttttccctttggtgtgggctgttttctatccaggcattgttttgaaatgtttggagtgcaccggcgctttaggtgagacgatagttttaggagttttccccgtattgatggtatggaaagggcgctacggaaagaaacgttattacggtaaacgcattcttcctggcgggaaagggactctcttggttatgtcagggctagtgcttcttaacctggtgttgattgcccagaagtttctaggctattaa

SEQ ID NO: 9925 - protein, 415 aa, Chlamydia trachomatis
MESRSRKSMRLSKKGILMINKMLGGALLVAGTTIGAGVLAVPVSTSEGGFLPTTLLYIVSWFIAVASGYCFLEVLTWTHSRKNVNMVSMAEYTLGHKSKIIMWLVYLLLFYSLLVAYFCDGGNILMRVMGCRSWDTPWIRHAMPVVFFALFSPLLMAKTSIIDQCNRVFVFGLGIAFAMFCYFGFPLMKTDLLVRSAWGATLKGFPILFLAFGFQNVVPTLYHYMDKNVKDVKKAIVIGSSIPLVLYIIWEAIVLGAVPISFLEQAKVEGWTAIGALQTALKCSAFYVAGEFFGFFALISSFIGVSLGLKDFFIDAFQWDEKKRKVEIFFLVFVFPLVWAVFYPGIVLKCLECTGALGETIVLGVFPVLMVWKGRYGKKRYYGKRILPGGKGTLLVMSGLVLLNLVLIAQKFLGY

SEQ ID NO: 9926 - DNA, 1311 bp, Arabidopsis thaliana (mouse-ear cress)
  CDS (1)..(1311)
atggatgatttggagattacccacgaaacgaagaagggaaagagtttttgggctgccgttagtttgatcatcggaacagccgttggtccaggaatgctcggcctcccagctgcaactatcagatctggttctatcccatcgaccattgctttactttgttcttgggtttacgtcatttcctctattcttctcgtggctgagctcagctttgcagcaatggaagaagacaatgcagcagaggttagtttcacaggacttgcaactaaatcctttgggaacaaatttggagttttcgtggcttttgtgtatgcttcactaagtttctctttgatggttgcttgtgtctcgggtattggctccattgtgtctcaatggtttccttcaatgaatccatttttggccaatgctatattccctctagtttccggaatcttgatcgggtttttccctttcaatgccattgatttcaccaacaggggtctctgcttcctcatgctcttctctataacttcacttgtggccattggtttatctgtggctaggtccaatgtgttagcctcatttggtcaatcatgttggaaagtctccatggttttacccgcggttcctgttatggtactgacactagggtttcatgtgatcacgcctttcatatgcaatctcgctggggattcggtttcagatgctcggagagccattcttgtaggcggtgttgtgccattggctatggtgttgtcttggaatctaattgttttggggcttgcaagaatcactgtgcctgctgcaccttcttcaaccattgacccaatctctcttcttctatctgtgaatccttctgccttatctgctgttcaaggctttgctttctcagccttagctaccagtttaatcggatatgctgttagcttcccgaaacagctcctcgacacatggaagcttgtgtctaagcaatcaaatggaaatggaagacttgggtctgtaagtttctcatcaaaagagcgtgataggagaactaatgggagagcctcatacaatgaaccagcaagagctcgtgatgggtttgaagcagtagtgatgctatttgtccttggagttccagctctaattgcaacattctttccctcaacgttctcgagagctctggattttgccggtgtttatgcaaactgtttcctctttggtgtcctgcctcctgcaatggcttatattcaacagtccagaaagaagctcaggccatgggttcttcccggaggcaactttaccttgttgatcttatttgcaatcgccattattctgggaatatggcattag

SEQ ID NO: 9927 - protein, 436 aa, Arabidopsis thaliana (mouse-ear cress)
MDDLEITHETKKGKSFWAAVSLIIGTAVGPGMLGLPAATIRSGSIPSTIALLCSWVYVISSILLVAELSFAAMEEDNAAEVSFTGLATKSFGNKFGVFVAFVYASLSFSLMVACVSGIGSIVSQWFPSMNPFLANAIFPLVSGILIGFFPFNAIDFTNRGLCFLMLFSITSLVAIGLSVARSNVLASFGQSCWKVSMVLPAVPVMVLTLGFHVITPFICNLAGDSVSDARRAILVGGVVPLAMVLSWNLIVLGLARITVPAAPSSTIDPISLLLSVNPSALSAVQGFAFSALATSLIGYAVSFPKQLLDTWKLVSKQSNGNGRLGSVSFSSKERDRRTNGRASYNEPARARDGFEAVVMLFVLGVPALIATFFPSTFSRALDFAGVYANCFLFGVLPPAMAYIQQSRKKLRPWVLPGGNFTLLILFAIAIILGIWH

SEQ ID NO: 9928 - DNA, 1188 bp, Chlamydia muridarum, Chlamydia trachomatis MoPn
  CDS (1)..(1188)
atgcggaataaatgtataggaggggttttaattgttgctggaaccgtgatcggagccggagtattagctgtgcctgttttaacagctttggatgggtttttgcctgctgccttactgtatatgcttgcttggttagtgtcattggcctctggttatggttatttggaggttttgacctggtgcaaagggaataagcaagcgaatttgtgctccatggcagaagaaactttggggaaagtaggacgcatagttttgtgtttagtctacttgtttttattttattccttacttgttgcctacttttgcgatggggggaatattctttctcgtatgcttggagatggggttcttgaaaatccatgggctcggcatgttatgcctatcttatttttctgcatttttgctcctttacttatggcaaaaacctcgatcatcgattactgcaaccgagtatttgttttcggtcttatcctggttttcggtcttttctgtatcttgggagctccgcgtgtgcaaggggatcttttattaagagcatcatggttttcttccctaaatagtttgcctatttttttcttggcttttggttttcaaaatgtcgtgccttcattgtaccattacttagatggggatgttcgagaagttaaacgggcaatttttataggaagcctgattcctttagttttgtatgtaatttgggaagcattggttcttggtacagttccattagtttatttgctgaaagctaaggaactaggatggactgctgcaggtgctcttcaaggagctttaaaaaattctgcttttcatatcgctggagaattattcggattctttgcgctagtcacctcttttatagggactgcattggccttgaaagatttttatatagatatttttaaatgggatgctcgtaagcagcgattgaatttatttttattagttttggtgttcccattggtatgggcggtttcttatcccgagattgttttgtcttgtttgcgttatgctgggggaatagggggagcttgtattatcgtattgttcccggtagcgatgctatggaatggccggtatggaaaacggcattgttctggcaaacaaatattgccaggaggaaagaccgtcctattgattttattaggatatactgtgctaaatctcgcacccctgtattatacgttttag

SEQ ID NO: 9929 - protein, 395 aa, Chlamydia muridarum, Chlamydia trachomatis MoPn
MRNKCIGGVLIVAGTVIGAGVLAVPVLTALDGFLPAALLYMLAWLVSLASGYGYLEVLTWCKGNKQANLCSMAEETLGKVGRIVLCLVYLFLFYSLLVAYFCDGGNILSRMLGDGVLENPWARHVMPILFFCIFAPLLMAKTSIIDYCNRVFVFGLILVFGLFCILGAPRVQGDLLLRASWFSSLNSLPIFFLAFGFQNVVPSLYHYLDGDVREVKRAIFIGSLIPLVLYVIWEALVLGTVPLVYLLKAKELGWTAAGALQGALKNSAFHIAGELFGFFALVTSFIGTALALKDFYIDIFKWDARKQRLNLFLLVLVFPLVWAVSYPEIVLSCLRYAGGIGGACIIVLFPVAMLWNGRYGKRHCSGKQILPGGKTVLLILLGYTVLNLAPLYYTF

SEQ ID NO: 9930 - DNA, 1203 bp, Vibrio cholerae
  CDS (1)..(1203)
atgacgcaatcgaagcttttaggcagtactttgattatcgcgggcaccacgattggtgcaggaatgctagctctgcctctagcttccgccggtattggcttctcaacctcattgatgattatgctcggcttgtggatgctgatggcatttactgcattgctgatggtagaaatccaccagtacgcggataaagaggcaactttgcatactctcgccaaacagattttaggcgataaaggcaaatgggttgcgacgttcgctatgttatttttgttttactcgctgtgtgcggcctacattgctggcggcggcgcacaatttacccaacgaattaccgatttcactggcgtgaacgttgaaagttcgagcggtactttgctgtttaccttgattgtcgctttggtcgtcaccgttggaacaggcacagtggatcgcgtcaaccgcgtattatttgccggaaagatgatcgctatggtagcggtactgtttttcctcgcgcccaatgtttcgcagtcttacctactgagtatgccgattcagcagggcttgattgtcgcggccattcccgtcatttttacttcctttggtttccacggcagtattcctgcgattgtgaattacttggatggtgatacccctgcgctgcgcaaagcgattttgatcggctctgcgattccgctagtgatttacattttctggcagttggtcactcttggagtagtaagtcaatctgccctactcgacaatatggggctcacagcgctcatcggtgtactctcgaccacggttcaccaatcaaatcttggcaacatcatcggcgtattcgctgaccttgctctactcacctcgtttttgggtgttagtctaggtttgtttgaatttatgggtgattctctacgtaaccaacaaggtaaaatgaaccgcccattagcgtctgtcgtcaccttcttaccaccgctgatttttgctctgttctacccgcaaggcttcattatggcgctgggctatgccgcgattgcgctcgccattctggccatctttttacctctggtgatggtgatcaaagtgcgccaacaagccactgagcaacactatcaagtcacagggggcaatggggctctgcttgtgacaggtttggtcgggctgctcatcatcggcgcacagctattgattacgttaggcatacttcccgctctcggttaa

SEQ ID NO: 9931 - protein, 400 aa, Vibrio cholerae
MTQSKLLGSTLIIAGTTIGAGMLALPLASAGIGFSTSLMIMLGLWMLMAFTALLMVEIHQYADKEATLHTLAKQILGDKGKWVATFAMLFLFYSLCAAYIAGGGAQFTQRITDFTGVNVESSSGTLLFTLIVALVVTVGTGTVDRVNRVLFAGKMIAMVAVLFFLAPNVSQSYLLSMPIQQGLIVAAIPVIFTSFGFHGSIPAIVNYLDGDTPALRKAILIGSAIPLVIYIFWQLVTLGVVSQSALLDNMGLTALIGVLSTTVHQSNLGNIIGVFADLALLTSFLGVSLGLFEFMGDSLRNQQGKMNRPLASVVTFLPPLIFALFYPQGFIMALGYAAIALAILAIFLPLVMVIKVRQQATEQHYQVTGGNGALLVTGLVGLLIIGAQLLITLGILPALG

SEQ ID NO: 9932 - DNA, 1242 bp, Neisseria meningitidis
  CDS (1)..(1242)
atgcccaacaaaaccccttcactgttcggcggcgcgatgattatcgccggcacggtcatcggcgcaggcatgctcgccaacccgaccgccacatccggcgtatggtttaccggctcgctggccgtgttgctgtacacctggttttctatgctttccagcggcctgatgattttggaagtcaacacccattatccgcacggcgcaagtttcgacacgatggtcaaagacctgctcggacgcggctggaacatcatcaacggcatcgccgtcgccttcgttttatacctgcttacttacgcttatatcttcgtcggcggcgacctgaccgccaaaggcttaggcagcgcggcaggcggcgacgtttcactcaccgtcggacaactcgtcttcttcggcatcctcgccttttgcgtatgggcatccgcacgcttggtcgaccgcttcaccggcgtccttatcggcggcatggtattgacctttatttgggcggccggcgggctgattgccgatgccaagccgtccgtcctcttcgatacccaagcccccgccggcacaaactactggatttacgccgccaccgccctgcccgtctgcctcgcttccttcggcttccacggcaacgtctccagcctgctcaaatactttaaaggcgacgcgcccaaagtggctaaatccatctggacgggcacactgattgcgctggtaatttacgtcctctggcaaaccgccatccaaggcaacctgccgcgcaacgagttcgcccccgtcatcgccgccgaagggcaagtctccgtcctcatcgaaaccctgtccaaattcgcccaaaccggcaatatggacaaaatattgtccctgttttcctatatggcgatcgccacctcgtttttaggcgtaacgctcggactcttcgactacatcgccgacatcttcaaatggaacgacagcatctccggccgcaccaaaaccgccgcgctgaccttcctgccgcccctgatttcctgcctgctcttccccaccggcttcgttaccgccatcggctacgtcggcctggcggcaaccgtctggacaggcatcatccccgccatgctgctctaccgttcgcgcaaaaaattcggcgcaggcaaaacctataaagtttacggcggcttgtggctgatggtttgggtcttccttttcggcatcgtcaacatcgccgcacaggtattgagccaaatggaactcgtccccgtatttaaaggataa

SEQ ID NO: 9933 - protein, 413 aa, Neisseria meningitidis
MPNKTPSLFGGAMIIAGTVIGAGMLANPTATSGVWFTGSLAVLLYTWFSMLSSGLMILEVNTHYPHGASFDTMVKDLLGRGWNIINGIAVAFVLYLLTYAYIFVGGDLTAKGLGSAAGGDVSLTVGQLVFFGILAFCVWASARLVDRFTGVLIGGMVLTFIWAAGGLIADAKPSVLFDTQAPAGTNYWIYAATALPVCLASFGFHGNVSSLLKYFKGDAPKVAKSIWTGTLIALVIYVLWQTAIQGNLPRNEFAPVIAAEGQVSVLIETLSKFAQTGNMDKILSLFSYMAIATSFLGVTLGLFDYIADIFKWNDSISGRTKTAALTFLPPLISCLLFPTGFVTAIGYVGLAATVWTGIIPAMLLYRSRKKFGAGKTYKVYGGLWLMVWVFLFGIVNIAAQVLSQMELVPVFKG

SEQ ID NO: 9934 - DNA, 1254 bp, Pseudomonas aeruginosa
  CDS (1)..(1254)
atgtcgtcctctccagctcaaacgcccagccgccggccctcgctgctcggcggttcgatgatcatcgccggcaccgccgtcggcgccggaatgttctccctgcccatcgccatgtccggcatctggttcggctggtcggtggcggtgttcctgctcacctggttctgcatgctgctgtcggggatgatgatcctcgaggccaacctcaactacccggtgggctcgagcttctcgaccatcacccgcgacctgctcggccagggctggaatgtggtcaacgggctgagcatcgccttcgtcctctatatcctcacctatgcctatatctccggcggcggctcgatcatcggctacaccctgtccagcggcctcggcgtgaccctgccggaaaagctcgccgggctgctgttcgccctggcggtggcgctggtggtgtggtggagcacccgcgcggtggaccgcatcaccacgctgatgctcggcggcatgatcattaccttcggcctctccatcagcggcctgctcgggcgcatccagccggcgatcctgttcaacagcggcgagccggacgcggtttactggccctacctgctggcgaccctgccgttctgcctgacttccttcggttaccacggcaacgtgccgagcctgatgaagtactacggcaaggacccgcagcggatcagccgttcgttgtggatcggcaccctgatcgccctggccatctacctgctgtggcaggccagcaccctgggcaccatcccgcgcgagcagttcaagggcatcatcgccggcggcagcaacgtcggcaccctggtggaatacctgcaccggatcaccgcgtcggattcgctgaaagcgttgctcaccaccttctccaacctggcggtggccagctccttcctcggcgtgaccctcggcctgttcgactacctggccgacctgtgcaggttcgacgacagccacttcgggcgcttcaagaccgcgttgctgaccttcgtcccaccgaccatcggcgggctgctgttccccaacggcttcatctacgccatcggtttcgccgggctggccgcggcgttctgggcggtgatcgttccggcgctgatggcgcgggcctcgcgcaagcgcttcggcagcccgctgttccgcgcctggggcggcacgccggcgatcgtgctggtgctgctgttcggcgtggccaacgcggtcgcgcacatcctggccagcctgcactggctgccggagtaccgttga

SEQ ID NO: 9935 - protein, 417 aa, Pseudomonas aeruginosa
MSSSPAQTPSRRPSLLGGSMIIAGTAVGAGMFSLPIAMSGIWFGWSVAVFLLTWFCMLLSGMMILEANLNYPVGSSFSTITRDLLGQGWNVVNGLSIAFVLYILTYAYISGGGSIIGYTLSSGLGVTLPEKLAGLLFALAVALVVWWSTRAVDRITTLMLGGMIITFGLSISGLLGRIQPAILFNSGEPDAVYWPYLLATLPFCLTSFGYHGNVPSLMKYYGKDPQRISRSLWIGTLIALAIYLLWQASTLGTIPREQFKGIIAGGSNVGTLVEYLHRITASDSLKALLTTFSNLAVASSFLGVTLGLFDYLADLCRFDDSHFGRFKTALLTFVPPTIGGLLFPNGFIYAIGFAGLAAAFWAVIVPALMARASRKRFGSPLFRAWGGTPAIVLVLLFGVANAVAHILASLHWLPEYR

SEQ ID NO: 9936 - DNA, 1257 bp, Haemophilus influenzae
  CDS (1)..(1257)
atgatacaacaaaaatctccttctctcttaggcggtgcaatgatcattgcaggtacagcgattggtgcaggcatgctggctaacccaacttcaacggcaggtgtatggtttatcggttcaattcttgctttaatttatacttggttttgtatgacaacctcaggattaatgatcctagaagctaatctacattatccaacaggttcaagttttgacactatcgttaaagatttattaggaaaaagttggaatactatcaatggtctttctgttgctttcgtcttgtatattttgacttatgcctacataacctcaggcggaggcattacacagaatctgctcaaccaagcattcagttctgctgaaagtgcggtagatattgggcgaacttcaggatctttaattttctgccttattcttgcagcctttgtatggctttcaaccaaagcagtggatcgtttcacaaccgtgttaattgtcgggatggtggttgcttttttcctttctactactggtttattaagctctgtaaaaacagcagttttattcaataccgttgctgaaagtgagcaaacatatttaccttatttattgaccgcacttccagtttgtctcgtgtcgtttggtttccacggaaatgtcccgagtctcgtcaaatattacgatcgtgatggtcgtcgcgtgatgaaatcgatctttattggtacaggcttagcattagtgatttacatcttatggcagctcgctgtacaaggtaatttaccacgcactgaatttgcgccagtcattgaaaaaggcggcgatgtttctgcattattagaggctttacataaatatattgaagtggaatacctttccgtcgcattaaatttctttgcttatatggcaatttctacttcattcttaggcgtcactttagggttatttgactatattgcggatctatttaaatttgacgatagcttattaggcagaacaaaaacaacacttgttacttttttaccgccattattgctaagcctgcaatttccttatggatttgtgattgccattggttacgctggattggcggcaacaatttgggctgcaattgtccccgcacttcttgccaaagcaagccgtcaaaaattcccacaagcaagttataaagtatacggcggaaattttatgattggttttgtaattttatttggcatattaaatattgtggcgcaaattggggcaaacttaggttggtttgcaagttttactgggtaa

SEQ ID NO: 9937 - protein, 418 aa, Haemophilus influenzae
MIQQKSPSLLGGAMIIAGTAIGAGMLANPTSTAGVWFIGSILALIYTWFCMTTSGLMILEANLHYPTGSSFDTIVKDLLGKSWNTINGLSVAFVLYILTYAYITSGGGITQNLLNQAFSSAESAVDIGRTSGSLIFCLILAAFVWLSTKAVDRFTTVLIVGMVVAFFLSTTGLLSSVKTAVLFNTVAESEQTYLPYLLTALPVCLVSFGFHGNVPSLVKYYDRDGRRVMKSIFIGTGLALVIYILWQLAVQGNLPRTEFAPVIEKGGDVSALLEALHKYIEVEYLSVALNFFAYMAISTSFLGVTLGLFDYIADLFKFDDSLLGRTKTTLVTFLPPLLLSLQFPYGFVIAIGYAGLAATIWAAIVPALLAKASRQKFPQASYKVYGGNFMIGFVILFGILNIVAQIGANLGWFASFTG

SEQ ID NO: 9938 - DNA, 1221 bp, Haemophilus influenzae
  CDS (1)..(1221)
atgctaaaaaacaaaacttttgggagtgcgctgattattgcaggcacaaccattggagcaggtatgcttgctatgccgcttacatcagcaggtatgggctttggttataccctgttattgctcgttggcttgtgggctttgttggtttacagcggattgttgtttgtagaagtgtatcaaacagcggatcagttggatgatggtgtcgccacgctcgctgaaaaatattttggggttcctgggcgaattttcgcaacgttgagtttgttagttttactttatgcactttcagccgcttatattactggtggtggatctttactttcaggcttgccaactgcgtttggaatggaagcgatgtcgcttaaaacggcgattattatctttacggtggtattaggttctttcgtggttgtaggaacgaaaggcgtggatggcttaactcgcgtgttatttattggtaagttaatcgcctttgcttttgtgctgtttatgatgcttccaaaagtagcaacagataatttaatggcattgcctttggattatgcttttgtggtttctgcggcaccaatatttttaacttctttcggtttccacgttattatggcgagtgtgaatagctacttaggtggaagtgttgataaatttcgtcgtgccattttgattggtactgcgattccattagccgcttaccttgtatggcagttagcaactcatggtgtattaagtcaaagtgaatttgtgcgtattttacaagctgacccaacgctaaatggcttagtgaatgcaacgcgtgaaattacaggttctcattttatgggagaggttgtgcgtgtgttctcatcacttgcactgatcacttctttcttaggcgtaatgcttggtgtatttgagggattgggggatttattcaagcgttatcatttgccaaataatcgctttgtattaaccattgccgcatttttaccgccacttgtatttgcattgttttatcctgaaggatttattactgcattaagttacgctggtttgttgtgtgcgttctattgcttaattttaccaattagcttggcatggcgtacacgtattgaaaatccaacattgccatatcgagtcgctggcggtaattttgctttggtgcttgcgttattaattggcgtcgtgattatgctcattccatttttaattcaatggggatatttaccagtggtggcggggtaa

SEQ ID NO: 9939 - protein, 406 aa, Haemophilus influenzae
MLKNKTFGSALIIAGTTIGAGMLAMPLTSAGMGFGYTLLLLVGLWALLVYSGLLFVEVYQTADQLDDGVATLAEKYFGVPGRIFATLSLLVLLYALSAAYITGGGSLLSGLPTAFGMEAMSLKTAIIIFTVVLGSFVVVGTKGVDGLTRVLFIGKLIAFAFVLFMMLPKVATDNLMALPLDYAFVVSAAPIFLTSFGFHVIMASVNSYLGGSVDKFRRAILIGTAIPLAAYLVWQLATHGVLSQSEFVRILQADPTLNGLVNATREITGSHFMGEVVRVFSSLALITSFLGVMLGVFEGLGDLFKRYHLPNNRFVLTIAAFLPPLVFALFYPEGFITALSYAGLLCAFYCLILPISLAWRTRIENPTLPYRVAGGNFALVLALLIGVVIMLIPFLIQWGYLPVVAG

SEQ ID NO: 9940 - DNA, 1191 bp, Chlamydophila pneumoniae, Chlamydia pneumoniae
  CDS (1)..(1191)
atgtcaaataaagttctaggtgggtccttgcttattgcaggttctgccatcggtgctggtgttttagcagttcctgtattgaccgcaaaaggcggttttttccctgcaacttttctctatattgtctcctggcttttttctatggcctcaggcctttgccttcttgaagtcatgacttggatgaaagaatcaaagaacccagtgaacatgctttctatggcggaatctattttaggtcatgtaggcaagatttctatatgccttgtctacttgtttctcttttactccctactgattgcctatttctgcgaagggggaaacatcttatgccgcgtgtttaattgtcaaaatttaggaatctcgtggattcgtcaccttggccctctaggttttgctatattgatggggcctatcattatggcgggaacaaaagtgattgattactgtaatcgtttctttatgttcggcttaactgtagcttttggaattttctgtgcccttggatttttaaaaatccaacctagctttctggtgcgttcctcatggttaactacaataaacgcatttcctgtgtttttccttgcttttggattccaaagtatcattcctacgttgtactactacatggacaaaaaagttggagatgttaaaaaggcaattctcataggaacgttgattcctcttgttctctatgtcttatgggaagttgtggttttaggtgctgtctctcttccgattctttcccaggctaagataggtggatatactgctgtagaagctctcaagcaggcccatcgttcttgggcattttatattgctggagaactttttggcttctttgctttggtctcctcttttgtaggagttgctctcggtgttatggacttcctggcagacggtttaaaatggaataaaaaatcacatccattttcaattttctttttaacatttattattccccttgcttgggctgtttgttatcctgaaattgttttgacctgtcttaagtatgctgggggattcggggccgccgtgattatcggggtattcccaacattgattgtgtggaaagggcgttatggcaaacaacatcacagagagaaacagttagttccaggaggaaagtttgctttatttttgatgttcttgttgatagtaataaatgtagttagcatttatcatgagctttaa

SEQ ID NO: 9941 - protein, 396 aa, Chlamydophila pneumoniae, Chlamydia pneumoniae
MSNKVLGGSLLIAGSAIGAGVLAVPVLTAKGGFFPATFLYIVSWLFSMASGLCLLEVMTWMKESKNPVNMLSMAESILGHVGKISICLVYLFLFYSLLIAYFCEGGNILCRVFNCQNLGISWIRHLGPLGFAILMGPIIMAGTKVIDYCNRFFMFGLTVAFGIFCALGFLKIQPSFLVRSSWLTTINAFPVFFLAFGFQSIIPTLYYYMDKKVGDVKKAILIGTLIPLVLYVLWEVVVLGAVSLPILSQAKIGGYTAVEALKQAHRSWAFYIAGELFGFFALVSSFVGVALGVMDFLADGLKWNKKSHPFSIFFLTFIIPLAWAVCYPEIVLTCLKYAGGFGAAVIIGVFPTLIVWKGRYGKQHHREKQLVPGGKFALFLMFLLIVINVVSIYHEL

SEQ ID NO: 9942 - DNA, 1218 bp, Haemophilus influenzae
  CDS (1)..(1218)
atgttctacgaaaaaacaacttccatttttggtggcgcctgtattattgctagtgtttgcgtcggagctggaatgcttggtttaccaacatctggtgctggagcttggacaatatggtcagcattagcaatttgcttaacgatgataatcatgacattatcaggctggttattacttgaggcctattctacttatgatttaagagcatcatttagtaccgtaactaaagatatgctcggttcaactatcaattctattaataatcttgcggtgtattttgtcgggggtattttactttatgcttataccactgcatctggaggtatactagaaaaccttattaaaccgtggattgattttggttcatctacattggcaatttgctccactgtatttgtattagtcttttccttctttgtttggcattccactcgcattgtagacagaatatctgttttattgattgtattcatggggtttacttttatttttagtacttatggattagcaactaatattagtttagatactttattagatattggtggaaaagatacaaactatgcaaaatatgcggtagggatgtttcctgttgcattaacatcttttggttaccatcattctgtttgtactatgcgagcctattatggagacgagaaaaaagctaaatatgccatttcaggtggaacagccattgctcttactctttatttactttggattttttcaattttcggaaatttgcctcgcaatcaatttgcacctgtaatagctagtgatggcaatctagatatattacttaacgctttaggtagagtaatagaatctaacacggttaaacaaatgattaatgccttttctatcgccgcaattttgtcatcttttattggcgtaggattaggcgtattcgattatctcgctgatttcttcaaatttgataatagcaaaattggacgaacaaagtcatgggctgtgactttcctacctccactaattatgtcaattttatttccattgggtttcttaaaagccattggatatgccggcgcagtagcgacaatttggacttgcataattccagcacttcttgcttataaatctcgcaaaataaatgcagcagcaacaacattccgagtttgtggtggaaatggcttaataatctttattgtattatttgggtgttttgtggctattttccattttcctagcaatgtttga

SEQ ID NO: 9943 - protein, 405 aa, Haemophilus influenzae
MFYEKTTSIFGGACIIASVCVGAGMLGLPTSGAGAWTIWSALAICLTMIIMTLSGWLLLEAYSTYDLRASFSTVTKDMLGSTINSINNLAVYFVGGILLYAYTTASGGILENLIKPWIDFGSSTLAICSTVFVLVFSFFVWHSTRIVDRISVLLIVFMGFTFIFSTYGLATNISLDTLLDIGGKDTNYAKYAVGMFPVALTSFGYHHSVCTMRAYYGDEKKAKYAISGGTAIALTLYLLWIFSIFGNLPRNQFAPVIASDGNLDILLNALGRVIESNTVKQMINAFSIAAILSSFIGVGLGVFDYLADFFKFDNSKIGRTKSWAVTFLPPLIMSILFPLGFLKAIGYAGAVATIWTCIIPALLAYKSRKINAAATTFRVCGGNGLIIFIVLFGCFVAIFHFPSNV

SEQ ID NO: 9944 - DNA, 1209 bp, Erwinia carotovora subsp
  CDS (1)..(1209)
atgaaaaatcgtactcttggcagtgtttttatcgttgctggtaccacaattggagcaggaatgttggcgatgccgttggcaacggctggcgtcggatttggtaccacattgatgatattgatcggcctgtgggcactgatgtgttatagcgccttgttgctggttgaagtgtatcagcatcagccgtcacacaccgggttaggcacattggcaaaaatctacctcggccgctggggacagtggattaccggtttcagtatgctatttctgatgtatgcactaacggcggcctatatcagcggcgcaggcgaactgatcgccagtagcatcagccagtggagtggctactcacttccgatgtccgcagggattttgctcttcacgctggttgctggcggcgtcgtctgtatcgggacatcctcagtcgacttgtttaatcgcatcctgtttagcggcaaagtgctgatgctcgtcatcatgctggccgtcatggttccgcatattcagcgcgtcaatctcttaacgctgccgctgcaacagggcctcacgctctcggcattaccggtcattctgacctcattcggctttcacggcagtatccccagcatcgtctactacatggggggagacagccgcaagctgcgccggatatttcttatcggtagcgtgataccgctgattgcctatattttctggcagttcgtgatactaggcagcctcagctcttcgacattcaatgctattttggccgatcaggcaggattgaatgggttgatgcaggcaattcgcacactcgttgcctctccacacgttgaactggccgtccacctgtttgccgatctggcactggcgacctctttcctcggcgtggcgctcgggttgttcgattatttagccgatctgtttaaacgtaaaaatagcgtcacagggcgcgcgcagacgggcttactgacctttattccaccactggtgttcgcactcttttatccacaagggtttgtgatggcgctgggctatgcggcgattgcactggccgtgctggcattacttattcccgttctgctgagctggcaagtacgcaaacagaatcctgaaatacgcgcgactcgcggtggtgtaccggtattggcgctggtgttcgccagcggcgtaagcatcatcctgatccaactagcgatggtggcaggctggttgccatccatcagttaa

SEQ ID NO: 9945 - protein, 402 aa, Erwinia carotovora subsp
MKNRTLGSVFIVAGTTIGAGMLAMPLATAGVGFGTTLMILIGLWALMCYSALLLVEVYQHQPSHTGLGTLAKIYLGRWGQWITGFSMLFLMYALTAAYISGAGELIASSISQWSGYSLPMSAGILLFTLVAGGVVCIGTSSVDLFNRILFSGKVLMLVIMLAVMVPHIQRVNLLTLPLQQGLTLSALPVILTSFGFHGSIPSIVYYMGGDSRKLRRIFLIGSVIPLIAYIFWQFVILGSLSSSTFNAILADQAGLNGLMQAIRTLVASPHVELAVHLFADLALATSFLGVALGLFDYLADLFKRKNSVTGRAQTGLLTFIPPLVFALFYPQGFVMALGYAAIALAVLALLIPVLLSWQVRKQNPEIRATRGGVPVLALVFASGVSIILIQLAMVAGWLPSIS

SEQ ID NO: 9946 - DNA, 1275 bp, Erwinia carotovora subsp
  CDS (1)..(1275)
atggcaacacgtgcagtgaaagaaaatacagtagaaaaaaacggtacagaaaagcgtcttccttcgctgtttggcgggtcgatgattattgcagggacgattattggcgctgggatgttttccctgccggtggtgatgtcgggtgcctggtttttttggtcatttgccgtgttggtcttcacctggttttgtatgtatcactctgggctaatgatattggaggctaaccttaattatcaggcaggtgccagcttcgatacactgaccaaagatttgttgggtaagggttggaatgtgattaacggcatatcgattgcctttgtcctctacattctgacctacgcctatatctctgcgagcggttcaattatccatcacacgcttactgagatgtcgatcgatttctctgcccgcgtcggcggctgcctgtttgcgctatttgttgcgtttaccgtatggctgagcacggcggcggtgagccgcatgaccgcgttttttctggcagcaaaggtactgacctttttcatgacgttcggcagcctgctgtggaatgtgaagccggttgttttactcaatgttgcggaggaggcacccagctaccttccatatgtgttgatgacgctgccattttgtctggcctctttcggttttcatggcaacgttcccagtttggtgaagcattacggccacaagccacaggtaatcaagcgttgtctgtttattggcagcgcgctggcgctggtgatgtatgccatctggctgattggtacgatgggaaatattgctcgtccagattttatcgggattgcagagcggggcggtaatattgacgttctggtacagacgttggccggcgtgctgaatagcccttatctggacgtgttgctcacggtcttttccaacttcgccgtcgcctgttcgtttcttggggtaacgctggggctgtttgattatctggcagatttgctgaaatttgacgatagccgaatgggtagggctaaaacggcgctggtaacctttctgccgcctattattggcgggctggtctatccgaacggttttatttacgcgattggatttgccgggttagctgccaccatatgggcggtgattacgcctgcgttgctggcgcttgcgtcgcgtcgccgcttcggtagcccgcagttccgcgtgcggggcggtaatgcgatggtggtgctggtgctgctatttggcgtcggcaccgcgctgatacatattctttccagcctcgatttgctaccggtttatcgctag

SEQ ID NO: 9947 - protein, 424 aa, Erwinia carotovora subsp
MATRAVKENTVEKNGTEKRLPSLFGGSMIIAGTIIGAGMFSLPVVMSGAWFFWSFAVLVFTWFCMYHSGLMILEANLNYQAGASFDTLTKDLLGKGWNVINGISIAFVLYILTYAYISASGSIIHHTLTEMSIDFSARVGGCLFALFVAFTVWLSTAAVSRMTAFFLAAKVLTFFMTFGSLLWNVKPVVLLNVAEEAPSYLPYVLMTLPFCLASFGFHGNVPSLVKHYGHKPQVIKRCLFIGSALALVMYAIWLIGTMGNIARPDFIGIAERGGNIDVLVQTLAGVLNSPYLDVLLTVFSNFAVACSFLGVTLGLFDYLADLLKFDDSRMGRAKTALVTFLPPIIGGLVYPNGFIYAIGFAGLAATIWAVITPALLALASRRRFGSPQFRVRGGNAMVVLVLLFGVGTALIHILSSLDLLPVYR

SEQ ID NO: 9948 - DNA, 1149 bp, Photobacterium profundum
  CDS (1)..(1149)
atgctggggctcccaagtgcgggagcaggtgcatggacaacttggtcagttttcgcgattacaataaccatggtcgtcatgaccatttcgggttggatgctgctagaggcattcaagaattatgacttaaaggtatctttcaacacggtaaccaaagacatacttggtgataaggtcaacatgttcaataacctgatggtgtactttgtagggggtattttgctgtacgcctacatcacatcttcaggccttatccttcaagatgttctgggcctcgatagcaaaatcacctctatcttgtttgtttttgtattttctcccttcgtttggcactcaactcgagcagtagaccgaatttccgttattttaatcttatttatggtcttaagttttgtatttggtgtgtcagggctggcgatcaaagtagatatgtccatcttgtttaataccattgatgaaaaaacgagctacgcaccctacgcaatggcgatgctgcctgtcgctttgacgtcgtttggttatcaccattctgtggcaacaatgcgtgcttattacggcgaagaggaaaaagcgaaatacgcgattttgggtggcacaataatcgcgttaagtctgtatgttctatggttgttcagcatttatgggaatttacctagaagtcaatttggacctgtgattgagcaaggcggtaacgtagatgcactactaactacattaggctcagtcattgaatctgaaaaagtagcgcatgcgatccataccttctcaatggcggcaattctatcttctttcattggtgttggacttggggtgtttgactatttggctgatttgttcaagttcgaagacaccaaacaaggccgtgcaaaaacgtggctaatgactttcataccacctttgatcctgtcattgctatttccgtttggttttgtcattgccattggctatgccggcgctgcggcaaccgtctggacatgtattattcctgcacttctcgtaagaaaagcacgcacgttagagaatggtgataaaggctttaaagcgccaggcggcaagccaatgactgttctcgtcattagctttggtattttaactgccgtgtttcacttcatgtcgatgttaggcatgcttccagcgtttacaggctaa

SEQ ID NO: 9949 - protein, 382 aa, Photobacterium profundum
MLGLPSAGAGAWTTWSVFAITITMVVMTISGWMLLEAFKNYDLKVSFNTVTKDILGDKVNMFNNLMVYFVGGILLYAYITSSGLILQDVLGLDSKITSILFVFVFSPFVWHSTRAVDRISVILILFMVLSFVFGVSGLAIKVDMSILFNTIDEKTSYAPYAMAMLPVALTSFGYHHSVATMRAYYGEEEKAKYAILGGTIIALSLYVLWLFSIYGNLPRSQFGPVIEQGGNVDALLTTLGSVIESEKVAHAIHTFSMAAILSSFIGVGLGVFDYLADLFKFEDTKQGRAKTWLMTFIPPLILSLLFPFGFVIAIGYAGAAATVWTCIIPALLVRKARTLENGDKGFKAPGGKPMTVLVISFGILTAVFHFMSMLGMLPAFTG

SEQ ID NO: 9950 - DNA, 1266 bp, Photobacterium profundum
  CDS (1)..(1266)
atgacttcaatgagtatgagtaaaacgttcggcagtacgctgatcatcgcaggcacaacaatcggggcgggtatgctagctctccctctcgcatcagcagggttagggttcaccgcagcaacattaacgatgatgggtatttgggcattaatgatttataccgctctattaatgctagaggtacaccaacatgccgataaaaatgcaacattgcataccctggcacatcaattattgggccgcaaaggtcaagtgattgccagcttcgcaatgatgttcctattttacgcattatgtgccgcatacattgcaggcggcggcagccaacttaatgacaagttaacgaattggatggggctaagtcttgcacctcaagtgggtacagttggatttaccgttattattgcaatcgttgtatccataggtacgcattcagtcgatatggttaatcgcgtattattctcactaaaagttattgcattagccgttatgtttgttctattaatgccacatgttcaagcggttaatttggttgagatgccgattcaaaaaggattaatcatttcagcactgcccgtcatttttacctcttttggctttcacggtagcattccctccattgttcgttacgttggtttggatattaaagcactgcgaaaaataatggtcattggctctgcaacaccactgatggtctacatattatggcaagtagcaagtcaaggtgtgcttggtcagcccgatttaatggcaagtacaacactgggttcgtttatagcaacacttagcaatattttacataacccgctcgttagccaatctgtatcagtatttgctgacctagccttggcaacgtctttcttgggggtgagtttaggcttatttgattttatctctgatattttaaatcgtaataatcaagtaaaaggtcgtatgcaaacagcgctggtgacctttgttccacctctttgctttgccctattctacccacaaggctttattatggctttaggctatgcggcgattgcactggttattttggctatttttctacctgttgcgatggtgcgagctcagcgtaagcaaataaacactctaccagtaggtcaagaaacacatacgacaacaactgataaagaaataaagacagcgacttaccaagttcgtggaggtacaccagcattaattactgtgacaagcattggaatactcatcatctctgcacaattgttacaaatgattggggtcatcccttccgtcggataa

SEQ ID NO: 9951 - protein, 421 aa, Photobacterium profundum
MTSMSMSKTFGSTLIIAGTTIGAGMLALPLASAGLGFTAATLTMMGIWALMIYTALLMLEVHQHADKNATLHTLAHQLLGRKGQVIASFAMMFLFYALCAAYIAGGGSQLNDKLTNWMGLSLAPQVGTVGFTVIIAIVVSIGTHSVDMVNRVLFSLKVIALAVMFVLLMPHVQAVNLVEMPIQKGLIISALPVIFTSFGFHGSIPSIVRYVGLDIKALRKIMVIGSATPLMVYILWQVASQGVLGQPDLMASTTLGSFIATLSNILHNPLVSQSVSVFADLALATSFLGVSLGLFDFISDILNRNNQVKGRMQTALVTFVPPLCFALFYPQGFIMALGYAAIALVILAIFLPVAMVRAQRKQINTLPVGQETHTTTTDKEIKTATYQVRGGTPALITVTSIGILIISAQLLQMIGVIPSVG

SEQ ID NO: 9952 - DNA, 1179 bp, Photobacterium profundum
  CDS (1)..(1179)
atgaatttaaaattagtgggtagttcgttaatcattgcaggtaccgcgctgggcgcaggtatgttagccattccaatggtactggcgcagtttggtcttttatggggcacccttttgatgctggtgatttggttgggtacaacctacgccgcattgttattacttgaagccagtattaaatccggtggtggcttagggatgaacaccattgcgcgtaaaaccttgggtaaaggcggccagctggtcaccaacggtttactttacgcgttgttagtatgcttattgatggcttacatcatcggagccggtgatttagtgaagaagatgctgcacggtgttggcattgaaatgtcgatgatgcagacacaaatcttgttcacactggttgcgggcgtagttgttgcctctggtactgctgctatcgataaggttaaccgtctgttgtttgctgtaatggttgtcgtattaggtatcacgctattctcgctcgtgccgactatgtcttttgaacaccttttagatgcggcaagcaatgataaagttgagctaataaaaaccagctcagtgttgttcaccagctttggttttatggtcgtgattccatcacttgtaacctacaacaaaggcgcgtcacaccgtgatttgcgtaacatggttattgtaggctctgttatcccattagcttgttacttattgtggttatatgccgttgtgggtaacttaaccccagaacaattggtgaagttctcgaatgtatctgaattgattgctgcattgggcacgcgtttcagcggtattcaagtgattctgtctaccttcacaggcctagcgttactgacgtcgttcttgggtgtggcgatggcactgtttgatcaaaatgcagatacatttaagcaaaataaagccgttacctatgtacttacctttatttttccgttagttggcgcactttgggctgctgatcagttcttatctgtattgggttatgctggctttattcttgtgttcttggctatctttgtaccaatggcgatgacaatgaaactgcgtagttttgaaaagcaaaagtcagcagggcatgaagtattggctgaagcttaccaagcgggtggcggttcaattgctatggggcttagtttcgtatttggttgcttcttaattggtgctcagctggtataa

SEQ ID NO: 9953 - protein, 392 aa, Photobacterium profundum
MNLKLVGSSLIIAGTALGAGMLAIPMVLAQFGLLWGTLLMLVIWLGTTYAALLLLEASIKSGGGLGMNTIARKTLGKGGQLVTNGLLYALLVCLLMAYIIGAGDLVKKMLHGVGIEMSMMQTQILFTLVAGVVVASGTAAIDKVNRLLFAVMVVVLGITLFSLVPTMSFEHLLDAASNDKVELIKTSSVLFTSFGFMVVIPSLVTYNKGASHRDLRNMVIVGSVIPLACYLLWLYAVVGNLTPEQLVKFSNVSELIAALGTRFSGIQVILSTFTGLALLTSFLGVAMALFDQNADTFKQNKAVTYVLTFIFPLVGALWAADQFLSVLGYAGFILVFLAIFVPMAMTMKLRSFEKQKSAGHEVLAEAYQAGGGSIAMGLSFVFGCFLIGAQLV

SEQ ID NO: 9954 - DNA, 1290 bp, Photobacterium profundum
  CDS (1)..(1290)
atgattcaatatttatgtgagttactcatgaataaattaaatgtatcgaatccagaaaagcaagtgtctttaatgtatggagtggctgttgtcaccagtactgcgataggggttggcatgatgagcttaccgatcgtgagtatcggaatgtggtttcctctaagtatttttgtcatcgctattacggctgtatatatcatctcggcaggctccttattgctcgaagtgaatatgaattaccctcctggtactggcattcatagcatggtgaatgacttgatgggaggaaagcatgcaatgttcaatgattttatgatgttatttaacggctttattctcttgtatgcttatatcaccgtgggaacggaagctgttcagttttatatcgataaaatagtgggttttgaactgaataatgttctctctggtctcttatttaccgctttttttggggtgattttttatacacctcccttaattatcagtcgtatcctgagtgtctttattggcttaatggtcctttcttttatctacatcgcttattccttagggatcaatgtcaacctcggtaatattttgcttccaagcatcgaaaatagtcactcctttggtctcttaccttttgtttttataacacttcccttttttatggccgcgatgggtttccagcagacgatcccaatgctaagacatctttaccatgataatccgcagcgggtagtcaggagtatctttctgggtattactttagtttcctgtatttatcttgtttggctttttgtcatcatggggaatcaatctcaaaacagtatgattttacaggtcgcttcaggggaaagtagcttagaaaatattgtggagaccttaagcagaagtgaagacataaaagccttgatgttcttttttgtacaagtggctgttgtgacttctttcgtgggcgttgctaaaggtttgttggactatttaatggatatttttgttaatcattttaaattaatggcagtgtatcccaaagccttagtgattcttcccccgctcttattatctctactttttccttatgggtttcttattgcgataggctttgccggactcgctggagcaatatggggcggtatttatcctgctttaatggcgcaaataatccggaaaagaatacccacagacgacatggaatttgtgactgtgggagggaagtacacgccctggtttaccttactctacagtttcttaatcatcgttgtgatgttgttggaactggtcgattttttacctaaatatccgaattaa

SEQ ID NO: 9955 - protein, 429 aa, Photobacterium profundum
MIQYLCELLMNKLNVSNPEKQVSLMYGVAVVTSTAIGVGMMSLPIVSIGMWFPLSIFVIAITAVYIISAGSLLLEVNMNYPPGTGIHSMVNDLMGGKHAMFNDFMMLFNGFILLYAYITVGTEAVQFYIDKIVGFELNNVLSGLLFTAFFGVIFYTPPLIISRILSVFIGLMVLSFIYIAYSLGINVNLGNILLPSIENSHSFGLLPFVFITLPFFMAAMGFQQTIPMLRHLYHDNPQRVVRSIFLGITLVSCIYLVWLFVIMGNQSQNSMILQVASGESSLENIVETLSRSEDIKALMFFFVQVAVVTSFVGVAKGLLDYLMDIFVNHFKLMAVYPKALVILPPLLLSLLFPYGFLIAIGFAGLAGAIWGGIYPALMAQIIRKRIPTDDMEFVTVGGKYTPWFTLLYSFLIIVVMLLELVDFLPKYPN

SEQ ID NO: 9956 - DNA, 1375 bp, Corynebacterium glutamicum
  CDS (101)..(1348)
gagaaggcggaaccgaaggaatcgaagaatatctctccgtgcgttacctcgctttgccgtgacacatgagctgtccggtgaataacccgaaggaaaaaacatgactaccgaatcaatagttgcgcacaatgctgcaggtacagcacctcagaatgtgtcctctgctaagaagaagtacctcagcgttgcccaaggcgttgcccttatctacggaaccaacatcggcgccggtgtgctcagcctcccatacgctgcccgcaacggtggtttcctcgccctggttgttgccctgctcattgcgggaacactgaccaccatctccatgctctacatcgccgaagtatccctgcgcaccaagaagccactgcagctttccggcctggcagaaaaatacctggggcagtggggccgctggctggtgttcattgccattgtggtcaacagcgtgggtgcactgattgcctacgcatcaggatccggcattttgataggcaacctcaccggcctgccaccaatcgtgggcacccttggattctttgttttaggcaccttgatcatgtggaaaggcctgcacacggcaagcttcgtggaggcattgatcaccactggcatggcaacgatcatcatcgtgctgtgtggatggacagtgcttggccctggaatttccgcagacaacctgatcgtgttccacccattcttcatcgttccgatcatgaacctcgcggtctttaccttccttgcccaatatgtggttccagaaatcgcacgaggagttaaccctgccaccccgaaggcagtgccacgcgcgatcatcatcggcatggtcgcaactggtgtcaccctggcagctgtaccattcgcggcactagggcttctgggcacaggcgtcagtgaagttgtcaccatctcctggggcgaagcactcgccccagtggcctattacatggccaatgccttcgcactattggccatgttcacttcattcatcgccattggattcaccgcgatgcgcaacgtactagatattggccactggccacaacacggatggcagcgatccgttgctgtcggactaactgttcttccaccactggcaatttcacttgcgggattaggcggattcgtggcagcactgagctacgccggaggatttgccggagcaatcatgtccatcatccccgtgctgttgctgcgcaactcccgcaagagtggtgaccaagaaccagtgtggaaagccacctggcaagcgcaccccatcttccagatcctgttgattgtggtgtactccctggcgtttgtgtactcggttctcgcgatcgtcggattaatgcctgcgggttgggcatagtcacttcctgttgtggctgcctgttgc

SEQ ID NO: 9957 - protein, 415 aa, Corynebacterium glutamicum
MTTESIVAHNAAGTAPQNVSSAKKKYLSVAQGVALIYGTNIGAGVLSLPYAARNGGFLALVVALLIAGTLTTISMLYIAEVSLRTKKPLQLSGLAEKYLGQWGRWLVFIAIVVNSVGALIAYASGSGILIGNLTGLPPIVGTLGFFVLGTLIMWKGLHTASFVEALITTGMATIIIVLCGWTVLGPGISADNLIVFHPFFIVPIMNLAVFTFLAQYVVPEIARGVNPATPKAVPRAIIIGMVATGVTLAAVPFAALGLLGTGVSEVVTISWGEALAPVAYYMANAFALLAMFTSFIAIGFTAMRNVLDIGHWPQHGWQRSVAVGLTVLPPLAISLAGLGGFVAALSYAGGFAGAIMSIIPVLLLRNSRKSGDQEPVWKATWQAHPIFQILLIVVYSLAFVYSVLAIVGLMPAGWA

SEQ ID NO: 9958 - DNA, 1284 bp, Parachlamydia sp
  CDS (1)..(1284)
atggaagacaaggaaacgaatcctgaaaaaggaagtttaatttctgcaatattcttagtagcaggaacatgcattggtggaggaatgttagcacttcctgtatcaacaggaataagcggatttattccttcaacaatcgtaatgggatgctgttggattgcgatgactttgtcagcattattgttattagaagtgaatttatggatgaaggaaggcgcgcatgtgattactatgtcttccaccattttaggtccggtaggccgtgtgattagttggattctctttttatttatctcttatgcttctattgtggcttatacatctgctggaggatcgttggttagagatgtagccccttctttattgggaatgtctatttcgaaagaatggggatgcttaatttttatcgtttgctttggaggaattatttactttggaagtcgtattgtgggaaaagtaaatgcgattttttttgttgcgatgattgtggcttatttagctttaatcagtactggattgtctgaagtgaaattagaaatgcttggacatcgtcgttggtcaacatcatttttagcgattcctattttattaacgacatttagttttcaaacaatgttacctagtttgactccttatctaaaaaggaatgcgatagcattacgttgggctattattggaggaacaactttaactttttttgtttatttgatttggcagtttttagttcttggagtcattcctctttttggaccaaatagccttttaaaagctttagaagtaggtgaacctgtaactcaattcgttcgacaacatgtgcaaagctcttgggtttctagtttggccgaatattttggattttttgctcttgttacttcttttttaggaatagctttaggtttgttcgattttttgtctgatggtttaaaaataaaaaagcaaggggtaggaaagattgttttaggtttattgatcgtaattcccacatttattttttctgcttattttgaacgaattttcttgcttgctttagatacttctggagggtttggtgattctattttaaatggaattatgcctgtattaatggtttggattggccgctattatcttcattttcccaatgaaaatcgcgttcctggtggaaaaccgttacttttatttgtcttcgctttctttttgacttcactgattattgaaattttaattcatacaggatttatttgttccatttttgaagcttgtcaaatcatgttaaatcaacaacaatacggtattagcttttaa

SEQ ID NO: 9959 - protein, 427 aa, Parachlamydia sp
MEDKETNPEKGSLISAIFLVAGTCIGGGMLALPVSTGISGFIPSTIVMGCCWIAMTLSALLLLEVNLWMKEGAHVITMSSTILGPVGRVISWILFLFISYASIVAYTSAGGSLVRDVAPSLLGMSISKEWGCLIFIVCFGGIIYFGSRIVGKVNAIFFVAMIVAYLALISTGLSEVKLEMLGHRRWSTSFLAIPILLTTFSFQTMLPSLTPYLKRNAIALRWAIIGGTTLTFFVYLIWQFLVLGVIPLFGPNSLLKALEVGEPVTQFVRQHVQSSWVSSLAEYFGFFALVTSFLGIALGLFDFLSDGLKIKKQGVGKIVLGLLIVIPTFIFSAYFERIFLLALDTSGGFGDSILNGIMPVLMVWIGRYYLHFPNENRVPGGKPLLLFVFAFFLTSLIIEILIHTGFICSIFEACQIMLNQQQYGISF

SEQ ID NO: 9960 - DNA, 1200 bp, Parachlamydia sp
  CDS (1)..(1200)
atgaccaatgataaatatcgtttattaggcggtattctccttgttgctggaacgacaataggagcagggatgctcgctcttccaattgtaacaggatttgcagggtttattccttcgattgttctgtttgtgatttattgggtttttatgactttcacagcccttttgatgttagaggttaacttatggatgggagagcatactaatctgattacgatggctaaaaaaacgcttggaagaggtggacaagcgattagttggatgatttacctcttccttttatatacattgacaactgcgtatgtagcggggggaggtcatatcattgttgattttgcaaggcaagttactgaatggaatctgccaagctggatagggcctcttcctttgttgggaatttttggtttttttgtttataaaggagctcgttcagtagattatgttaatcgaattttgatgggcggattagttttgacttatgtttgcatggtcttctttttatcatctcatatacaaccgattcttttaaaacatcaaaggtgggatgcgctttggattgcagtccctattgtgtcaacctcatttggttttcatattattattcctaccctgactgactatttgaaacgagatgtcaagcaaattagaaatgtcattttaatcggcggtgcaatcccgcttttgatttacgttagctgggaattgctaacacttggaattattccattgcagggagaaaatgggttgttaatgggatatgaaaaaggtttagatggggccactttaatgagtcaattacttgaacactctgaactttctcttttagcaaggttgttttccctttttgccattctaacttcatttttaggggtctcattgagtttgcgagattttttatctgacggattgaaaattcaaaaatcaaataaaggaagatttgttctttatttactgacatttattcctcctcttcttctaactttaacagatccacgggcgtttttaaatgccttagaatacgctggggcatttggagttgttaccttacttggcttgattcctattttaatggtttggcgtggacgttatcatttaaaattgccttcaacttttaaagctcctggaggcaaaatagctttaatcttagcattacttgtgtcattaggcgtgattggaatggaaatttttaataaagtgtag

SEQ ID NO: 9961 - protein, 399 aa, Parachlamydia sp
MTNDKYRLLGGILLVAGTTIGAGMLALPIVTGFAGFIPSIVLFVIYWVFMTFTALLMLEVNLWMGEHTNLITMAKKTLGRGGQAISWMIYLFLLYTLTTAYVAGGGHIIVDFARQVTEWNLPSWIGPLPLLGIFGFFVYKGARSVDYVNRILMGGLVLTYVCMVFFLSSHIQPILLKHQRWDALWIAVPIVSTSFGFHIIIPTLTDYLKRDVKQIRNVILIGGAIPLLIYVSWELLTLGIIPLQGENGLLMGYEKGLDGATLMSQLLEHSELSLLARLFSLFAILTSFLGVSLSLRDFLSDGLKIQKSNKGRFVLYLLTFIPPLLLTLTDPRAFLNALEYAGAFGVVTLLGLIPILMVWRGRYHLKLPSTFKAPGGKIALILALLVSLGVIGMEIFNKV

SEQ ID NO: 9962 - DNA, 1191 bp, Parachlamydia sp
  CDS (1)..(1191)
atgaaaacttatgcaacccaaaagggaagtctcttaggaggaatcttattagtggctggttgttgcattggagctggaatgttaggcttaccagtgttgagcgcaatggctggttttatccctagtgtcgccatgtttatgacttgttgggcttttatggtttgcacaggccttctgttgttagaagtgaatttatggtttggccaagaaattagtattattacgatggcagaaaaaactttgggagaagtaggaaaaggtgtgagttggtttgtttttctttttcttttttattcgctaatggtggcttatgtagcggcaagtggatctttagtttcagatttagttgaacaagggttcaatcactcttttccccaagggttaggaagtgttttgttttgcttactttttggagtgctcatttatttaggtattggggctgttgactggtttaatcgatttttaatgtgtgggttaattttgacttatgtttgtttaatgataacgggaattccttatatagatgcttctcttttaaaacatcaagattggaatgccgcgactttagttcttccagcagttattgtttcgtttgggtttcataatttgatccctagtttaacaacctatcttaacagcgatcgaaaaactcttttaaaggctatcttgattggaagcgccattcctttagtgatttatttagcttgggaatggttgattttaggattggttcctcttggagaatttaaagaagctttagataaaggggaaatagcaacagaagctttaaaagatgtggtaggaatttcttggattctcgatgttgcacaaggttttgctttttttgcaatagtcacttcttttttaagcgtagctattagttttgttgactttctagcagatggattaaatattcaaaaaactgccggaggtaaaatgtttttagcaggacttgtactagttcctccacttatttgttctatagtttaccctaggatttttttgtcggctttaaattatgctggaggatttggagccgtgattctttttggtatcttgccggctctcatggtttggaaaggtcgttatacaaaaaagattaacttacctcaaattgttcccggagggaggccacttttaattggcgtcattctattttctctatggattatggcccttcaacttatttaa

SEQ ID NO: 9963 - protein, 396 aa, Parachlamydia sp
MKTYATQKGSLLGGILLVAGCCIGAGMLGLPVLSAMAGFIPSVAMFMTCWAFMVCTGLLLLEVNLWFGQEISIITMAEKTLGEVGKGVSWFVFLFLFYSLMVAYVAASGSLVSDLVEQGFNHSFPQGLGSVLFCLLFGVLIYLGIGAVDWFNRFLMCGLILTYVCLMITGIPYIDASLLKHQDWNAATLVLPAVIVSFGFHNLIPSLTTYLNSDRKTLLKAILIGSAIPLVIYLAWEWLILGLVPLGEFKEALDKGEIATEALKDVVGISWILDVAQGFAFFAIVTSFLSVAISFVDFLADGLNIQKTAGGKMFLAGLVLVPPLICSIVYPRIFLSALNYAGGFGAVILFGILPALMVWKGRYTKKINLPQIVPGGRPLLIGVILFSLWIMALQLI

SEQ ID NO: 9964 - DNA, 1260 bp, Desulfovibrio vulgaris
  CDS (1)..(1260)
atgcagaacgcggctcatcgccccgggcagaacgcggcacatcgccccggagtcttcggtggcaccatgatcatcgccggtacgtccatcggcgcaggcatgctcgccctgcccaccatctcggcgggcatgtggttcggctggtcgcttgcggtcatgctgctggcgtggctggtcatgctgctttcgagtcaggcactgctcgaggtgaacctgcatttcgaaccgggggccagcttccacaccctcgtccgcgagacactcggccccggctggagcgtcatcaacggcgcggccgtggctttcgtgctgtacatcctcgtctacgcctacgtcagcgggggcggttccatcatgcggcacaccctgctggcggtctcgggctacgaaccctcgaagctggcggcgggcctctccttcgcgttgctgctggcggcatgtgtgtggtggagcacatggatcgtcgaccgtctgtccgtcatcatgatgggtggcatggtcgtcagcttcatcctctccatgtccgggatgctctcggacatccgcgccgacgtactcttcgacgccggaggcgaaggcggttcggccctcttcgtgtggggggccctctcgacctatctcacctcgttctgcttccacgccagcgtgcccagcctcgtgaagtacttcgggcgcaggcccgccgacatcaaccgctgtctcgtggggggcacgggcatcgccctcgtctgctacctgctgtggatagtggcgtgcgacggcaccatcccccgcgcggagttcagggatgtcatcgccgcaggcggcaacgtgggcgacctcgtgcgtgcggcaggttccaacctgaacagcgggttcatcctgcggatgctcgaagccttctctgcgcttgcggtggcgacgtcgtttctcggggcgggcttgggcctgttcgactacatcgccgacctgtgccgcttcgacgacacgcgcgccggacgcacgaagaccacgctggtcaccttcggccctcccaccgtgggcggtctgctgtggcctgacggcttcctgctggccatcggctgggcggggcttgccgccacggtgtggtcggtggtcgttcccgcactcatgctgcgggcgagtcgcgccacacgtcccgcgccgggctaccgtgtcggcggcggcagccttacggtgcctgcactgctggccttcggcctcgtcaccgccgtgtgccacacgctcttcgtcttcggtgtgctgcccatgtacaggtag

SEQ ID NO: 9965 - protein, 419 aa, Desulfovibrio vulgaris
MQNAAHRPGQNAAHRPGVFGGTMIIAGTSIGAGMLALPTISAGMWFGWSLAVMLLAWLVMLLSSQALLEVNLHFEPGASFHTLVRETLGPGWSVINGAAVAFVLYILVYAYVSGGGSIMRHTLLAVSGYEPSKLAAGLSFALLLAACVWWSTWIVDRLSVIMMGGMVVSFILSMSGMLSDIRADVLFDAGGEGGSALFVWGALSTYLTSFCFHASVPSLVKYFGRRPADINRCLVGGTGIALVCYLLWIVACDGTIPRAEFRDVIAAGGNVGDLVRAAGSNLNSGFILRMLEAFSALAVATSFLGAGLGLFDYIADLCRFDDTRAGRTKTTLVTFGPPTVGGLLWPDGFLLAIGWAGLAATVWSVVVPALMLRASRATRPAPGYRVGGGSLTVPALLAFGLVTAVCHTLFVFGVLPMYR

SEQ ID NO: 9966 - DNA, 1278 bp, Desulfovibrio vulgaris
  CDS (1)..(1278)
atgtcacagtgcatgacagccaacgggcagaccgccacgcaagccggggtgaagaatccctcggttcttggcggcgccatgatcatagccgggacgaccatcggcgcgggcatgttctcgctgccgagcgtctctgccggcatgtggttcttctattccctcttcgtcctgttcggcacgtggctttgcatgtgccattccggcctgatgatcctcgaggccaacctcaactatcccgccgggacatccttcgacaacatcgccaaggactgccttgccagacccgtgcggctgctgaacagcctctcggtggccttcgtgctctacattctcacctacgcctatatcagcggcggcgggtccatcgtcgcgcatacggtgaaggcggctgtgggcatcgacgttcccatgaagctgggcggcttcctcttcgcgcttgtgctcgcgttcgtcgtatggctgagcacccgcgccgtcgaccgcatctccaccatcatgctcggcggcatgatactcaccttcttctcgtcggtgagcggcctcatgttcaacgtgcagcccgctgtgctcttcgacaccggcgacaccagtgcgccatactcgcccttcatactcgccacgcttccctactttctcacctcgttcgggtaccacggcaacgtccccggactcgtgaagtactacaacaaggacccgaaggccgtcgccaagaccatcatctacggcagcttcctcggcctcattctctacgtgtgctggcaactcagcgtactgggcaacatcccgcgcgaggaattcctcgacatcgtcgccaagggcggcaacatgggcatcctcgtgggggcgctgtccaaggtcacaggcagcaccaacctcgactacctgctccaggtcttctcgcatcttgccgtggcgacctcgttcctcggcgtgacgcttggcctgttcgactgcatcgccgatacgctcggcttcgacgactcgcgtctcggacgtaccaagaccgccatcgtcaccttcgtgcccccggccattggcggcctgttctaccccgacggattcatcatggccatcggctttgccgggcttgcagccaccgtgttcgctgtcatcgtacccgccatgatggcactggccacacgcaggaagttcggcaacaccacctaccgcgcccccggcggcaacgtgatgctctatgtgaccatcgcctatggcatcaccgtggccatctgccatgtgctgaccatgttcgacatgctgcctgtctacggcaagtag

SEQ ID NO: 9967 - protein, 425 aa, Desulfovibrio vulgaris
MSQCMTANGQTATQAGVKNPSVLGGAMIIAGTTIGAGMFSLPSVSAGMWFFYSLFVLFGTWLCMCHSGLMILEANLNYPAGTSFDNIAKDCLARPVRLLNSLSVAFVLYILTYAYISGGGSIVAHTVKAAVGIDVPMKLGGFLFALVLAFVVWLSTRAVDRISTIMLGGMILTFFSSVSGLMFNVQPAVLFDTGDTSAPYSPFILATLPYFLTSFGYHGNVPGLVKYYNKDPKAVAKTIIYGSFLGLILYVCWQLSVLGNIPREEFLDIVAKGGNMGILVGALSKVTGSTNLDYLLQVFSHLAVATSFLGVTLGLFDCIADTLGFDDSRLGRTKTAIVTFVPPAIGGLFYPDGFIMAIGFAGLAATVFAVIVPAMMALATRRKFGNTTYRAPGGNVMLYVTIAYGITVAICHVLTMFDMLPVYGK

SEQ ID NO: 9968 - DNA, 951 bp, Oryza sativa
  CDS (1)..(951)
atgtgtgaactaggatctggaggtgtctccctggtctcaatggctatgcgcactctagggacatttggagtaagaacagcttgcatctcatatttgtttatacattatgcacttctggttgcatatgtggcacgctcttcagagatcataacaaactcagtgggcattccattatgggagagtgctgccctgttttcactggcttttggggggctatgctactttggaagccagcgagtcattggtgcggttaatggttttttggtgttcagcatcctagcatccttcacaactcttgtggtggtggcaagtggaaacctgcagtggagttctcttcttgaagcaaattttgctgctgccccacaaagtataccgataattgctctttcatttgtataccagaatgtagttcctgttctgtgtacaaatttggagggagacctatcaaaagtaaggaaggcaattgtagtaggtaccgccataccccttgctctgtttctcatatgggatgctgtaatcctggggacacttccaggccttgcaggggatggaaccattattgatccactagaacagcttcgatcaagtaatggaacagtggggcctattgttgaggcattctcatttcttgcaattggcacatcatacattggatttgttctaggactctcagacttcatagcagacttgcttaaactaccaggtggacagaacaaacctctgccgtaccttctgactttgctcccaccgcttgttctgtcattgcttgatccagagatatttttcaaggcattggactttgcaggaacttatggaggcaaggatccttttaaactatctcttattatgaatagatgtagagaagaaacatgtatagtcctatgctattttaaaatttattttactagaagacttgtcaagttgtcatgcaatgaaaccaaccaatcatga

SEQ ID NO: 9969 - protein, 316 aa, Oryza sativa
MCELGSGGVSLVSMAMRTLGTFGVRTACISYLFIHYALLVAYVARSSEIITNSVGIPLWESAALFSLAFGGLCYFGSQRVIGAVNGFLVFSILASFTTLVVVASGNLQWSSLLEANFAAAPQSIPIIALSFVYQNVVPVLCTNLEGDLSKVRKAIVVGTAIPLALFLIWDAVILGTLPGLAGDGTIIDPLEQLRSSNGTVGPIVEAFSFLAIGTSYIGFVLGLSDFIADLLKLPGGQNKPLPYLLTLLPPLVLSLLDPEIFFKALDFAGTYGGKDPFKLSLIMNRCREETCIVLCYFKIYFTRRLVKLSCNETNQS

SEQ ID NO: 9970 - DNA, 1215 bp, Vibrio vulnificus
  CDS (1)..(1215)
atgtcaaagcaaccctcgttaattgggggagcgtgcattattgccagcgtctgtgtcggcgctggaatgctcggcctccccagtgcaggggctggcgcgtggacgctctggtctctattggctctcactcttaccatggtcgtcatgacgctatctggttggctactgctcgaagcatttaaacactacgaactgcgggtctccttcaatactgtcaccaaagatatgctcggcagcaaagtaaactggttcaacaatttgatggtttactttgtgggtggcattttgctgtacgcttacatcacttcttctggtcttatcttgcaagatgttctgcaaatagacagtaaagtggcctctatcttgttcgttgcggtattttcggcttttgtttggcattcaacacgcgcggttgaccgtatctcggtcattctcattgtctttatggttctcagttttatctttggcgtttcagggttagcgatcaacgtcaaaacctccgttttattcgataccatcaatgagaatgccgattacgctccctacgccatggcgatgcttcccgttgctctaacctcttttggttatcaccattccgtctcttctatgcgctcttattacggcgaagaacgaaaagccaaatacgccattcttggcggaacgattattgcgcttagcctctatttcttatggttactgagcatcttcggcaacttacctcgctcagagtttggctcggtgatcgaacaaggtggcaatgtcgatgtgttgctcaaagcactgggttctgtgattgaatcagagaaggtctcgcaagcgatcaacgcattctcgatggcggcgattctctcctctttcattggcgttggattaggggtgtttgatttcttggctgatctgtttaagtttggcaactgcaagcgtggcagaagcaaaacttggctggtaacgtttcttccaccgttaatcttgtcgctactgttcccgtttggcttcattattgccattggttatgctggcgcggcggccaccgtctgggcttgtattatccctgtactgctcgcctacaaatctcgttcgatggagaatggctatcaaggctttgtggtaccaggaggcatgtcagtgctggttctggtactgggttttggtgtgttaaccgccatcttccatatgctggccatggccaacatgttgcccacatttacggggtaa

SEQ ID NO: 9971 - protein, 404 aa, Vibrio vulnificus
MSKQPSLIGGACIIASVCVGAGMLGLPSAGAGAWTLWSLLALTLTMVVMTLSGWLLLEAFKHYELRVSFNTVTKDMLGSKVNWFNNLMVYFVGGILLYAYITSSGLILQDVLQIDSKVASILFVAVFSAFVWHSTRAVDRISVILIVFMVLSFIFGVSGLAINVKTSVLFDTINENADYAPYAMAMLPVALTSFGYHHSVSSMRSYYGEERKAKYAILGGTIIALSLYFLWLLSIFGNLPRSEFGSVIEQGGNVDVLLKALGSVIESEKVSQAINAFSMAAILSSFIGVGLGVFDFLADLFKFGNCKRGRSKTWLVTFLPPLILSLLFPFGFIIAIGYAGAAATVWACIIPVLLAYKSRSMENGYQGFVVPGGMSVLVLVLGFGVLTAIFHMLAMANMLPTFTG

SEQ ID NO: 9972 - DNA, 1206 bp, Photorhabdus luminescens
  CDS (1)..(1206)
atgaagaatcgtactcttggcagtatttttatcgtagcgggcacgacaattggcgcaggaatgctggcgatgccgctggcagcagccggtgtcggttttggaacaaccttcgtgatgttaatcactctttgggttttgatgagctataccgctttattgttggtggaagtttatcaatacagcccggccgatacgggcctgggaacgctggcaaaacgttatcttgggcgaggaggccaatggctcaccggtttcagtatgcttttcctcatgtatgctctgacaaccgcttatatcagtggtgcaggtgagttgctgtcaggcagcctctcttcatggctggataaacctattcctgtttcatacggtgtgctgattttcactcttgtcgcgggttgtgttgtcactatcagtactcaatctgtcgatatgattaaccgcctgctatttacggcaaaaatcatctttctggttattatgctgaccgtcatgatgccccacatcaaaagcactaacttgatgtcaatgcctttggaacaaggtttggtattatcagctattcccgtggtattcacctcttttggttttcacggcagtgtgccaagtatcgtcaattatatgggaggtgatacccgtaagttacgcaaaatatttgttatcggcagtgctatcccactgactgcctatatcttatggcaattagccactctgggtgccatctcttcccatacttttgtcggcatcttagcggagcaatcagggctgaatggactgttaaaagcggtgagagaagttgtcgcgacgcctcgtgtagagcttgctgtccgtctgtttgctgatttggcactggcaacctcatttcttggggtctccttaggtttgtttgactatatggcagatctgttcaaacgccgtaataatgcgacaggccgcctgcaaaccggcatcatgacttttgttccaccactactttgctccttgtactatccaaactttgttatggcgttaactttcgccgcagttgcactgtccattctcgccctgttactgccttccatgctggcttggcgcagtcgtcaaattgaacaaaaagcctatcgggtaaaaggcggaaaacccgttctgattctggtatttctttgcggaattacggtcattaccatccagataggtattgtcagtggtttactgccagaagtaggttaa

SEQ ID NO: 9973 - protein, 401 aa, Photorhabdus luminescens
MKNRTLGSIFIVAGTTIGAGMLAMPLAAAGVGFGTTFVMLITLWVLMSYTALLLVEVYQYSPADTGLGTLAKRYLGRGGQWLTGFSMLFLMYALTTAYISGAGELLSGSLSSWLDKPIPVSYGVLIFTLVAGCVVTISTQSVDMINRLLFTAKIIFLVIMLTVMMPHIKSTNLMSMPLEQGLVLSAIPVVFTSFGFHGSVPSIVNYMGGDTRKLRKIFVIGSAIPLTAYILWQLATLGAISSHTFVGILAEQSGLNGLLKAVREVVATPRVELAVRLFADLALATSFLGVSLGLFDYMADLFKRRNNATGRLQTGIMTFVPPLLCSLYYPNFVMALTFAAVALSILALLLPSMLAWRSRQIEQKAYRVKGGKPVLILVFLCGITVITIQIGIVSGLLPEVG

SEQ ID NO: 9974 - DNA, 1260 bp, Photorhabdus luminescens
  CDS (1)..(1260)
atgtccactgagacaccccagagtttaaagcgccctcccatactgggtggtgcaatgatcattgccggaactgctgtcggtgcaggaatgttctctactcctgtggcaacttccggtgtctggtttactggctcaattattctgctggtttacacatgggtgtgtatgtatttctccggcttgatgatactagaaaccaacctgaactacccatcaggtgcaagcttccataccatgactaaagatttactcggtaaaggatggaatgcaatcaatggtatctctattgcattcgtgctttatatattaacctacgcctatatttcagcgggtggctcaattattgcccacaattttaaaaatattatttcgatatcacaggcaaatgctggctttattttcgcttttatcgttgcatttattgtctggttatcgactcaagctgtcgatcgtttgagcacaattttgatcggcggtatggttattactttttttatgtccgttggcggcatgtttaccgaagttaaatatgtcattttgtttaatcagacggatactacatcaaacgacacggcaacaagttatatatcttacgctttaaccgctctaccctatttactcgtttcattcggatatcacggtaacatcccaagtttagtaaaatattatcataaagatagaaaagccgttattcgcagcctgttattaggtacattaatcgcattaactatttatatcctatggcaatatgtcattcagggaaatattccccgcgaagcattcaaacagattattgctgatggcgggaatatcggtgatttattaaaacacatggataatacaacaaacagcaaaaccgttcaccagcttctaaatgccttctcttatatggcattagcaagttcatttcttggtgtctctttagggctatttgattacatagccgatttcttcggttttaaagataacaacaccggccggttaacatctgcattagtgacatttattccgccaacagcgctagctttactgttccccaatggttttctatatgccattggctttgctggattcgctgcaaccatctgggctgtcattattccagcactgatggctagggcaagtcgccagcgcttccctgaagccagttaccgagcaccaggagggaaattcctcattgggttcgtcattctgtttggtttgataaatgctatagcccatattttgtcctctcttgatttattacctgtgtatcattga

SEQ ID NO: 9975 - protein, 419 aa, Photorhabdus luminescens
MSTETPQSLKRPPILGGAMIIAGTAVGAGMFSTPVATSGVWFTGSIILLVYTWVCMYFSGLMILETNLNYPSGASFHTMTKDLLGKGWNAINGISIAFVLYILTYAYISAGGSIIAHNFKNIISISQANAGFIFAFIVAFIVWLSTQAVDRLSTILIGGMVITFFMSVGGMFTEVKYVILFNQTDTTSNDTATSYISYALTALPYLLVSFGYHGNIPSLVKYYHKDRKAVIRSLLLGTLIALTIYILWQYVIQGNIPREAFKQIIADGGNIGDLLKHMDNTTNSKTVHQLLNAFSYMALASSFLGVSLGLFDYIADFFGFKDNNTGRLTSALVTFIPPTALALLFPNGFLYAIGFAGFAATIWAVIIPALMARASRQRFPEASYRAPGGKFLIGFVILFGLINAIAHILSSLDLLPVYH

SEQ ID NO: 9976 - DNA, 1209 bp, Photorhabdus luminescens
  CDS (1)..(1209)
atgaagaaccgtacttttggcagtacttttattatcgccggaacaaccatcggtgctggtatgctagccatgccattagccaccgccggtgtaggatttggtgtaagtttgatcatgttggttagcttgtgggttttgatgagttacaccgcattattgctggttgaaacttaccaatatgaatcccctgatacggggttagggacacttgctcaacgttatcttggcagcagcggcaaaatattagccggtttcagcatgatgtttctaatgtatgcattaacatcagcctacattagtggcgcaggggaattactgacagtcagcctcaacaaatggctgaatctatctcttcctgcctcagtcggtgttatcctgtttaccgtgattggtgggggagttgtttgcattggtacccgttcagtagatatggttaaccgagttatttttggtgcaaaaattattttcttggtattaatgttggggatgatgatgccgcatgttcagcatattaacttactgaccatgccattagaacaaggattaatactatcttcaattccggtgatattcacctcgtttggttttcacggtagtgttcccagtattgtgaaatatatggatggcgatatccgtcgactccgctgggtgtttatcatcggcagcgcaattccgctaattgcttatattctctggcaattggcgacactcggaagtattaattccagcacattcgtcaatattttagctgaaaacgcagggttgaatggcttattacacagcattcgcgaagttgttgcttcaccgaaaactgagcttgcagtacaaatgtttgccaacctggcgctcgcaacctcattcctcggtgtcacacttggcctgtttgattttctgggtgatctatttaaacgcaaaaatagcgtagccgggcgtatgcaaactggtttgttaactttcgttccgccattgattttcgcgctattttacccaaaaggatttgtaatggcgttaggatatgccgcggtcgcgctatcaattttggcgttagtattgcctagcctcctggcatataaatcccgccagcaaaatgaacgtcgatatcgggtacctggtggtaagcctgtactattactggtgtttgcctgcggtattgcagtaatagcaatccaaattggcatagtcagtggaatgttgccggaagtagggtga

SEQ ID NO: 9977 - protein, 402 aa, Photorhabdus luminescens
MKNRTFGSTFIIAGTTIGAGMLAMPLATAGVGFGVSLIMLVSLWVLMSYTALLLVETYQYESPDTGLGTLAQRYLGSSGKILAGFSMMFLMYALTSAYISGAGELLTVSLNKWLNLSLPASVGVILFTVIGGGVVCIGTRSVDMVNRVIFGAKIIFLVLMLGMMMPHVQHINLLTMPLEQGLILSSIPVIFTSFGFHGSVPSIVKYMDGDIRRLRWVFIIGSAIPLIAYILWQLATLGSINSSTFVNILAENAGLNGLLHSIREVVASPKTELAVQMFANLALATSFLGVTLGLFDFLGDLFKRKNSVAGRMQTGLLTFVPPLIFALFYPKGFVMALGYAAVALSILALVLPSLLAYKSRQQNERRYRVPGGKPVLLLVFACGIAVIAIQIGIVSGMLPEVG

SEQ ID NO: 9978 - DNA, 1245 bp, Photorhabdus luminescens
  CDS (1)..(1245)
atggctactttgccgataaaaaaatcgtctccatctttatttggcggtgccatgatcattggtggaacggttattggtgcgggcatgttttctttaccagttgtcatgtcaggggcatggttttactggtcaattgccactttgatttttacctggttttgcatgttgcattcaggattaatgatattggaagccaatcttaattatcgaattggctcaagtttcagtactataacaaaagatctgttgggcaatggttggaatatcattaatggtattacccttgcttttgttttatatatactgacttacgcttatatttccgcgagcggatcgattattcaacatgctatgcgagaagtatcgatagatttttcacctgggtttgctggttttttatttgctcttgtggttgcatttattgtctggttaagtactaaaacggttagccggatgacgtcgattattcttggtgctaagatattaactttctttatgacgttcggcggtttggtttataacgttaaaccagcggtattgtttaatacaactgaagttaatccaacttactggccttatgtattaatgactttacctttctgtctggcctcctttggatatcatggtaatgttcctagcctgatgaaatattatggaaaagaaccagagaaaataaagagatgcctgtttattgggacatcaatggccttggtgctttatttgatctggttgattggaacaatgggaaatatttcccggcctgattttgtcgaaatcatcgcaaaggggggcaatattgatgttttggttcaatcattaagtggaggattgaacagttctgctctgggtttattattgactcttttttctaactttgcggttgccagctcattccttggtgtcacgcttgggttgttcgattacctggctgatctgcttaaatttgatgacaccaagctggggcgctttaaaacggcattagtgacgtttcttccgccaatggttggtggaatgatttatccgaatggttttattcatgcgataggttttgctggccttgctgcaacagtttgggcggctattgttcccgcattacttgccagagcatcccgtaaacgatttggtagccctatgtatcgagtttggggaggtaatgtgatgatcggcttgattttgctatttggcgtactaaatgctgcggcccatatcttgtcaaattttaacctgctgcccgtttattcataa

SEQ ID NO: 9979 - protein, 414 aa, Photorhabdus luminescens
MATLPIKKSSPSLFGGAMIIGGTVIGAGMFSLPVVMSGAWFYWSIATLIFTWFCMLHSGLMILEANLNYRIGSSFSTITKDLLGNGWNIINGITLAFVLYILTYAYISASGSIIQHAMREVSIDFSPGFAGFLFALVVAFIVWLSTKTVSRMTSIILGAKILTFFMTFGGLVYNVKPAVLFNTTEVNPTYWPYVLMTLPFCLASFGYHGNVPSLMKYYGKEPEKIKRCLFIGTSMALVLYLIWLIGTMGNISRPDFVEIIAKGGNIDVLVQSLSGGLNSSALGLLLTLFSNFAVASSFLGVTLGLFDYLADLLKFDDTKLGRFKTALVTFLPPMVGGMIYPNGFIHAIGFAGLAATVWAAIVPALLARASRKRFGSPMYRVWGGNVMIGLILLFGVLNAAAHILSNFNLLPVYS

SEQ ID NO: 9980 - DNA, 1227 bp, Haemophilus ducreyi
  CDS (1)..(1227)
atgattatgaataaaactttaggcagtacattattggtttcagggacgatgattggtggcggtatgttggctatgccattgacgtcagcaggtattggtttttgtttaactttagtattattggtcgtgctgtggatattgcttacttatagtgccttattatttgtggaagtatatcaaactgcagaacatgatgttggtattggcacattagcggcgcgatattttggtaaaacaggacgagtcattgctacgttagtattaatggtctttttgtatgcgttgttatccgcttatgttacgggcggtggtaatattttagcgtcaatgtttccagctgcgcctgatcatttaatgacagagaaagagaaaattgcgatagtcatgtttacgataatttttggtgcttttattgtttttggcactagaagtgttgatggtattaaccgttttctgttttttattatgttagccggtttagcgttggtactgtttgctttaatgccttttattcagatagataatttactcgcaatgcctgtggataacttattattagtttctgctagcccgatctttttcaccgcttttggatttcatggctctattccaagtttaaataattatttaaatggtaatgtgaaagcattacgttttgctattatagttggttcattgattaccttaatggtttatattttatggcaaatggcgacccacggtttattaagtcaaaccgcatttcttgatatcttacagaaagatccaaccttgaatggtttagtcgtggcaacggcgcaaacaactggcagtaatattattggttatatagtgaagtttttctcggcatttgctttaatcacttcttttttgggggttgcgcttggcttatttgaatgtattaacgatttattaaagcaatcgtttaattttgcatcaaatcgtttaaatgttggcttactgactttctcgccaccattattatttgcattgttttatcctgaaggctttgtgttagctttacgttatgctgggcaaatgtttgcgttttatgctgtagtgttgccggtgttattagtttggaaagttcgtcaactacaccctaatttgccttatcgagtatggggcggcaatgtattactctggttagtggctttacttggtattgtcatcacgtgcattccttttatggtaaaaacaggttgtttacctacagtggtagggtag

SEQ ID NO: 9981 - protein, 408 aa, Haemophilus ducreyi
MIMNKTLGSTLLVSGTMIGGGMLAMPLTSAGIGFCLTLVLLVVLWILLTYSALLFVEVYQTAEHDVGIGTLAARYFGKTGRVIATLVLMVFLYALLSAYVTGGGNILASMFPAAPDHLMTEKEKIAIVMFTIIFGAFIVFGTRSVDGINRFLFFIMLAGLALVLFALMPFIQIDNLLAMPVDNLLLVSASPIFFTAFGFHGSIPSLNNYLNGNVKALRFAIIVGSLITLMVYILWQMATHGLLSQTAFLDILQKDPTLNGLVVATAQTTGSNIIGYIVKFFSAFALITSFLGVALGLFECINDLLKQSFNFASNRLNVGLLTFSPPLLFALFYPEGFVLALRYAGQMFAFYAVVLPVLLVWKVRQLHPNLPYRVWGGNVLLWLVALLGIVITCIPFMVKTGCLPTVVG

SEQ ID NO: 9982 - DNA, 1218 bp, Haemophilus ducreyi
  CDS (1)..(1218)
atgaaaaataaaatattaggcagtgcattaatgattgccggcacaacgattggtgcgggaatgcttgcaatgccattaacttcagcaggaatgggctttggcgcgaccttgtttttgttgattagtttgtggggattattagcttacactggattattgtttatggaagtctatcaaactgcaccaaaacgcgatgtcggtgtggctagtttagctgagcaatattttggtattgttggacgtgtacttgcgactgctactttattagttttactttatgctttattagccgcctatattacaggcggtggctcattattatccggtattttgcctgaaataatggatagtcaattaaccaacaagatcgctatcttattattcactactttattaggtacttttgtcgtggtgggtattaaaggggtagatggattaactcgtgtgctatttatgggcaaaattatagcgtttttacttgtattagcaatgatgttaccaaaagcaaaaattgagaatttatttgctatgccactggataacttattggttatttctgtggtgccaatttttttcacatcatttggttttcacgtaattatggcaagcattaataattacttagaggcggatatcggtaaaattcgcattgcaatttatattggtaccgctattccattaattgcttacttattatggcaattagcaacgcatggcgtattaacgcaagccgaatttgttgaaattttaaagtcagatccaagcttaaatggtttagtaaaagcaactagtcaaattacaggaagtacatttttaggtgaaatgttgcgtttattttctgccttagcattaattacgtcatttttaggcgttgctatgggtatttttgaatgtatcggcgatttattaaaacggattaatttacccacaaatcgtttagtattaacattagtaacctttattcctcctttattatttgctttattttatcctaatggttttattgcagcattaggttatgccggtttattatttgctttttacggaatgttattaccaatagggcttgcatggcgagcacgtaaattacaccctaatttaccttatcgcgtctcgggggggaatagcgcattgctgattgcattattaatgggcattattattatgattattccatttttaattcaatttggttatctaccacaagtaatgggctaa

SEQ ID NO: 9983 - protein, 405 aa, Haemophilus ducreyi
MKNKILGSALMIAGTTIGAGMLAMPLTSAGMGFGATLFLLISLWGLLAYTGLLFMEVYQTAPKRDVGVASLAEQYFGIVGRVLATATLLVLLYALLAAYITGGGSLLSGILPEIMDSQLTNKIAILLFTTLLGTFVVVGIKGVDGLTRVLFMGKIIAFLLVLAMMLPKAKIENLFAMPLDNLLVISVVPIFFTSFGFHVIMASINNYLEADIGKIRIAIYIGTAIPLIAYLLWQLATHGVLTQAEFVEILKSDPSLNGLVKATSQITGSTFLGEMLRLFSALALITSFLGVAMGIFECIGDLLKRINLPTNRLVLTLVTFIPPLLFALFYPNGFIAALGYAGLLFAFYGMLLPIGLAWRARKLHPNLPYRVSGGNSALLIALLMGIIIMIIPFLIQFGYLPQVMG

SEQ ID NO: 9984 - DNA, 1200 bp, Haemophilus ducreyi
  CDS (1)..(1200)
atgcaaaaacaaccttctatttttggcggcgcctgtattattgctggtgtatgtgttggagccggtatgctcggcttacctacttcaggtgctggagcatggacaatttggtcaattattagcttaacattaacaatgattgttatgacactatctggttggctcttactcaatgtttaccaaaattatgatgcacgcgcctctttcaatacggtaacaaaagatttgttaggcaataacattaatattgtaaataatcttgccgtttattttgttggtggcattttactttatgcctatacaaccgcttctggtgggattttatctaacctaaccaactcaacttttgaattaggtgaatacagtaatcgaatttggtcaactatttttgtctttatcttttcattctttgtatggcattctactcgcttagttgatcgtatttcagtgctattgatcctgtttatggcattttcttttgcctttagtatttctggattagtgatcaatatcgatctgccaacgttatttgaccaacaaaatcagcaaggcgaatacgctaaatatgcgttagcaatgttccctattgctttaacgtcttttggttatcatcactcagtatcatcaatgcgcgcctattatggtgaagaacaaaaagcaaaatatgcgattgcaagcggtacatttattgctttaattctctatttattatggattataagtattttgggcaacttaccgcgtcaacaatttattcccattattgctagcaatggtgatttagaaatattactcaatactgtcggtaaagttgttgaatcaccttatgttcgccaagcgattaatgctttttcaatggccgctattctttcttcttttattggtgttggtttggggacctttgattttttagctgatttctttaaatttgataacagtaaaatgggtcggatgaaaagctgggcggcgacttttctaccgccgttagtattttcattaattgcaccgcttggtttcttaaaagcgatcggttatgccggtgctgtcgcaacattatggacctgtattatccccgctttattagcctataaagctcgaaaagggcatttattggtgattacgttggtcttgctatttggtgtttgtacggcaattttccatttccttgcgatgtttgaaattttacctgtcttcaattaa

SEQ ID NO: 9985 - protein, 399 aa, Haemophilus ducreyi
MQKQPSIFGGACIIAGVCVGAGMLGLPTSGAGAWTIWSIISLTLTMIVMTLSGWLLLNVYQNYDARASFNTVTKDLLGNNINIVNNLAVYFVGGILLYAYTTASGGILSNLTNSTFELGEYSNRIWSTIFVFIFSFFVWHSTRLVDRISVLLILFMAFSFAFSISGLVINIDLPTLFDQQNQQGEYAKYALAMFPIALTSFGYHHSVSSMRAYYGEEQKAKYAIASGTFIALILYLLWIISILGNLPRQQFIPIIASNGDLEILLNTVGKVVESPYVRQAINAFSMAAILSSFIGVGLGTFDFLADFFKFDNSKMGRMKSWAATFLPPLVFSLIAPLGFLKAIGYAGAVATLWTCIIPALLAYKARKGHLLVITLVLLFGVCTAIFHFLAMFEILPVFN

SEQ ID NO: 9986 - DNA, 1188 bp, Chlamydophila caviae
  CDS (1)..(1188)
atgtctaacaaggttttaggaggttcccttattgttacagggaccgccataggagctggtgtgttagcagttcctgtaataacagcgtatgcaggttttctccccacgactcttctttatgtgctatcttggcttttctctgtggcatccggactttgttacctcgaaattatgacttggtttaaggaaaagcaacaagttaacttgttgtcgatggcgcaatataccttaggggatattggtaagatcttcatgtggctcctttacctgttcctattttactctttgcttattgcttacttttgtgagggagggaatatcctatttcgtatttttggttgtcagggattagacattccttggatacgtcacatggcccctttggcatttgcagttttgatttgccctgcattgatgatgggagcaaaagttgtagattactgtaatcgcttttttgttttaggattagctattgctttcgcggtattttgtatcttaggagttttttctttacaaccccagctacttttacgtgcttcgtgggcgcgctctacagaaggtttatctgttctgtttctctcctttggtttccacaatgtagtgccctcactgtattactacatggataagaacgttaaagatgttaaaaaagctatctttattggtagtttgattcctttgattttatacgtgatttgggaggctcttgttttgggagttgttcctttagactttcttatgaaagctaaggaacatggctatacagcagtagaggctatgaaaacttcattgcagtgttcaatgttttatcttgctggggagttttttggtttctttgctttagtttcttcatttttaggcgtggctctgggggttatggacttcctcgcggatgctcttcaatggaataaaaagaaacgtagtttttctattttctttttaactgttattatccctttagcttggtcaatgtgctatcccgagatcgtgcttaaatgtctcagttatgctggaggtttcggcgctgctttaattatcggagtttgcccagtgttaatgatctggaaagggcgttatgggaaaaaacattatcaagcaaaacatttagtcccaggtggaaaaattgtcttggtattaatgcttgtagtaatagtaattaatttagctagcttttattacaaattttaa

SEQ ID NO: 9987 - protein, 395 aa, Chlamydophila caviae
MSNKVLGGSLIVTGTAIGAGVLAVPVITAYAGFLPTTLLYVLSWLFSVASGLCYLEIMTWFKEKQQVNLLSMAQYTLGDIGKIFMWLLYLFLFYSLLIAYFCEGGNILFRIFGCQGLDIPWIRHMAPLAFAVLICPALMMGAKVVDYCNRFFVLGLAIAFAVFCILGVFSLQPQLLLRASWARSTEGLSVLFLSFGFHNVVPSLYYYMDKNVKDVKKAIFIGSLIPLILYVIWEALVLGVVPLDFLMKAKEHGYTAVEAMKTSLQCSMFYLAGEFFGFFALVSSFLGVALGVMDFLADALQWNKKKRSFSIFFLTVIIPLAWSMCYPEIVLKCLSYAGGFGAALIIGVCPVLMIWKGRYGKKHYQAKHLVPGGKIVLVLMLVVIVINLASFYYKF

SEQ ID NO: 9988 - DNA, 1281 bp, Coxiella burnetii
  CDS (1)..(1281)
atgattatggaacccccaaatatcctcttcgatgaatctcaagacgtcacattcgtcaatgagattgaatccccaaaagctgaaacgactcgcggaaaagtttttggcgctattttattaattattggcacatcggtcggcggaggcatgttggctttgcccatggcaatcgctgccggtggctattatcactccattttcttattttttggcgcttggctaatcacggtgttggccgctttttacattttagaagctaatttatggctgccggaaaatacgaatctcatttcaatggcgcgaataacgctgggcaaagcgggtcagttaatcacctggattagctatttattgttgttatatacgctattagctgcctacatgtctggcgggaccgatttaattcacaatttactgtcattaattaatatccccacgccgacgtggctggattcgattttattcgttgtgattttaggtgcagttttgttttatggggtgcgcgccgtggattgggtcaaccgcggtttgatgtcaacgaaattagcggtttattttttactggtcttatttatttcgccgcacatcgatgtgggcaaactttctggcggtcgtttagcacttttatccggggcggtcatggtgattatcacttctttcggttatgccactattgtgcctactttgcgaagttatttgaaaagccaagtcaatgccttgcgattaacgatcgccatcggaagcctaatgccgttaattttatatttattatggactttcgttgtcaacggaacgctgggaagccatggagctaatggtttaattcacatggccgcttccaccgacgccgtgagcgaattaagtaatactttatctgctcacgtaaatggcgaacttgtgaaaggattaatccacttttttacttctatttgtatcgcgacttcttttctcggggtctcgttgtgcttatcagattttatggcggatggtttaaaaattaaaaaagaaaaaaacggccgctggttattggttgcattaacccttgcgccgccgcttttagtcattctgttttatccaggcgctttcattgcaagtttaaattacgccggcgttttatgcgtcattttacttatcttcttgcccgcattaatggtctggagcggccgttatgttaaaaagatcgctatcggttacgaagtcatcggcggaaaaacatttattatccttgaaatcctcgtcgcccttgcgttgctgatttttgcgttaatgcatttagggtga

SEQ ID NO: 9989 - protein, 426 aa, Coxiella burnetii
MIMEPPNILFDESQDVTFVNEIESPKAETTRGKVFGAILLIIGTSVGGGMLALPMAIAAGGYYHSIFLFFGAWLITVLAAFYILEANLWLPENTNLISMARITLGKAGQLITWISYLLLLYTLLAAYMSGGTDLIHNLLSLINIPTPTWLDSILFVVILGAVLFYGVRAVDWVNRGLMSTKLAVYFLLVLFISPHIDVGKLSGGRLALLSGAVMVIITSFGYATIVPTLRSYLKSQVNALRLTIAIGSLMPLILYLLWTFVVNGTLGSHGANGLIHMAASTDAVSELSNTLSAHVNGELVKGLIHFFTSICIATSFLGVSLCLSDFMADGLKIKKEKNGRWLLVALTLAPPLLVILFYPGAFIASLNYAGVLCVILLIFLPALMVWSGRYVKKIAIGYEVIGGKTFIILEILVALALLIFALMHLG

SEQ ID NO: 9990 - DNA, 1158 bp, Vibrio parahaemolyticus
  CDS (1)..(1158)
atgaacctaaaacttgtcggcagctccctgatcgttgcaggtactgctcttggcgctggtatgcttgccatacctatggtgcttgctcaatttggcctcctttggggcactcttcttatgttgttcatctgggctggaacgacttatgccgctttgcttctacttgaagcgagttgcaaagtcggtggtggcgtaagtatgaacgcaatcgcccgcgaaacacttggtaaaggcggtcagttagtgactaatggtctgctttacgcgttgcttgtttgtctattgatggcttacatcattggcgctggcgatctagtgcaaaaaatcacggcatcagtcggcctctctgtttccactgtttctagccaagttggctttaccatcttagtgggtctgattgtttctgctggcactggtgtggtcgacaagcttaaccgtggtctgtttatcggtatgattgttgcgcttgttttaacgctgtttgctcttgctcctagtgtttcattcgaaggcctaaacgaagtcgttagtagcgacaaaatggcactgatcaaaaccagttctgtgctattcaccagttttggctttatggtcgtcattccttcgttggtgacttacaacaaagaagcgagcaaaactcagctgcgcaacatgatcgttgtcggctctacgattcctttggtttgttacctattgtggttgtttgcggttgtgggtaacttgccgccacatgagctggtacagtactcaaacgtcactgaacttatctcggttcttggtcaacagtacaatggcttggagtttattctgtccatgtttactggtttggcgttgctaacttcattcttgggtgtggcaatggcgctttacgaccaaaacgcggacttgctcaaaaccagcaagccagtggtattcgtcaccacatttattctgccgctacttggtgctgtatttgctccggaacatttcttagcaattttaagctacgcaggcattattcttgtgttcttggcggtttttgttccattgtcgatgacaatgaaagtgcgccgtgtacctgtcgaagacaacagcgtttatgaagctggtggtggtgtgatgggcatgagtatgatcttcctgtttggctgtttcctactatttgcgcaagctgtgtaa

SEQ ID NO: 9991 - protein, 385 aa, Vibrio parahaemolyticus
MNLKLVGSSLIVAGTALGAGMLAIPMVLAQFGLLWGTLLMLFIWAGTTYAALLLLEASCKVGGGVSMNAIARETLGKGGQLVTNGLLYALLVCLLMAYIIGAGDLVQKITASVGLSVSTVSSQVGFTILVGLIVSAGTGVVDKLNRGLFIGMIVALVLTLFALAPSVSFEGLNEVVSSDKMALIKTSSVLFTSFGFMVVIPSLVTYNKEASKTQLRNMIVVGSTIPLVCYLLWLFAVVGNLPPHELVQYSNVTELISVLGQQYNGLEFILSMFTGLALLTSFLGVAMALYDQNADLLKTSKPVVFVTTFILPLLGAVFAPEHFLAILSYAGIILVFLAVFVPLSMTMKVRRVPVEDNSVYEAGGGVMGMSMIFLFGCFLLFAQAV

SEQ ID NO: 9992 - DNA, 1206 bp, Vibrio parahaemolyticus
  CDS (1)..(1206)
atgagtcgttctaaagtgtttggtagtaccttaattattgctggtactacaattggggctggtatgctagctcttcctcttgcctccgctggcattggttttactacatcactgatcatcatgttgagtttgtgggcattgatggcctttactgcgttactgatgcttgaacttcaccaatatgctgaaagtagtgcaacacttcataccttggcgaaacaaatccttggtcaaaagggtaaatgggttgccagttttgcgatgctatttttgttctactcattgtgtgcggcatacatcgctggtggtggtgcccaatttggtgaccgcttatctcagtggtttgagttagacatttctggcccgacagcgacagtgattttcactctgatcgttactttagtggtgactataggtacaggaacagttgataaagtaaaccgtgtgttgtttgcgttaaagctagtcgcaatggttgcggtactgtcatttttagcgccaaacgttaccgagtcatacttgctaagcatgcctatcgaacagggacttattgttgcggcgattccagtgattttcacatcgtttggtttccacggcagtattcctgcaatcgtaaactacctagatggcgatacgtcatctttgcgcaaagcggttattgttggttcgacgattcctttagttatctacattttctggcaaatcgttaccttaggcgtagtaagccaagatgcgcttattgaaaacggtggcttgagtgcacttattggtcaattatctcaaactgttcacaaatccaacttgagcagcattgtaggtgtatttgccgatcttgcacttctcacctcgtttttaggtgtgagcttaggtttgttcgaatttttaggtgatacgatcaaaggcaaaagtgagaaaccaaatcgcttgttagctgcagtgattacgtttactccaccacttggttttgcgcttttttacccacaaggctttattatggcgctgggttacgcggcaattgcattggctattcttgcgattttccttcctcttgtcatggtgatcaaggttcgtcgttccgatgatttctcaggtgaatatcgtgtcgcaggtgggcaaggagcgctggtcgtcactggtatagcgggtacgggcatcgttttagcgcaagtgctaattactttaggtgtattacctgctctaggttag

SEQ ID NO: 9993 - protein, 401 aa, Vibrio parahaemolyticus
MSRSKVFGSTLIIAGTTIGAGMLALPLASAGIGFTTSLIIMLSLWALMAFTALLMLELHQYAESSATLHTLAKQILGQKGKWVASFAMLFLFYSLCAAYIAGGGAQFGDRLSQWFELDISGPTATVIFTLIVTLVVTIGTGTVDKVNRVLFALKLVAMVAVLSFLAPNVTESYLLSMPIEQGLIVAAIPVIFTSFGFHGSIPAIVNYLDGDTSSLRKAVIVGSTIPLVIYIFWQIVTLGVVSQDALIENGGLSALIGQLSQTVHKSNLSSIVGVFADLALLTSFLGVSLGLFEFLGDTIKGKSEKPNRLLAAVITFTPPLGFALFYPQGFIMALGYAAIALAILAIFLPLVMVIKVRRSDDFSGEYRVAGGQGALVVTGIAGTGIVLAQVLITLGVLPALG

SEQ ID NO: 9994 - DNA, 1206 bp, Vibrio vulnificus
  CDS (1)..(1206)
atgagccgttcaaagatttttggtagtactttgattattgcaggcaccactattggtgctggaatgcttgcattgccccttgcttcagcagggattggtttttccacctccgtcatgattatgatcggcttttgggttttgatgtcgtataccgcgttgttgatggtggagctccatcaagaggcagatagaagtgcgacgctgcacacgctggcaaaacaaattctaggcacgaaaggaaaatgggttgccagtttcgctatgctgtttctgttttacgcgctttgcgcggcttacattgctggtggtggtgcgcagtttggtgaacgcgttgctgcttggttttccatcgaaatggatgcctctgtggcaacggtcatttttaccgtgattgtggctgcggtggtgaccagtggcacggcgaccgtcgataaagtaaaccgcgttttatttggtttgaaaatggttgccatggtcgcggtgcttttctttcttgctcctaacgtgacggaatcttacttgctcagtatgccgattcaacaagggttgattgtcgctgctctgccagtcatttttacgtcgtttggtttccacagcagcattcctgctattgtgaattaccttgatggggacaccaaagcgctgcgcaaagcgattgtcattggctcgtccatccctctggttatttatgtgttctggcaactggtcacgcttggcgtggtgaatcaagaggtactgcttaataactcagggttgacggcgttgattgcccagttggccgcgaaagttcagcaatcttacttaagccaattggtaggcgtgttcgcggacttggcactgttaacctcatttttaggggtgagcctaggtttgtttgagtttcttggcgatgtcatcaagaagagtggtcagaaacaaaatcgcgtcattcctgctgtggtgacatttacaccgccgctgatgtttgcgcttttctacccacagggcttcattatggcgcttggttacgccgcaattgcattggctgttttggcgattttcttgccggtggtgatggtaaacaaagtacgtaaatcaccagagaagcaggggagttaccaagtggctggtggacaattagcgctaacgctcacaggtgtgaccggggttgtgattgttgctgctcagatcctgataaccgttggggttctgcctgcgttagggtaa

SEQ ID NO: 9995 - protein, 401 aa, Vibrio vulnificus
MSRSKIFGSTLIIAGTTIGAGMLALPLASAGIGFSTSVMIMIGFWVLMSYTALLMVELHQEADRSATLHTLAKQILGTKGKWVASFAMLFLFYALCAAYIAGGGAQFGERVAAWFSIEMDASVATVIFTVIVAAVVTSGTATVDKVNRVLFGLKMVAMVAVLFFLAPNVTESYLLSMPIQQGLIVAALPVIFTSFGFHSSIPAIVNYLDGDTKALRKAIVIGSSIPLVIYVFWQLVTLGVVNQEVLLNNSGLTALIAQLAAKVQQSYLSQLVGVFADLALLTSFLGVSLGLFEFLGDVIKKSGQKQNRVIPAVVTFTPPLMFALFYPQGFIMALGYAAIALAVLAIFLPVVMVNKVRKSPEKQGSYQVAGGQLALTLTGVTGVVIVAAQILITVGVLPALG

SEQ ID NO: 9996 - DNA, 1245 bp, Shewanella oneidensis
  CDS (1)..(1245)
atgaatgcggtaaaaaataagccggtagggaagtctctgctcggtggcgccatgattattgcggggaccactgttggggctgggatgttttcattgcccgttgttggctcaggcatgtggtttggctattcgatattgatgttgctgggtatttggttttgtatgttgatgtcggggctgttactgctcgaaaccaatttacatttcgagccaggcgcaagtttcgataccctcaccaaggaaaccctaggccagttctggcgtatagtgaacggggtttctatcgcctttgtgctctatatcttaacctacgcctatatcagcggtggtggttcgatagtaaaccatagcctacaggggatggggattgaactaccccaaagtgttgccggattagtgtttaccgtggtgctcgcctgtatcgtgttgattagcactaaggctgtcgatcgcattacaaccattatgctaggtgggatgatcatcactttcttcctcgcgattggtaatctactgattgagatcgatgtgactaagttactcgagccggatggaaatcaacgttttataccatatctatgggttgcattgccctttgggctcgccagttttggttatcatggcaacgtgcctagcttggtgaagtattacggcaaagattcctctaccattattaaggccatttttgttggtacttttatcgcgttgattatttacgtttgttggttagtggcgactatgggcaatattccccgcagccaatttagcgagattattgcccaaggtggcaatatgggggtgctcgtcggtgcgctgtcaaaagtgatggaaagtagttggttaaacagtatgttaacgctatttgccaacttagccgtcgcttcatctttcctaggtgtcacactcggtttattcgattacctagccgatttgtttggttttgatgattcgcgctcaggccggatgaaaaccgcgattgttacctttgtgccgccaacagtattcggtttgttattccccgatggctttttgattgctatcggttttgctgctttagcggcaaccgtgtgggcagtgatagtgcccgcgctgatggcttataagtcgaggcaactctttcccaatcaccaaggttttagggtttttggtggcacgccgctgattatccttgtggtgttgtttggtgtggtgacgggggcttgccatttactggcaatggcgaatttattgccgcagttttcctaa

SEQ ID NO: 9997 - protein, 414 aa, Shewanella oneidensis
MNAVKNKPVGKSLLGGAMIIAGTTVGAGMFSLPVVGSGMWFGYSILMLLGIWFCMLMSGLLLLETNLHFEPGASFDTLTKETLGQFWRIVNGVSIAFVLYILTYAYISGGGSIVNHSLQGMGIELPQSVAGLVFTVVLACIVLISTKAVDRITTIMLGGMIITFFLAIGNLLIEIDVTKLLEPDGNQRFIPYLWVALPFGLASFGYHGNVPSLVKYYGKDSSTIIKAIFVGTFIALIIYVCWLVATMGNIPRSQFSEIIAQGGNMGVLVGALSKVMESSWLNSMLTLFANLAVASSFLGVTLGLFDYLADLFGFDDSRSGRMKTAIVTFVPPTVFGLLFPDGFLIAIGFAALAATVWAVIVPALMAYKSRQLFPNHQGFRVFGGTPLIILVVLFGVVTGACHLLAMANLLPQFS

SEQ ID NO: 9998 - DNA, 1188 bp, Shewanella oneidensis
  CDS (1)..(1188)
atgacacaaaataaatttttcggcagtttactgctgattgcaggcaccaccattggcgcgggcatgctcgcactccccatcgcatcggccggccttggctttggcatgtcgagcatgattatgctgatcttctgggcattaatggcctacactgccctactcatggtcgaaatccaccaatttgccccgagtgatgccagcctcaaccaattagcccgtcatctattgggcacaaaaggccaagtggttgcctgtatcgcgttaatgtttttactctatgccctgtgcgccgcctacatcgctggcggtggtgagcaagtgcatcaaaaactcacctcttggttagggctagcactgccgccacaggcgggcgccatcttatttaccctcttgattggtacgattgtgggtttaggtacgcactgtgtcgatttgattaatcgcgtactctttagtttaaaaatcattgcgttaatcctaatgctggccttattactgccacaggtggaaggcacgcatttactcgaactgccgctagagcaagggcttattgtgtcggccatcccagtgatttttacctcgtttggttttcatggttcgattccgtccgtggtgcgctacttaggcatcgaagtgaaagcgctgcgcaaaattatgctgctcggctcagcgttacccctgctgatttacctgctgtggcaactgggtagccaaggcgtactaagccaaagccaattgatgaccaatcaaagtctttctggctttattagtcaattagcgagtgtacttcacagccaatacttaagctcagcgattagtgtgtttgccgatctcgcccttgcgacctcctttttaggcgtgagcctaggtctatttgactttatagccgccaacttaaggcaagaggataatgcgacgggtcgcagtgtcaccgcggcgatcacttttgtgccgccattaggctttgcccttttctacccacagggatttattaccgctctaggctacgcggcaatcgctttagtgatcctcgcgatttttttaccggtttctatggtatgggtacaaagaaaacaacgggataaagccaagcttccccaaggctaccgcgtcgcagggggaacattaggcttagtgctcgcactactatgtggccttgcggtgattagtgcgcagcttttaggctag

SEQ ID NO: 9999 - protein, 395 aa, Shewanella oneidensis
MTQNKFFGSLLLIAGTTIGAGMLALPIASAGLGFGMSSMIMLIFWALMAYTALLMVEIHQFAPSDASLNQLARHLLGTKGQVVACIALMFLLYALCAAYIAGGGEQVHQKLTSWLGLALPPQAGAILFTLLIGTIVGLGTHCVDLINRVLFSLKIIALILMLALLLPQVEGTHLLELPLEQGLIVSAIPVIFTSFGFHGSIPSVVRYLGIEVKALRKIMLLGSALPLLIYLLWQLGSQGVLSQSQLMTNQSLSGFISQLASVLHSQYLSSAISVFADLALATSFLGVSLGLFDFIAANLRQEDNATGRSVTAAITFVPPLGFALFYPQGFITALGYAAIALVILAIFLPVSMVWVQRKQRDKAKLPQGYRVAGGTLGLVLALLCGLAVISAQLLG

SEQ ID NO: 10000 - DNA, 1188 bp, Shewanella oneidensis
  CDS (1)..(1188)
atgaattcaaaaatgttaggctcgatagccattgttgcaggcaccgctattggcgcgggaatgttagctttaccgctcgctacagcggccttaggtatggtacctgctattttgttgatggtagtgatttgggggctatcagcttatacctcattgttaatgcttgagattaaccttcgctctggcgtgggtgataatgtccatgcgattacaggcaaattactcggcaagaaaggccagatagtgcagggggcatcatttttgagtctgctggttgctttaacggctgcttatctaacggggggctcgtccctgttggtgcttaaagcccaaaatatgtttgacatagtgttagataaccaactggcggtggtgttatttaccattgtgctcggcggttttgcagcgttaggggtggcttgggttgataaagtctcacgctttttattttcgttgatgattttattgctaattgtcgtggtgctgtttctattacctgaagtcagtatttccaccatagcaactagtgcagtggcgcaatccttgaccagcagttggatggcggctatccccgtggtatttacttcctttggttttcacgtctgtatcgcgaccttagtacgttatttagatggcgataccgtgtctctgcgcaaggtgctattgattggttcaaccattccgctagcctgttatatcttctggttattggtgaccttaggtacggtaggcggcaacgaaattaatggctttaatggttctttacctgcgcttatcagtgcgttacaagagattgcccacacgcctttgatcagcaaatgtatttctctgtttgctgatttagccttaatcacttccttccttggcgttaccttaagcctatacgattttgtggctgagttaacccgtgccaagaagaccttcgtcgggcgggcgcaaacctggttattaacctttgtgccaccgctgttatgcgcactttatgtgccagaaggcttcgttgccgtattaggttttgccgctgtgccgttggtggtgatgattatcttcttgccaattgcgatggccctgcgtcagcgtcaaatacagcctcaaggatatcaggttgtaggcggcacatttgcgctcggtcttgccgggatcttgggggccattattattggtgctcagttatttgtcgcactctaa

SEQ ID NO: 10001 - protein, 395 aa, Shewanella oneidensis
MNSKMLGSIAIVAGTAIGAGMLALPLATAALGMVPAILLMVVIWGLSAYTSLLMLEINLRSGVGDNVHAITGKLLGKKGQIVQGASFLSLLVALTAAYLTGGSSLLVLKAQNMFDIVLDNQLAVVLFTIVLGGFAALGVAWVDKVSRFLFSLMILLLIVVVLFLLPEVSISTIATSAVAQSLTSSWMAAIPVVFTSFGFHVCIATLVRYLDGDTVSLRKVLLIGSTIPLACYIFWLLVTLGTVGGNEINGFNGSLPALISALQEIAHTPLISKCISLFADLALITSFLGVTLSLYDFVAELTRAKKTFVGRAQTWLLTFVPPLLCALYVPEGFVAVLGFAAVPLVVMIIFLPIAMALRQRQIQPQGYQVVGGTFALGLAGILGAIIIGAQLFVAL

SEQ ID NO: 10002 - DNA, 1227 bp, Pasteurella multocida
  CDS (1)..(1227)
atgaaaaagacgccttcaattttcggtggtgcctgtattattgccagtgtgtgtgtcggcgcgggtatgttagggttaccaagctcgggtgccggtgcttggacaatttggtctattttgacgatctgttttacgatgtttaccatgacaatttcaggttggttattattagaagcctacaagcattatgatctgcgtgcttcgtttaataccgtgaccaaaagcatgctcgggaattccgtcaatacgatcaataatcttgcagtttattttgtcggggggattttattgtatgcttatactaccgcgtctgggggtatcttaagtggacttgcggcaccgtattttgccttagattcacggatttggtcagtgatttttgtctttgttttttccttctttgtttggcattcaacgcgtattgttgaccgtgtttccgttttactgatcatctttatggcgctttcattcctttttagtgtctttggtttaaccgtaaatattgatttaagcactttatttgatacgaaaggtacagaatcacattatgcgatgtatgcaatgggattattacccgtggcattaacttcctttggctatcatcattcagttgcaacaatgcgagcttactatggtgatgagcgtaaagcgaaatatgcgatccttggcggtaccggtatcgcgttaactctttatctattatgggtggtatcgatttttgggaacttaccacgcgatcaattcgcaccagtgttagccagtgacggaaatttagatgtattacttggcgctttgggtaatgtgattgagtctgcttcagtcaaacaagcgattaatgcgttttcaattgcggcgattttatcttcatttattggtgtgggattaggggtgtttgatttcttagcagatttctttaaatttgataacagcaaagaaggacgtgcgaagtcttgggcggtaaccttcttaccaccactaattctttctgtcgcctacccactcggtttcttaaaagcgattggttatgctggcgcggtagccactatttggacttgtattatccctgccttattagcaagaaaatcacgtagcttaccaaatggacaaacgggctttatggtcggtggcggcaatattacgattgttgtggtcatggtatttggtattgtgactgcgttattccacttccttgccatgtttggcatgttacctgcatttaaagggtaa

SEQ ID NO: 10003 - protein, 408 aa, Pasteurella multocida
MKKTPSIFGGACIIASVCVGAGMLGLPSSGAGAWTIWSILTICFTMFTMTISGWLLLEAYKHYDLRASFNTVTKSMLGNSVNTINNLAVYFVGGILLYAYTTASGGILSGLAAPYFALDSRIWSVIFVFVFSFFVWHSTRIVDRVSVLLIIFMALSFLFSVFGLTVNIDLSTLFDTKGTESHYAMYAMGLLPVALTSFGYHHSVATMRAYYGDERKAKYAILGGTGIALTLYLLWVVSIFGNLPRDQFAPVLASDGNLDVLLGALGNVIESASVKQAINAFSIAAILSSFIGVGLGVFDFLADFFKFDNSKEGRAKSWAVTFLPPLILSVAYPLGFLKAIGYAGAVATIWTCIIPALLARKSRSLPNGQTGFMVGGGNITIVVVMVFGIVTALFHFLAMFGMLPAFKG

SEQ ID NO: 10004 - DNA, 1257 bp, Pasteurella multocida
  CDS (1)..(1257)
atgacaacaaaacaattgccttctcttttaggtggcgccatgattattgccggtacagcgatcggtgctggtatgttagccaatccaacggctacagcaggcgtttggtttatcggttctcttcttctattagcctacacttggttttgcatgaccacgtcaggcttaatgatccttgaagccaatttacactacccaacaggggcgagttttgacaccatcgtgaaagatttactcggcaaacgctggaatctcatcaatggcttatctatcgcttttgtattatatattttaacgtatgcttatatcacatctggtggtggcattacccaacatctcttaaatcaagttctcagccgccctgacaatacggtggaaattggacgtggcttggggtctttacttttttgttgcgtgctcgctggatttgtctggttatcgactaaagccgtggatcgttttaccactgtactgatcggtggcatgatcatcgcctttcttctttccacgagtggactcatggcttctgtcagaagtgatgtgcttttcaataatcttgcgcaaggggaaacacactatttaccttattttctcaccgcacttcctgtttgcttagtctcctttggctttcacggtaatgtaccaagcttagtaaaatactacgatcgtcatgctcaatctgtggtcaaagcaatcttcctcggtaccggtatcgccttcgtgatctatgcattttggcagcttgcggtacaagggaatttacctcgccatcaatttgcaccagtcattgaaaaagggggtgatattgctgccttactaaaagccttatcgcaatatatccaaaccgattacatgggcgtcgtacttaatttctttgcttatatggcgattgcaagctcatttttaggcgtcagtttgggtttatttgattaccttgcggacttattaaaatttgatgacagtagcttagggcgaactaaaaccacgttagtgacctttctgcctccgctcttactcagcttacaattcccttatgggtttgtcgtggcaattgggtatgcaggcttagccgccaccatttgggcagcgattgtcccagccctattagcgaaagccacacgccagcgtttcacggaatctcactatactgtttatggtggtaacttcatgatttattttgtgattttatttggtttgttaaatattttggcacaaattgctgctcaatttggtgttttaccgacatttttaggttaa

SEQ ID NO: 10005 - protein, 418 aa, Pasteurella multocida
MTTKQLPSLLGGAMIIAGTAIGAGMLANPTATAGVWFIGSLLLLAYTWFCMTTSGLMILEANLHYPTGASFDTIVKDLLGKRWNLINGLSIAFVLYILTYAYITSGGGITQHLLNQVLSRPDNTVEIGRGLGSLLFCCVLAGFVWLSTKAVDRFTTVLIGGMIIAFLLSTSGLMASVRSDVLFNNLAQGETHYLPYFLTALPVCLVSFGFHGNVPSLVKYYDRHAQSVVKAIFLGTGIAFVIYAFWQLAVQGNLPRHQFAPVIEKGGDIAALLKALSQYIQTDYMGVVLNFFAYMAIASSFLGVSLGLFDYLADLLKFDDSSLGRTKTTLVTFLPPLLLSLQFPYGFVVAIGYAGLAATIWAAIVPALLAKATRQRFTESHYTVYGGNFMIYFVILFGLLNILAQIAAQFGVLPTFLG

SEQ ID NO: 10006 - DNA, 1215 bp, Pasteurella multocida
  CDS (1)..(1215)
atgaataaaacattgggaagtactttgcttgtttcaggtaccatgatcggcgcagggatgttagcgatgcccttaacgtctgcgggaattggtttcacctttaccgtagttctgttacttgtcctttggttcttattgacatacagtgcattgttatttgttgaagcgtatcaaaccgtagaaagtgatgcggggattggttctctgagtgcggtctattttggtggttttggtcgatttatttctacagcagcattattgatctttttatatgccttgttagccgcgtatgtgacgggcggtggtggtttattgtcttctattctaccaacaattcaatcagccgaaacaacctctcacatttctattgtcattttcacgacagtttttggtgctttcattatcattggtacgcaaacagttgatggactaaatcgtcttttattttttaccatgttagttgcattgggtgctgtattatttttgttagtgcctgaagtaaaaatggataatttaatggcgatgccaattgataaagccctgttgatttctgccagtccggtcttttttacttcctttggttttcatggctcaatacctagcttgaataaatacctgggtgggaatattaaggcattacgtatttcgattttagtcggttcattcattacactgtgtggctatattttatggcaatttggtacgcatggggtgttaacacaatctgttttcttacagattttacaagatgaacctactttgaacgggctggtagccgctaccaaacaagtgacgggaagcagtgtcatttctggtgctgtgaaattattctcggctttggctttaattacttccttcttaggggttgctttagggctttttgagtgtattgaagacttgttaagccgcgtctttaaatttaaagcaggtcgtattacacttgggctactgacttttattccaccattattatttgctttattttatccaaaagggtttattctagccttagggtatgcaggacaaatgtttgctttttatgcggtagtattacctgcagcattagtgtggaaagtgagaaaattgcatccaaatctcccttatcgtgtatcgggtggttcagcattactggtcatttcggcggtattaggtgtgatcattacctcgatcccatttgcgattaaagcaggttatttacctgctgtcgtgggataa

SEQ ID NO: 10007 - protein, 404 aa, Pasteurella multocida
MNKTLGSTLLVSGTMIGAGMLAMPLTSAGIGFTFTVVLLLVLWFLLTYSALLFVEAYQTVESDAGIGSLSAVYFGGFGRFISTAALLIFLYALLAAYVTGGGGLLSSILPTIQSAETTSHISIVIFTTVFGAFIIIGTQTVDGLNRLLFFTMLVALGAVLFLLVPEVKMDNLMAMPIDKALLISASPVFFTSFGFHGSIPSLNKYLGGNIKALRISILVGSFITLCGYILWQFGTHGVLTQSVFLQILQDEPTLNGLVAATKQVTGSSVISGAVKLFSALALITSFLGVALGLFECIEDLLSRVFKFKAGRITLGLLTFIPPLLFALFYPKGFILALGYAGQMFAFYAVVLPAALVWKVRKLHPNLPYRVSGGSALLVISAVLGVIITSIPFAIKAGYLPAVVG

SEQ ID NO: 10008 - DNA, 1212 bp, Pasteurella multocida
  CDS (1)..(1212)
atgaaaaataaaacctttggaagcgcattattagttgcgggaaccaccatcggtgccggcatgcttgctatgccattaacctcggccgaaatgggctttacttacacgttaattctattatttatcctatggggactgctctcttatagtgcgttactttttgttgaagtttaccaaaaagcagaaaccaaaaatgctggaatcgctacccttgcggaacaatattttggcttaccgggacgtattttagctaccttatcacttgtcgtttttatgtacgcgattttatcagcctatgtcacagggggcggttcacttttagccggtgtccttccttttttaggtgagcatgccacaccaatttctatcgtttctttcacgattgtccttggggtatttattgtgatcagtacaggcgcagtagatatgctcacacgcttcctatttatgattaagttagtggcttttgtgtttgtcttattgatgatgttacctttggtcaatggcgataacttactggcaatgccattaaaagattttttaattatttctgccagtcccgtattttttacctcttttggtttccatgtcatcattccaagtattaacagctatttagacggcaatattcgtcgtttacgtattgcaattattacggggacagcgattcctttagtggcttacattatttggcaattagccactcatggtgttttcccacaagcccagttcgtacaaattttaaacactgaccctactttaaatggtttaatcacggcgacttaccaagctacagaaagcgctattatcagccatgcgatgcgtttattctttaccttagcactgattacgtctttcttgggtgtcgcgttatctttattcgattgtttatacgatttacttaaacgagtaaaaatcaaaacaaaccgtgtgtcgctaggtttacttaccttcttacccccattaatttttgcgttgttctaccctgagggttttgtcatggcattaggttatgcggggcaaatgtttaccttttacggtttagtattacctgttggcatggcatggcgtgctagaaaacgttatccggatctaccatatcgtgtcatgggaggcaaccttaccttattcggtgccttaatcttaggtatcttgattatgaatgtgcctttcttaatcaaagccggttatctccctgctgttattggttaa

SEQ ID NO: 10009 - protein, 403 aa, Pasteurella multocida
MKNKTFGSALLVAGTTIGAGMLAMPLTSAEMGFTYTLILLFILWGLLSYSALLFVEVYQKAETKNAGIATLAEQYFGLPGRILATLSLVVFMYAILSAYVTGGGSLLAGVLPFLGEHATPISIVSFTIVLGVFIVISTGAVDMLTRFLFMIKLVAFVFVLLMMLPLVNGDNLLAMPLKDFLIISASPVFFTSFGFHVIIPSINSYLDGNIRRLRIAIITGTAIPLVAYIIWQLATHGVFPQAQFVQILNTDPTLNGLITATYQATESAIISHAMRLFFTLALITSFLGVALSLFDCLYDLLKRVKIKTNRVSLGLLTFLPPLIFALFYPEGFVMALGYAGQMFTFYGLVLPVGMAWRARKRYPDLPYRVMGGNLTLFGALILGILIMNVPFLIKAGYLPAVIG

SEQ ID NO: 10010 - DNA, 1499 bp, Klebsiella pneumoniae
  CDS (294)..(1370)
ggatcctggataggtaacgaacacctcgccattacgatgtgcaaaaaactgcacgatcccggcttcgccacgacagtggtgatgtatccaaccgttgaggaaggacacgccattctgcgttgcgcattgtctgcgcttcatgagagcggccaaatcgacgacttccataaaaacttcagtgaatcactggctgaagccacaaaataaatagctactgccggcctgcttcgtcaggccgcttacggacattcgctatataaggaacaaatttcccgctacggggaacgtctcttatggtggcgaccattatcggtggaggcatgttcgcgttgccggttgctttcgtcaacgtgtggtttataaagggccttctggtcctgtcggtaacaggcatattgatgctgattacagggttgatcctcgtcgacattacgatgcgctttcctcctggcgccagttttcataccttcacccatgccctgctcggacccgctgccagcgtaatcatcggcgtggctttctgtttcgtactttatttactgacctacgcgtacatatcaggcgcagcatcgatagtgtgggatctccttcctcccgatattgctggccgcagctggctgccgatcattttgctgtcgctgacgacctcgctgattctgtgggccggcggcaaattgcccggttttctcctctccggccttatcgccgccaaattcaccctttttctcctgctgttcgccggtgccgcaggaggcgtaaaagtactcagattactcgacttcgccggcagcacgccgctccagtattacctgccgatcgtaccggtctgcgttatcgcttttggatttcatggcagcgtcccctctctgacaagaatgtaccggggggataatcatcgtgcggtcctccgctctctctattacggtttcgccgtttcattaactgtctacgccttctggctgacgctcacgatgggcgcgctcacgcctcaggctatccggcatgtcagcgatgaaggcgggaatatgggcgcctttatcacggccctcaatatccacaggaccgcctcagctaccagtctgatactggtcgcctttgggtgtattgccgttttagcttcactgatgtcggcttcaatcggcttaagtgattatcttgaagatacactgaacaaaattaactgtccagtgctcacgcccgctggcaatatttctgacttatttccctcctgcactggcctgtattattgctccgcaaggttttttgtctgccttgtcctttgcagggatatcactggtattatggagtattatactccccccttatttactcatcaaagccaggcgttccactctgcctccggtatataactttccgggaaacaatcccttcctgaaaataattattgttaccggagtcatactctggctattgatgatttacgcttttctttaataacaattcgtctcattcacaactgactttgcaaggaaattatt

SEQ ID NO: 10011 - protein, 358 aa, Klebsiella pneumoniae
MVATIIGGGMFALPVAFVNVWFIKGLLVLSVTGILMLITGLILVDITMRFPPGASFHTFTHALLGPAASVIIGVAFCFVLYLLTYAYISGAASIVWDLLPPDIAGRSWLPIILLSLTTSLILWAGGKLPGFLLSGLIAAKFTLFLLLFAGAAGGVKVLRLLDFAGSTPLQYYLPIVPVCVIAFGFHGSVPSLTRMYRGDNHRAVLRSLYYGFAVSLTVYAFWLTLTMGALTPQAIRHVSDEGGNMGAFITALNIHRTASATSLILVAFGCIAVLASLMSASIGLSDYLEDTLNKINCPVLTPAGNISDLFPSCTGLYYCSARFFVCLVLCRDITGIMEYYTPPLFTHQSQAFHSASGI

SEQ ID NO: 10012 - DNA, 1251 bp, Erwinia herbicola
  CDS (1)..(1251)
atggttattaagaaaacaacacccggtttaatgagtggaacgatgcttatcattgccaccgtcataggtggcggaatgttctcactgccgattgctatggctggcatatggttcccaggcgcatcaattattttaacgctcattgccataatgatgctgttaaccggactgatgctggttgaagtcaatctccattatggcggtggtgcgagttttaacaccttcacacaggatttattaggtcataaatggaatgttgtggtgggtatcgcatttggctttgtcttgtatattttaacttatgcttatatttctggctcttctgctgtcatctctcagacggtagaaaaatacagcggattttatcttccagcccgcttatctgtgatcatcgtaagcgtgttggtcggtggcatcgcatggtacagctcgcttttggttggccgtattacaacggtgttaattatcgggaagtttgttgccttttttgctaccttctctggcctgatatggcatgtcgaaggcgctaaacttattgacagtgccgcctgggcgctgcctgatacgcaatatctgccatatattttaatgacgctacctttctgcatcatctcttacggtttccacggcaacgtgcccagtctggtgaagctgtatggcactcagggggttaagaatatcacccggtcgatttttattggcacggctttcgctctgctgctttacatattctggttggtcgtcaccatgggcaatatcagccgcgccgatttttcgcccattatcgccaaaggggggaatattgatgtatttgtcgaggcaatagggggcttatttaccagcacgtctatggatctgatcctcactttctttggtaattttgcggtagccagttcattgctagccgcgacgctggggcttttcgattatattgccgatctgtttcatttttcagacgaccgttctggccggtttaagacggccctggtaacgtatttgccacccgctgtcgtttgtttcatcctgcccggtggctttgtctatgcaattggctatgccggtctggcctttacgatctggagcgttattctgccgccttttcttgtgaaagcggcccgcaagcgttttcccactgcagtctataccgcaccctgtaataacatgatccttaatctggttatcgtggtggggggattcgtttacctgacggtggtacttgatgtattccggctgctgccttcgtttagctaa

SEQ ID NO: 10013 - protein, 416 aa, Erwinia herbicola
MVIKKTTPGLMSGTMLIIATVIGGGMFSLPIAMAGIWFPGASIILTLIAIMMLLTGLMLVEVNLHYGGGASFNTFTQDLLGHKWNVVVGIAFGFVLYILTYAYISGSSAVISQTVEKYSGFYLPARLSVIIVSVLVGGIAWYSSLLVGRITTVLIIGKFVAFFATFSGLIWHVEGAKLIDSAAWALPDTQYLPYILMTLPFCIISYGFHGNVPSLVKLYGTQGVKNITRSIFIGTAFALLLYIFWLVVTMGNISRADFSPIIAKGGNIDVFVEAIGGLFTSTSMDLILTFFGNFAVASSLLAATLGLFDYIADLFHFSDDRSGRFKTALVTYLPPAVVCFILPGGFVYAIGYAGLAFTIWSVILPPFLVKAARKRFPTAVYTAPCNNMILNLVIVVGGFVYLTVVLDVFRLLPSFS

SEQ ID NO: 10014 - DNA, 25 bp, Artificial sequence
  Primer sequence
atgaaaaacagaaccctgggaagtg

SEQ ID NO: 10015 - DNA, 24 bp, Artificial sequence
  Primer sequence
ttaccccacttctggtaacaaccc

SEQ ID NO: 10016 - DNA, 777 bp, Escherichia coli K12
  CDS (1)..(777)
atgctggcaaaacgcataattccatgtctcgacgttcgtgatggtcaggtggtaaaaggcgtacagtttcgcaaccatgaaatcattggcgatatcgtgccgctggcaaaacgctacgccgaagaaggtgcagacgaactggtgttctacgatatcaccgcttccagcgatggccgtgtggtagataaaagttgggtatctcgcgtggcggaagtgatcgacattccgttctgcgtggcgggtgggattaagtctctggaagatgccgcgaaaattctttcctttggcgcggataaaatttccatcaactcccctgcgctggcggacccgacgttaattactcgcctggcggatcgatttggcgtgcagtgtattgtggtgggtattgatacctggtacgacgctgaaaccggtaaatatcatgtgaatcaatataccggcgatgaaagccgcacccgcgtcactcagtgggaaacgctcgactgggtacaggaagtgcaaaaacgcggtgccggagaaatcgtcctcaacatgatgaatcaggacggcgtgcgtaacggttacgacctcgaacaactgaaaaaagtgcgtgaagtttgccacgtcccgctgattgcttccggtggcgcgggcaccatggaacacttcctcgaagccttccgcgatgccgacgttgacggcgcgctggcagcttccgtattccacaaacaaataatcaatattggtgaattaaaagcgtacctggcaacacagggcgtggagatcaggatatgttaa

SEQ ID NO: 10017 - protein, 258 aa, Escherichia coli K12
MLAKRIIPCLDVRDGQVVKGVQFRNHEIIGDIVPLAKRYAEEGADELVFYDITASSDGRVVDKSWVSRVAEVIDIPFCVAGGIKSLEDAAKILSFGADKISINSPALADPTLITRLADRFGVQCIVVGIDTWYDAETGKYHVNQYTGDESRTRVTQWETLDWVQEVQKRGAGEIVLNMMNQDGVRNGYDLEQLKKVREVCHVPLIASGGAGTMEHFLEAFRDADVDGALAASVFHKQIINIGELKAYLATQGVEIRIC

SEQ ID NO: 10018 - DNA, 768 bp, Campylobacter jejuni
  CDS (1)..(768)
atgcttacaaaacgcataattgcatgtttagatgtcaaagatggcagagtagtaaaaggaacacaatttaaaaaccataaagatatgggagatatcatagagcttgctaggtattattctcaaaatggtattgatgagcttgttttttatgatattgctgcaagtgctagaaaagaacgcatatcaagagaatgggtaagtgaagtagcaaaaaatatcaatatttctttttgtgttgcagggggtattaaaagcgaagaagatgcagctgaacttttggctaatggggcagataaaatttctatcaattctcctgctttaaatgatccaagcctaatcacacgccttgctaaaagctttggcgtgcaatgcgtagtagtagggattgatagttttaaagatgaaaatggaaatttaaaagtatttcaatacacaggggatgaaaaaacaagtaaacatagtggaaaaagcactttagaatgggttaaaaaagtgcaagatctaggtgcaggcgaaattgttttaaatatgatgaatcaagatggtgttaaaaatggctatgatttagaacaattagaagctgtatataaaatttgtaaagtacctttaatcgcaagtgggggagcgggaaaaatggaacattttttagaagcttttaaactaggtatagatggggctttagctgcttctgtttttcatcaaaaacttatagacattaaagaattaaaaatttatcttaaaaatcaaggcttaagtataaggatataa

SEQ ID NO: 10019 - protein, 255 aa, Campylobacter jejuni
MLTKRIIACLDVKDGRVVKGTQFKNHKDMGDIIELARYYSQNGIDELVFYDIAASARKERISREWVSEVAKNINISFCVAGGIKSEEDAAELLANGADKISINSPALNDPSLITRLAKSFGVQCVVVGIDSFKDENGNLKVFQYTGDEKTSKHSGKSTLEWVKKVQDLGAGEIVLNMMNQDGVKNGYDLEQLEAVYKICKVPLIASGGAGKMEHFLEAFKLGIDGALAASVFHQKLIDIKELKIYLKNQGLSIRI

SEQ ID NO: 10020 - DNA, 774 bp, Xylella fastidiosa
  CDS (1)..(774)
atgttgagccgccgcctcattccatgcttggacgtgcgtgatggacgcgtggtgaaaggcgtgaagtttcgtgaccacgtggatatgggcgatatcgtcgaactggccttgcgttaccgtgatcatggcgctgatgagttggtgttttatgacatcggcgccagtccacgagggcgttctgtggattaccgttgggttgaacgcgtcgcgcgcctgatcgacattccattttgtgtggccggtggtatcggccaggttgagactgcccgtgctgtcttgcatgccggtgccgataagatttcgatcaactcaccggcactgcgccaacctgcgctgattagcgccttagccgaagcctttggggtgcaatgcgtcgtcgtcggcattgattcgatccgtgaggccgatggtcagtggcgcgtccgctgcaataccggggatccagataaaacccaagccttgccgctgcgcaccctggattggattgttgaggcgcagcgcctaggggcaggggagatcgtattaaattgcatggacagcgacggggtgcgctgtggttacgacattgcacagctgtctcaggcgcgggcactgtgtcaggtgcccttggtggcttctggcggcgccgggaacatgcagcattttgcggatgtatttcacaaggctgatgttgatggtgcattggcggccagcgtattccatagcggcgcgattttgattccgggtttaaaacagtttctgcgtgagcagcaaatcgaggtccgcgatgtgtaa

SEQ ID NO: 10021 - protein, 257 aa, Xylella fastidiosa
MLSRRLIPCLDVRDGRVVKGVKFRDHVDMGDIVELALRYRDHGADELVFYDIGASPRGRSVDYRWVERVARLIDIPFCVAGGIGQVETARAVLHAGADKISINSPALRQPALISALAEAFGVQCVVVGIDSIREADGQWRVRCNTGDPDKTQALPLRTLDWIVEAQRLGAGEIVLNCMDSDGVRCGYDIAQLSQARALCQVPLVASGGAGNMQHFADVFHKADVDGALAASVFHSGAILIPGLKQFLREQQIEVRDV

SEQ ID NO: 10022 - DNA, 756 bp, Pseudomonas aeruginosa
  CDS (1)..(756)
atggtccggaggcgcgttatcccatgcttgctgctcaaggatcgcggtctagtgaaaaccgtgaagttcaaggagcccaagtacgttggagacccgatcaacgcaatacgcatcttcaatgagaaagaagtcgacgaactgattttgctggatatagatgcttccaggctcaatcaagagcctaactatgagttgatcgcggaagtggctggtgagtgttttatgcctatttgctatgggggcggtatcaagacattggagcatgcggaaaaaatcttttccctaggtgtcgaaaaagtttcgataaataccgccgctcttatggatctttcgttgattcgaagaattgccgataagtttggttcgcaaagcgtagttggctctatcgactgccgcaagggtttctggggaggacactccgtgttctcagagaatgggacgcgcgacatgaaacgctccccattggagtgggcgcaagcgctcgaagaggctggagtgggtgagatttttctaaattctattgatcgagatggagtgcagaaaggcttcgacaacgctctagtggaaaatatcgcttctaacgtccatgtgccagtgatcgcctgtggtggagctggctccatcgctgacctcatcgatctttttgagcgtacgtgtgtgtcggcagtagcggcgggaagcctattcgttttccatggcaagcatcgtgcggtactgattagttatccggatgtcaacaagctcgacgtcggttag

SEQ ID NO: 10023 - protein, 251 aa, Pseudomonas aeruginosa
MVRRRVIPCLLLKDRGLVKTVKFKEPKYVGDPINAIRIFNEKEVDELILLDIDASRLNQEPNYELIAEVAGECFMPICYGGGIKTLEHAEKIFSLGVEKVSINTAALMDLSLIRRIADKFGSQSVVGSIDCRKGFWGGHSVFSENGTRDMKRSPLEWAQALEEAGVGEIFLNSIDRDGVQKGFDNALVENIASNVHVPVIACGGAGSIADLIDLFERTCVSAVAAGSLFVFHGKHRAVLISYPDVNKLDVG

SEQ ID NO: 10024 - DNA, 720 bp, Clostridium acetobutylicum
  CDS (1)..(720)
atgataattttaccggcaatagatataaagcagggaaaatgtgtaagactttatcaaggaagatttgaaaaatcaagtgtcgttgcggaaagtccagcattaacggcaaagtcttttgaaaatgatggagcaaaatatatacatgtggttgatttagatggtgctttagaaggggaaattataaacttagatgctgttaaaagtatagttcaggttaccagtgttcccatagaattaggtggaggaataagaaatataaaggttgttgaaaaacttataaatataggtgttaaaagaataatattaggaacggctgctcttaaggataaagaatttacaagagaagctataaaggaatatggtaagagtatagcagttggaatagatgcaaaagatggatatgttgcagtaaatggatggcttaatgtgagcaaaataaactacatagagtttgcaaaaataatggaggatatgggcacagaagatataattctaacagatataagtaaggatggaacgttaaagggacctaattttgatatgcttaaaaaactacaggaaaatgtaaactgtaatataacagcttcaggtggaataaaggatttagatgatcttattaaattgaaagaaatgaatatatacggagctattgttggaaaagcaatatatagcgaaaaaattaatcttaaggaagccatagctgtaatagaaaagaggtga

SEQ ID NO: 10025 - protein, 239 aa, Clostridium acetobutylicum
MIILPAIDIKQGKCVRLYQGRFEKSSVVAESPALTAKSFENDGAKYIHVVDLDGALEGEIINLDAVKSIVQVTSVPIELGGGIRNIKVVEKLINIGVKRIILGTAALKDKEFTREAIKEYGKSIAVGIDAKDGYVAVNGWLNVSKINYIEFAKIMEDMGTEDIILTDISKDGTLKGPNFDMLKKLQENVNCNITASGGIKDLDDLIKLKEMNIYGAIVGKAIYSEKINLKEAIAVIEKR

SEQ ID NO: 10026 - DNA, 759 bp, Staphylococcus aureus
  CDS (1)..(759)
atgattaaaaaacgtatcattccatgtttagatgtcaaagatggtcgtgtcgttaaagggattcaatttaaaggattaagggatatagggaatcctgttgatttagcaatatattacaatgaagcgggtgctgatgaattagtatttttagacatctctaagacggaagagggtcatagcttaatgctagaagtgattgaacagacagcgtcacgcttgtttatccctcttactgtagggggtgggattcaaagtctcgatgatattacccaattgttaaatcatggtgcagataaagtatcattaaattcaagtgctttaaaaaatccacagctcattaaacaagcgagtgataaattcggtagacaatgcatctgtatagcaattgatagctattatgatcctgaaagaaaagcacattattgttgtacgcatggtggtaaaaaaatgacaaatattaaagtatatgactgggtacagcaagtagaacagttaggtgcaggtgagctcctcgttacaagtatgggacatgatggtatgaaacaaggatttgatattgagcatcttgcaaaaataaaatcccttgtaaatattccaatcattgcttctggtggtggtggcaatgcacaacactttgtagaactatttaatcagacggatgtttctgcaggtttagctgcaagtatattacatgaccgagaaacgacggttcaatcaattaaagaagtgatacggcaagggggtatagcagtaagatga

SEQ ID NO: 10027 - protein, 252 aa, Staphylococcus aureus
MIKKRIIPCLDVKDGRVVKGIQFKGLRDIGNPVDLAIYYNEAGADELVFLDISKTEEGHSLMLEVIEQTASRLFIPLTVGGGIQSLDDITQLLNHGADKVSLNSSALKNPQLIKQASDKFGRQCICIAIDSYYDPERKAHYCCTHGGKKMTNIKVYDWVQQVEQLGAGELLVTSMGHDGMKQGFDIEHLAKIKSLVNIPIIASGGGGNAQHFVELFNQTDVSAGLAASILHDRETTVQSIKEVIRQGGIAVR

SEQ ID NO: 10028 - DNA, 774 bp, Nostoc sp. PCC 7120
  CDS (1)..(774)
atggatgtaattccagcaattgatttactagcaggtcgttgtgtgcgactctatcagggagactacgatcgctcacaagtgtttagcgaaaatcctgttgatgttgctaaacagtgggtagatgagggtgcaacacgtctgcacatagtagatttagatggtgcaaaagcaggtaaagtagtaaatctaggagcaattgaagcgatcgctcaagctatttctataccgattgaaattggtggcggattgcgcgatcgttctagtgtggaacaggtgtttaatttaggtgtacagtgggcaattctcggtactgtcgccgtagaacaaccccagcttgtacaagaactctgtcaacaataccccggacaaattattatcggtattgatgcccgtaacggactagtagctactcgtggttggttggaaacatctgaggttttagccactcaattggctatacagatgcaggaaatgggtgcagcagccatcatttatacagatatccaccgtgacgggactcttgcaggcccgaatttagacgcactacgagaactagcagcagccatttccatccctgtgattgcatctggtggggtgagttctgtcaccgatttgttgagtttgttggcgttggaaccccaaggcgtgacaggtgtgattgtgggacgtgcattgtatacgggtgatattagcttaaaagaggcattgcaggcgatcggcccaggacgtattcaagacataccaccgaatttagacttctcttcctttgcttaa

SEQ ID NO: 10029 - protein, 257 aa, Nostoc sp. PCC 7120
MDVIPAIDLLAGRCVRLYQGDYDRSQVFSENPVDVAKQWVDEGATRLHIVDLDGAKAGKVVNLGAIEAIAQAISIPIEIGGGLRDRSSVEQVFNLGVQWAILGTVAVEQPQLVQELCQQYPGQIIIGIDARNGLVATRGWLETSEVLATQLAIQMQEMGAAAIIYTDIHRDGTLAGPNLDALRELAAAISIPVIASGGVSSVTDLLSLLALEPQGVTGVIVGRALYTGDISLKEALQAIGPGRIQDIPPNLDFSSFA

SEQ ID NO: 10030 - DNA, 777 bp, Yersinia pestis
  CDS (1)..(777)
atgctggcaaaacgtataattccttgtctggatgtgaaagacggccaggtcgttaaaggtgttcagttccgcaatcatgagatcatcggcgatatcgtgcctttggcgcagcgctatgctcaagaaggggctgatgagttggtgttttacgatatcactgcctcatccgatggccgtgtcgtcgataaaagctgggtagcgcgggtcgcagaagtgatcgatatccctttctgtgtggccggggggatcaaaagtgtcgaagatgcaagccagatcctgacattcggtgcggataaaatctcaatcaactctcccgcattggcagacccaacactcattacccgcttggctgaccgctatggcgtacaatgcatcgtggtgggaattgatacctggtatgacaccgaaagcgacagctatcaggtttaccagtttaccggtgatgagaagcgtaccaaagccaccacgtggcaaaccgaagattgggtcaaagaggtccagttacggggagccggtgagattgtattaaatatgatgaatcaggacggcgtccgtaacggctatgatttgcgtcagcttcaacagatgcgtgctatttgccacgttccgttaatcgcctctggcggtgccgggacaccggatcacttccttgaagccttccgcgacgcggatgttgatggcgcgctggcggcatcggtattccataaacaaatcattaatatcggcgaattgaaaaagtatttgtctgaacagggcgtggagataagagtgtgttaa

SEQ ID NO: 10031 - protein, 258 aa, Yersinia pestis
MLAKRIIPCLDVKDGQVVKGVQFRNHEIIGDIVPLAQRYAQEGADELVFYDITASSDGRVVDKSWVARVAEVIDIPFCVAGGIKSVEDASQILTFGADKISINSPALADPTLITRLADRYGVQCIVVGIDTWYDTESDSYQVYQFTGDEKRTKATTWQTEDWVKEVQLRGAGEIVLNMMNQDGVRNGYDLRQLQQMRAICHVPLIASGGAGTPDHFLEAFRDADVDGALAASVFHKQIINIGELKKYLSEQGVEIRVC

SEQ ID NO: 10032 - DNA, 786 bp, Brucella melitensis
  CDS (1)..(786)
atgactttgaaagcaagagtgattccctgtctcgatgtgaaagatggccgcgtcgtcaaaggtgtgaacttcgttgatctgatcgatgccggtgatccggtggaagccgcccgcgcctatgatgcggcaggcgccgacgaattgtgctttctcgacatcacggcgtcttcggacaatcgcgagacaattttcgatgtggtggcgcgtacagccgaacagtgcttcatgcccttgaccgttggtggcggggttcgccaggtggccgatatccgcaagcttcttttggcgggagccgacaaggtgtcgatcaataccgcagcggtgaagaacccggaattcgtggcggaagccgccgacaagtttggcaatcaatgcattgttgtcgccatcgatgcgaaaaaggtttccggcgcgggtgaaaatgatcactgggaaatcttcacccatggcgggcggcagccgaccggcatcgatgcggtggaatttgcacagaaggtcgtggaccttggcgcaggcgaaatcctgctcacctccatggaccgcgatggcaccaaggcggggtacgacgtggcgctgacccgcgccgtggccgatagcgtgcgcgcgccggtcatcgcatcgggcggcgtcggcactctcgatcatctggtggcgggcattcgcgatggccatgcgacggcggttctcgccgcttcgattttccacttcggcacctatacgatcggcgaggccaagcgctatatggccgaagccggcattccgatgcggctcgatccggtccgttga

SEQ ID NO: 10033 - protein, 261 aa, Brucella melitensis
MTLKARVIPCLDVKDGRVVKGVNFVDLIDAGDPVEAARAYDAAGADELCFLDITASSDNRETIFDVVARTAEQCFMPLTVGGGVRQVADIRKLLLAGADKVSINTAAVKNPEFVAEAADKFGNQCIVVAIDAKKVSGAGENDHWEIFTHGGRQPTGIDAVEFAQKVVDLGAGEILLTSMDRDGTKAGYDVALTRAVADSVRAPVIASGGVGTLDHLVAGIRDGHATAVLAASIFHFGTYTIGEAKRYMAEAGIPMRLDPVR

SEQ ID NO: 10034 - DNA, 756 bp, Listeria monocytogenes
  CDS (1)..(756)
atgcttactaaacgaatcatcccatgtcttgatgtcacagcaggtcgagttgtcaaaggtgttaattttgtttccttaacagatgtcggtgaccccgtcgaaattgctaaagcttataatgaagctggtgccgatgagctcgtttttcttgatatcacagcaactgtcgaactccgtcaaactatgatagatgttgtggaacgaactgccgagcaagtttttattccactcacagttggtggaggtatcagtagtgtttctgacatgaaagaactccttcaagctggtgccgacaagatttcgctcaattccgccgccatcaaacggccagaactcatccaagaaggagcagcaaaattcggaaaccaatgtatcgttgtcgcaattgatgccaaatggaatggcacaaactggagcgtcttcaccagaggcggtcgaaatgataccggacttgatgctattgaatgggccaaaaaagcagtccaactcggtgctggtgaaattctactaacaagcatggacggtgatggtaccaaaaacggctacgatatcccgctcacaaaagcaatttcagaagcagtttccgtcccagtcattgcttcgggcggctgtggtaatgccgcacatatggttgaagtttttgaaaaaacaaaggcaaccgccgcgctcgctgcaagcatttttcactacggcgaactaagcatcaaaaatgtcaaaacaaccttactcgaaaaaggagtgaatatccgtccatga

SEQ ID NO: 10035 - protein, 251 aa, Listeria monocytogenes
MLTKRIIPCLDVTAGRVVKGVNFVSLTDVGDPVEIAKAYNEAGADELVFLDITATVELRQTMIDVVERTAEQVFIPLTVGGGISSVSDMKELLQAGADKISLNSAAIKRPELIQEGAAKFGNQCIVVAIDAKWNGTNWSVFTRGGRNDTGLDAIEWAKKAVQLGAGEILLTSMDGDGTKNGYDIPLTKAISEAVSVPVIASGGCGNAAHMVEVFEKTKATAALAASIFHYGELSIKNVKTTLLEKGVNIRP

SEQ ID NO: 10036 - DNA, 756 bp, Listeria innocua
  CDS (1)..(756)
atgcttactaaacgaatcatcccatgccttgatgttacagctggacgcgtagttaaaggagttaattttgtttcattaaccgatgtaggtgatccagtcgaaattgccaaagcttataatgaagctggagccgatgaacttgttttcctcgatattactgcaactgttgaactacgccaaacgatgatagatgttgtggaacgaacggcagaacaagtttttattccactgacagttggtggaggtataaatagcgtgaacgatatgaaagaattacttcaagcaggagcagacaaaatatcgcttaattccgccgcaataaaaagacccgaacttatccaagaaggtgctaacaaatttggaaaccaatgcattgtagtcgcaattgacgctaaatggaacggctccaattggcatgttttcactcgaggtggacgagatgacactggtttagatgccattgaatgggccaaaaaagcgactcaacttggcgccggtgagattctgttaacaagcatggacggtgatggtacgaaaaacggatatgacattccactcacaaaagcaatttccgaagctgtctccgtcccagttatcgcttcaggaggatgcggtaatgcgagccatatggtagaagtttttgaacaaacaaacgcaaccgccgcactcgctgccagtattttccattacggtgaacttagtatcaaaaacgtcaaaactactttacttgaaaaaggagtgaacattcgcccatga

SEQ ID NO: 10037 - protein, 251 aa, Listeria innocua
MLTKRIIPCLDVTAGRVVKGVNFVSLTDVGDPVEIAKAYNEAGADELVFLDITATVELRQTMIDVVERTAEQVFIPLTVGGGINSVNDMKELLQAGADKISLNSAAIKRPELIQEGANKFGNQCIVVAIDAKWNGSNWHVFTRGGRDDTGLDAIEWAKKATQLGAGEILLTSMDGDGTKNGYDIPLTKAISEAVSVPVIASGGCGNASHMVEVFEQTNATAALAASIFHYGELSIKNVKTTLLEKGVNIRP

SEQ ID NO: 10038 - DNA, 723 bp, Listeria monocytogenes
  CDS (1)..(723)
atgcaaatcttcccagcaatagatttaaaaaatggacaatgtgtccgtcttttccaaggcgacttttctaaaaaaacagttgtcaatgaagacccgattgcccaagcaaaagcatttgcaacagatggcgcgacttacctgcatatcgttgaccttgacggcgcattagaaggacgccccatcaacctagaagtcatccaaaaaatgaaaataacagccaaaatacccgtacaagttggtggaggaattcgtagcatggcgcaagtggattattacctcgagtccggcatcgaccgagtgattatcggttctgccgctctaacagatccagatttcctacgtgcggcagttcaaaaatatggagctaaaatcgcagcaggtatcgatgccaaaaacggttttgtcgcaacaagaggttggctcgatgtcagtcaggtaagctatttagatttggctaaacgaatggaaaaagtgggtgttgagacaatcatttacactgatattagccgtgatggtacgctaactggacctaatttagaacaaatggctaatcttaaagaacacgttaaagttaatttaattgcatctggtggagtgagcagtcgcgcagatttggaagcactcgcccaactcggcttatacggagcaattgccggaaaagccctttataatcatcatatttctatgtcagatattgtagaggtggaacaaattgcttactaa

SEQ ID NO: 10039 - protein, 240 aa, Listeria monocytogenes
MQIFPAIDLKNGQCVRLFQGDFSKKTVVNEDPIAQAKAFATDGATYLHIVDLDGALEGRPINLEVIQKMKITAKIPVQVGGGIRSMAQVDYYLESGIDRVIIGSAALTDPDFLRAAVQKYGAKIAAGIDAKNGFVATRGWLDVSQVSYLDLAKRMEKVGVETIIYTDISRDGTLTGPNLEQMANLKEHVKVNLIASGGVSSRADLEALAQLGLYGAIAGKALYNHHISMSDIVEVEQIAY

SEQ ID NO: 10040 - DNA, 723 bp, Listeria innocua
  CDS (1)..(723)
atgcaaatcttcccagcaatagatttaaaaaatggacaatgcgtccgacttttccaaggtgatttttccaaaaaaataattgtaaatgaagatccgattgcccaagctaaatcatttgctaaaagtggcgccacctatttgcacattgttgatttagacggagctttagaaggtcgtcccgttaatctagaaattatccaacaaatgaaaaaagctgcaaaggtgccggtccaagttggtggcggtattcgtagtatggcgcaaattgattattaccttcagtccggtattgaccgagttattatcggttcagctgcactaacagacccagactttttacaggcagcagtgaaaaaatacggctctaaaatcgcagctggcatcgatgcaaaaaacggctttgttgcgacgagtggttggttaaatatcagtcaagtaagctttttagatttagccaaacaaatggaagcgatggatgttgaaaccattatttatacagatattagccgcgatggcacgctaactggtccgaatttagaacagatggccgcacttcaaaaacacgttacaatcaatttaattgcctctggtggcgttagcagtcgcgctgatttagaagcccttagtgaactcggattatacggagcaattgctggaaaagccctttacaacggaaatatttcgatgtcagacatagtggaggtggaacaaagtgcttactaa

SEQ ID NO: 10041 - protein, 240 aa, Listeria innocua
MQIFPAIDLKNGQCVRLFQGDFSKKIIVNEDPIAQAKSFAKSGATYLHIVDLDGALEGRPVNLEIIQQMKKAAKVPVQVGGGIRSMAQIDYYLQSGIDRVIIGSAALTDPDFLQAAVKKYGSKIAAGIDAKNGFVATSGWLNISQVSFLDLAKQMEAMDVETIIYTDISRDGTLTGPNLEQMAALQKHVTINLIASGGVSSRADLEALSELGLYGAIAGKALYNGNISMSDIVEVEQSAY

SEQ ID NO: 10042 - DNA, 780 bp, Nostoc sp. PCC 7120
  CDS (1)..(780)
atgttatctaaaagaatcttaccttgtttagatgtgaaggcgggacgggtagttaaaggagttaactttgttgatcttaaggatgctggcgatcctgtagaactggcgaaggtttacaacgatgctggggctgatgagttagtgtttctggatattacggctactcatgaagaccgagatactatcattgacgttgtttaccggactgccgagcaggtctttattcccctgactgtaggtggtggtattcaatccttagaaaatgttaaagctttgttacgcgctggggcagacaaggttagtattaactctgcggcggtacgtgacccagaattaattgatcgagcgagcgatcactttggtaatcagtgcattgttgtagcaattgatgctagacgcagagtagatcctagtaatcccggctgggatgtttacgtgcgtggtggtagggaaaacactggtttagatgccttatcatgggcgaaggaagtagaaaagcggggtgcaggagaactattggtaacaagtatggatgctgatggtactcaagccggttatgatatcgagttaacacgggcaattgctgagtcagtagaaataccagtcgttgcctccggtggtgcgggtaactgtgaacatatatacactgccttaactgaagggaaagcggaagctgcgttattggcatcgctgctacattatggtcaactcagcgtggctgaaattaagaattatttgcacgagagccaagttcctgtccgcttatacacacagttctaa

SEQ ID NO: 10043 - protein, 259 aa, Nostoc sp. PCC 7120
MLSKRILPCLDVKAGRVVKGVNFVDLKDAGDPVELAKVYNDAGADELVFLDITATHEDRDTIIDVVYRTAEQVFIPLTVGGGIQSLENVKALLRAGADKVSINSAAVRDPELIDRASDHFGNQCIVVAIDARRRVDPSNPGWDVYVRGGRENTGLDALSWAKEVEKRGAGELLVTSMDADGTQAGYDIELTRAIAESVEIPVVASGGAGNCEHIYTALTEGKAEAALLASLLHYGQLSVAEIKNYLHESQVPVRLYTQF

SEQ ID NO: 10044 - DNA, 735 bp, Lactococcus lactis subsp. lactis
  CDS (1)..(735)
atgctaactaaaagaatcatcccttgtcttgatattaaaaatggtaaggttgttaaaggaatcaattttgtgggtttaagagaaataggtgatccagtggaattggccaaaatatatgaagaacagtgtgcagatgaaattgtttttcttgatattacagcatcttttgaagaacgtgaaattattggtgaattaattggtcgggcggcgcgtgaactttcaattccattaaccgttggtggaggaattcgttcaattgacgattttagaagaattcttgctagaggagctgataaagtatccgtcaactcagctgcaattgaaaatcctgaacttattcgtcaagcggctaacgaatttggcgttcaatgtgttgttgttgctattgatgctaaaaaacgagcagaccataggggatatgatgtctatatcaaaggtgggcgtgaaaatgcaggtcttgacttagttgattgggctaaaaagtgtgaaagattaggagcaggcgaaattttactaacctcaatggataaggatggaacaaagacaggctacgatttggaaatgctgaatgacgtttgtactgctgttaatattcctgttgtagcaagtggcggttgtggcaagatttcggacattgttgaagtttttcaaaatacaagaagcgatgctgccctttttgcttcattatttcattatggcgaagaacagttgatgaagttaaagacgaacttataa

SEQ ID NO: 10045 - protein, 244 aa, Lactococcus lactis subsp. lactis
MLTKRIIPCLDIKNGKVVKGINFVGLREIGDPVELAKIYEEQCADEIVFLDITASFEEREIIGELIGRAARELSIPLTVGGGIRSIDDFRRILARGADKVSVNSAAIENPELIRQAANEFGVQCVVVAIDAKKRADHRGYDVYIKGGRENAGLDLVDWAKKCERLGAGEILLTSMDKDGTKTGYDLEMLNDVCTAVNIPVVASGGCGKISDIVEVFQNTRSDAALFASLFHYGEEQLMKLKTNL

SEQ ID NO: 10046 - DNA, 1052 bp, Klebsiella pneumoniae
  CDS (223)..(999)
gcacgtgctgtgcaccgatatttcccgcgacgggacgctggctgggtcgaacgtctcgctgtatgaagaagtctgcgcccgctatccgcaggtggcgtttcagtcttccggcggcattggcgatctcaatgatatcgccgcgctgctcggaaccggagtgcgcggggtgattgtcggtcgggcgctgctggaaggtaaatttaacgtaacggaggccattcaatgctggcaaaacggataatcccctgtcttgacgttcgcgacggccaggtagtgaaaggcgtgcagttccgtaatcacgaaatcatcggcgatatcgtcccgctggctaaacgctatgccgacgaaggcgcggatgagctggtgttctacgatatcaccgcctccagcgacggccgcgtggtggataaaagctgggtgtcgcgggtcgcggaagtgatcgacattccgttctgcgttgccggcggcattaagtcgctggacgatgcagcgcaaatcctctccttcggcgcggataaaatctccatcaactcccctgccctggcggatccgacgctgattacccgcctggccgatcggttcggcgtgcagtgtattgtggtgggcattgatacctggtttgacgccgcgagcggcaagtatcacgtcaaccagtataccggcgatgagagccggacgcgggtgacgcagtgggaaaccctggactgggtgcaggaagtgcaaaagcgcggggccggcgagatcgtcctcaatatgatgaaccaggacggcgtgcgtaacggctacgatctggagcagttaagcaaggtgcgcgccgtgtgccgcgtgccgctgattgcctccggcggcgcgggcactatggagcacttcctggaagcgttccgcgacgctagcgtcgacggcgcgctggccgcctcggtgttccacaagcaaattatcaacattggcgaactgaaaacgtacctggcagcacagggcgtggagattagggtatgttaagtgaacagctggattggcaaaaaaccgacggtctgatgccggtcatcgtgcag

SEQ ID NO: 10047 - protein, 258 aa, Klebsiella pneumoniae
MLAKRIIPCLDVRDGQVVKGVQFRNHEIIGDIVPLAKRYADEGADELVFYDITASSDGRVVDKSWVSRVAEVIDIPFCVAGGIKSLDDAAQILSFGADKISINSPALADPTLITRLADRFGVQCIVVGIDTWFDAASGKYHVNQYTGDESRTRVTQWETLDWVQEVQKRGAGEIVLNMMNQDGVRNGYDLEQLSKVRAVCRVPLIASGGAGTMEHFLEAFRDASVDGALAASVFHKQIINIGELKTYLAAQGVEIRVC

SEQ ID NO: 10048 - DNA, 759 bp, Bacillus subtilis
  CDS (1)..(759)
atgatcacaaaacggattatcccatgccttgatgtcaaagaaggacgcgttgtcaaaggaattcaatttctcgaattgaaggatgccggtgacccagttgaactcgccgaagtgtacgaccgggaaggtgcggatgaacttgtttttcttgatatctccgcctcgcacgaaggacgaaagacgatggttgacgttgtggagcaggttgccgcgaagcttgccattccgtttacagtcggcggcggcatcaatcagctcagcgatatgaaaacgatactgcgtgccggagcggacaaagtgtcggtgaacacggcagctgttctccgccctgagctgattacagaaggagccgagtttttcggttctcaatgcatcgtacttgccattgatgccaagtatgacaaagaatctgacacatataaggtctacacgcacggcggcagaaagaaaacagattgggaggtcaccgcgtgggcaaaagaaggcgtcaaacgcggggcaggagaaatattgctgacaagcatggactccgacggtgagaaaaaaggtttcgaccacacgctgacaaagcttgtttccgaagctgtccccgtccctgttatcgcttcgggaggcgcgggaaacgcacagcatatgcttgaggcttttacaaaaggagaagccgacgccgcgctggccgcctcaatttttcattataaagaaacatcgattaaagaagtgaaatcatacttgaaagagtacggggtgaatgtgagatga

SEQ ID NO: 10049 - protein, 252 aa, Bacillus subtilis
MITKRIIPCLDVKEGRVVKGIQFLELKDAGDPVELAEVYDREGADELVFLDISASHEGRKTMVDVVEQVAAKLAIPFTVGGGINQLSDMKTILRAGADKVSVNTAAVLRPELITEGAEFFGSQCIVLAIDAKYDKESDTYKVYTHGGRKKTDWEVTAWAKEGVKRGAGEILLTSMDSDGEKKGFDHTLTKLVSEAVPVPVIASGGAGNAQHMLEAFTKGEADAALAASIFHYKETSIKEVKSYLKEYGVNVR

SEQ ID NO: 10050 - DNA, 768 bp, Neisseria meningitidis
  CDS (1)..(768)
atggcactggcaaaacgcatcatcccctgtctcgacgtaaaagacgggcgcgtcgtcaaaggcgtgaacttcatcggtttgcgcgacgcgggcgaccccgtcgaagccgccaaacgctacaacggcgaaggcgcggacgaattgaccttcctcgacatcaccgcctcatccgacaaccgggataccatcctgcacatcatcgaagaagttgccggacaagtcttcatccccctgaccgtcggcggcggcgtacgcaccgttgccgacatccgccgcctgctcaatgccggcgcggacaaagtcagcatcaacaccgccgccgttacccgtcccgacctgattgacgaagccgccggatttttcggttcgcaagccatcgtcgccgccgtcgatgccaaagccgtcaaccccgaaaacacacgctgggaaatctttacccacggcgggcgcaatccgaccggtttggatgcggtggaatgggcgatcgaaatgcaaaaacgcggcgcgggcgaaatcctgcttaccggtatggacagggacggtacgaaacagggtttcaacctgccgctgacccgcgccgttgccgaagccgtcgacatccccgtcatcgcctccggcggggtcggcaatgtccggcacctgattgaaggcataaccgaaggcaaagccgatgccgtacttgccgccggcgttttccatttcggggaaatcgccatccgcgaagccaaacacgctatgcgcgaagccggcatcgaagtgcgcctctga

SEQ ID NO: 10051 - protein, 255 aa, Neisseria meningitidis
MALAKRIIPCLDVKDGRVVKGVNFIGLRDAGDPVEAAKRYNGEGADELTFLDITASSDNRDTILHIIEEVAGQVFIPLTVGGGVRTVADIRRLLNAGADKVSINTAAVTRPDLIDEAAGFFGSQAIVAAVDAKAVNPENTRWEIFTHGGRNPTGLDAVEWAIEMQKRGAGEILLTGMDRDGTKQGFNLPLTRAVAEAVDIPVIASGGVGNVRHLIEGITEGKADAVLAAGVFHFGEIAIREAKHAMREAGIEVRL

SEQ ID NO: 10052 - DNA, 759 bp, Bacillus halodurans
  CDS (1)..(759)
atgctcacaaagcggatcattccatgcttagatgtgaaggatggccgggtcgtcaaaggggtgcaattcgttgacttacgtgatgctggtgaccctgtagagcttgctgccttttacgatgaacaaggagcagatgaactcgtatttcttgatatttccgcctcccacgaagggcgtgagacgatgattgatgtggtcgaaaaagtggcaggaacgttggcgattccgttcaccgttggaggagggatcaactccctagaggacatgaagcgcgtgctgcgtgcaggggcagataaagtatcgttaaatacagcagcggttacgcgtccagagcttattactgaaggtgccgactattttggctcccagtgtatcgtcgttgcgattgatgcaaaatacgatgaagcccttggatcttggcgtatttacacccatggaggacggacaccgacagaatgggaagtgtgtgactgggcgagagaagcagtccgtcgcggagctggggaaattttgctcacaagcatggatcaagatggtgcgaagacgggctttgaccttgccttgacgaccaaggtgagtgaagccgtgagcgttccagtgattgcctcaggtggtgccggagcaaaggaagattttgtggacgtttttatgaatgcttatgcggatgccgctttggccgcttccattttccattataaagaaacatcagttgctgaagtgaaaacgcatttgcgtgaagaaggggtggcggtacgatga

SEQ ID NO: 10053 - protein, 252 aa, Bacillus halodurans
MLTKRIIPCLDVKDGRVVKGVQFVDLRDAGDPVELAAFYDEQGADELVFLDISASHEGRETMIDVVEKVAGTLAIPFTVGGGINSLEDMKRVLRAGADKVSLNTAAVTRPELITEGADYFGSQCIVVAIDAKYDEALGSWRIYTHGGRTPTEWEVCDWAREAVRRGAGEILLTSMDQDGAKTGFDLALTTKVSEAVSVPVIASGGAGAKEDFVDVFMNAYADAALAASIFHYKETSVAEVKTHLREEGVAVR

SEQ ID NO: 10054 - DNA, 762 bp, Clostridium acetobutylicum
  CDS (1)..(762)
atgcttacaaagagaataataccatgtcttgatgttgatatgggaagagttgttaagggtgtcaattttgttaacttaaaggatgttggtgacccggttgagatagcggatttttacaatagagaaggcgcagatgaaatagtatttttggacataagtgccacaaatgaaggcagaaataccatgatagatgtggtaagaagaacggcagagaaggtatttataccacttacagtaggtggtggaataagagatgtagatgattttaaaaatatattgagggcaggagcagataagatatctataaattcagcagcaataagaaatccagagcttataaatgaagctgcaaaaaaatttggaagtcaatgtgtcgtagttgcagtggatgcaagaagaaatatagaaacaggaggctttaatgtttttataaatggaggaagagtagatacaagtttagatgccatagaatgggttaaaaaatgtgaaagtcttggtgcaggagaaatacttcttacaagtatggatgcagatggtactaaaaatggatatgatgttgagctcacaggtgcagtatgtgatgcagttaggataccggttatagcttcaggaggatgtggaaggcttgaagattttgatgaaatatttaaaaagacttcagctgatgcagcacttgtggcatcactttttcattataaagagtatacagttggagaagttaaaaactatttaagagaaaatagtattcaagttagattataa

SEQ ID NO: 10055 - protein, 253 aa, Clostridium acetobutylicum
MLTKRIIPCLDVDMGRVVKGVNFVNLKDVGDPVEIADFYNREGADEIVFLDISATNEGRNTMIDVVRRTAEKVFIPLTVGGGIRDVDDFKNILRAGADKISINSAAIRNPELINEAAKKFGSQCVVVAVDARRNIETGGFNVFINGGRVDTSLDAIEWVKKCESLGAGEILLTSMDADGTKNGYDVELTGAVCDAVRIPVIASGGCGRLEDFDEIFKKTSADAALVASLFHYKEYTVGEVKNYLRENSIQVRL

SEQ ID NO: 10056 - DNA, 819 bp, Methanococcus jannaschii
  CDS (1)..(819)
atgctaacaaagagaattattccatgcttagatattaaagacggaagagttgttaaaggaactaagtttttgaatttgagggatgctggagacccagttgagttagcccaatactatgatgatgaaggagctgatgagcttgtatttttagatataaccgcctcagctgaaaagagggacataattattgatgttgtagagagaacagctgaaaaagtatttatcccattaactgttggtggaggaattaagtcaattgaagattttaggagaatactgagagccggggctgataaagtttcgataaacactgccgcagtaaaaaatccaaatttaattaaagaggcaagtgagatatttggctctcaatgtgttgttgttgcaattgatgctaaaagacactatgttaatgaagatgagatagataagataaataaaaatgtcgttaaagtagaggatggttattgctggtttgaagtttatatatacggagggagaaaagaaacaggtatagatgccataaactgggctaaaaaagttgaagaattgggagctggagagattttattgacaagtattgataaagatgggacaaaaagtggctatgatttgatattgacaaaggagatttctaaaagtgttaaactccctgttattgcaagtggaggttgtggaaaaccagaacatgtttatgaggcatttgtttatggaaaggcagatgccgcattaatggcagggatattgcactatagagaatatacaatagaagagataaaaaaatactgtgctgatagaggaatacctatgagattattataa

SEQ ID NO: 10057 - protein, 272 aa, Methanococcus jannaschii
MLTKRIIPCLDIKDGRVVKGTKFLNLRDAGDPVELAQYYDDEGADELVFLDITASAEKRDIIIDVVERTAEKVFIPLTVGGGIKSIEDFRRILRAGADKVSINTAAVKNPNLIKEASEIFGSQCVVVAIDAKRHYVNEDEIDKINKNVVKVEDGYCWFEVYIYGGRKETGIDAINWAKKVEELGAGEILLTSIDKDGTKSGYDLILTKEISKSVKLPVIASGGCGKPEHVYEAFVYGKADAALMAGILHYREYTIEEIKKYCADRGIPMRLL

SEQ ID NO: 10058 - DNA, 714 bp, Methanococcus jannaschii
  CDS (1)..(714)
atgataataatccctgcagttgatttaaaagataaaaagtgcgttcagctaattcaaggagacccaaataaaaagcatttggaactaaacaatccagtagaagttgctaaaaaatttgtagatgaaggggctgagtatctacatataatcgatttagatgccgcatttggaacaggaaataatagagacgttattaagaacattataaaagaggttaatgttccagttgaggttggaggaggaattagaaatttagagatagcaaaggaattaattagcttgggagttgatagagttatagtgggaactaaggcaattttagaaccaaaattcatagatgatttaaataaagagattggaaaagataagatagttttagctgtagaatgtaaagagggaaaggttgttattaaaggatggaaggaaaaagtagataaaactccaatagaagttattaaggaatttgaagataaggttggctatatattatttacaaatgtagatgttgagggcttattaaaaggaataaatgttgatataattaaagagttaattgaaaagactgatattcctatcatctactctggtggaattacaaccttagaagacataaaagctttaaaagaacttggtatttatggagttgttattggttcagcactatataaaggtttaattgatttaaaaaaggcgttagagatagttaaaaattaa

SEQ ID NO: 10059 - protein, 237 aa, Methanococcus jannaschii
MIIIPAVDLKDKKCVQLIQGDPNKKHLELNNPVEVAKKFVDEGAEYLHIIDLDAAFGTGNNRDVIKNIIKEVNVPVEVGGGIRNLEIAKELISLGVDRVIVGTKAILEPKFIDDLNKEIGKDKIVLAVECKEGKVVIKGWKEKVDKTPIEVIKEFEDKVGYILFTNVDVEGLLKGINVDIIKELIEKTDIPIIYSGGITTLEDIKALKELGIYGVVIGSALYKGLIDLKKALEIVKN

SEQ ID NO: 10060 - DNA, 816 bp, Archaeoglobus fulgidus
  CDS (1)..(816)
atgctggccaaaagaataatcccctgtctcgacgtaactcttgacgaaagtgaagcgagggttgttaagggagtggagttcgtcaatcttagggatgctggcgacccagttgagctggcgaagaggtacgacgaggagggggcagacgagcttgtttttcttgacatcacagcctctccagaagggagaaggacgatgattgatgttatagagagaactgcggagcaggttttcatccccttcaccgttggaggggggataaagagcattgaggacataaacaccattctctctgctggagcggacaaggtttctatcaacaccgccgccgtcaaaaaccccgaatttgtgagagaggctgcggatattttcggcagccagtgcattgttgttgccattgactgcaggaggaacttcgacctgagcaagggtgaatacatcgtggagcttgaggatggcacgaaggcgtggtacgaggttgtgatttacggcgggagaaagcccgtcggcatagatgcggtctggtgggcgaagagggttgaggagcttggcgctggagagattctgctcacgtcgatgaacagagacggcacgaaggatggtttcgacatccccataacgagaaagataagcgaggaggttaacattccagtcatagcttcaggaggagctggaacaaaggagcacttctacgaggggtttgtggaagggaaggccgatgcgtgcttagctgcaagcatcttccactacagagaaattggaatcagggaaattaaggagtatctggctgagaggggcgtgcaggtgagattgtga

SEQ ID NO: 10061 - protein, 271 aa, Archaeoglobus fulgidus
MLAKRIIPCLDVTLDESEARVVKGVEFVNLRDAGDPVELAKRYDEEGADELVFLDITASPEGRRTMIDVIERTAEQVFIPFTVGGGIKSIEDINTILSAGADKVSINTAAVKNPEFVREAADIFGSQCIVVAIDCRRNFDLSKGEYIVELEDGTKAWYEVVIYGGRKPVGIDAVWWAKRVEELGAGEILLTSMNRDGTKDGFDIPITRKISEEVNIPVIASGGAGTKEHFYEGFVEGKADACLAASIFHYREIGIREIKEYLAERGVQVRL

SEQ ID NO: 10062 - DNA, 762 bp, Aquifex aeolicus
  CDS (1)..(762)
atgctggcaaagagaataattccctgccttgacgtggataaagggagagttgtgaaaggtgtgaagttcctaaacctcagggacgcgggagacccagtggaagtggcaaaaaggtacgaagaagaaggagcggatgaactggtattcctggacataacagcctcggcggaagacagggaaataatgatagacgtagtaaagaaggttgccgaaaccgtcttcatgcccttcacagtgggaggagggataaggagcttggaggatatgaggagactcttagaagcgggagcggacaagatatctataaacacggcagcggtgaagaatccgaatcttatttacgagggggcaaagaggttcggatctcagtgtatagtggttgctatagacgcaaaaaggaagggaaattcgtgggaggtttacatacacggtggaagaacacctacgggacttgacgctgttgagtgggctaaaaaagttgaaagtttgggagctggagagattctcttgacttccatggacagagacgggacaaaggacgggtacgatatagaactaaacagagccatctcggaagcggtgaacatacccgttatagcttctgggggtgcgggcaagaaggaacacttttacgaagttttttcaaagacaaaggtagaggctgcccttgccgcttcagtattccacttcagggaaataagtattccggagctgaaggagtatcttctggaaagaggtattaacgtgagacctcttgactga

SEQ ID NO: 10063 - protein, 253 aa, Aquifex aeolicus
MLAKRIIPCLDVDKGRVVKGVKFLNLRDAGDPVEVAKRYEEEGADELVFLDITASAEDREIMIDVVKKVAETVFMPFTVGGGIRSLEDMRRLLEAGADKISINTAAVKNPNLIYEGAKRFGSQCIVVAIDAKRKGNSWEVYIHGGRTPTGLDAVEWAKKVESLGAGEILLTSMDRDGTKDGYDIELNRAISEAVNIPVIASGGAGKKEHFYEVFSKTKVEAALAASVFHFREISIPELKEYLLERGINVRPLD

SEQ ID NO: 10064 - DNA, 762 bp, Thermotoga maritima
  CDS (1)..(762)
atgctcgctaaaagaataatcgcgtgtctcgatgtgaaagacggtcgtgtggtgaagggaacgaacttcgaaaacctcagggacagcggtgatcctgtcgaactgggaaagttctattccgaaattggaatagacgaactcgtttttctggatatcaccgcgtccgttgagaagaggaaaaccatgctggaactggtcgaaaaggtggccgagcagatcgacattccgttcactgttggaggaggtatccacgacttcgaaacggcctcggagctcattctccgtggtgcggacaaggtgagcataaacacggcggctgtggagaatccttctttgatcacacagatcgctcaaacttttgggagtcaggccgttgtcgtggcgatagatgcaaaaagagtggatggagagttcatggtcttcacctactccggaaagaagaacacgggcatacttctgagagactgggtggttgaagtagaaaagagaggagcaggagagatcctgctcaccagtatcgacagagacggcacaaaatcgggttacgatacggagatgataaggttcgtgaggccactaaccacacttcccatcatcgcttccggtggtgcgggaaaaatggaacatttccttgaagccttcctggcaggtgccgacgctgcccttgcggcttctgtctttcacttcagagagatcgacgtgagagaactgaaagagtacctcaaaaaacacggagtgaacgtgagactggaggggttgtga

SEQ ID NO: 10065 - protein, 253 aa, Thermotoga maritima
MLAKRIIACLDVKDGRVVKGTNFENLRDSGDPVELGKFYSEIGIDELVFLDITASVEKRKTMLELVEKVAEQIDIPFTVGGGIHDFETASELILRGADKVSINTAAVENPSLITQIAQTFGSQAVVVAIDAKRVDGEFMVFTYSGKKNTGILLRDWVVEVEKRGAGEILLTSIDRDGTKSGYDTEMIRFVRPLTTLPIIASGGAGKMEHFLEAFLAGADAALAASVFHFREIDVRELKEYLKKHGVNVRLEGL

SEQ ID NO: 10066 - DNA, 798 bp, Deinococcus radiodurans
  CDS (1)..(798)
atgctgcggggcgtgctcgccaaacgcatcgttccctgcctggatgtccaaaatggccgcgtggtcaaaaacgtgcgctttttcgaggatcaccgcgacgcgggcgacccgctggtgctcgcgcaggcctacgaggcgcaacaggccgacgaactcgtcttctacgacatcaccgcaacgcacgagggccggtcactcatgctggacgtggccgcccgcgtggccgagcaggtgatgatgccgctcaccgtgggcggcggagtgggtgccctctccgattttcgtcaactgctgctcgccggggccgacaaaatcagcgtgaacagcggcgcggtaaagcggcccgaacttatccgcgaggcgagcgaccactacggggcgcagtgcgtgatgctcagcatcgacgccaagcgccgccctggtgggcagggctggaccgtccatatcggcggcgggcgggtggacactggcctggacctgctggcgtgggcgcggcgcggccaggaactcggggcgggtgagctgtgcctgaacgtgatggacgccgacggcacccgcgccggcttcgacctggaagcgacccgcgccgtggcccgcgaggtggacctgccggtcatcgcgtccgggggcgcgggcaaggtgcaggacttttacgacgtactgaccgctggcgaggccgacgccgcgctcgctgccagcgtctttcatttcggcgaactgacggtgccgcaggtcaagacctccctcgccgcgcagggcgtgccggtgcggcccgagtggcggggcgctaccgaataa

SEQ ID NO: 10067 - protein, 265 aa, Deinococcus radiodurans
MLRGVLAKRIVPCLDVQNGRVVKNVRFFEDHRDAGDPLVLAQAYEAQQADELVFYDITATHEGRSLMLDVAARVAEQVMMPLTVGGGVGALSDFRQLLLAGADKISVNSGAVKRPELIREASDHYGAQCVMLSIDAKRRPGGQGWTVHIGGGRVDTGLDLLAWARRGQELGAGELCLNVMDADGTRAGFDLEATRAVAREVDLPVIASGGAGKVQDFYDVLTAGEADAALAASVFHFGELTVPQVKTSLAAQGVPVRPEWRGATE

SEQ ID NO: 10068 - DNA, 735 bp, Bacillus halodurans
  CDS (1)..(735)
atggctaagtttatcatttacccggcgattgatatgcgcgacggcaaatgtgttcgtctcgtccaaggcgactacaatcaagagaccgtttatggggattctccgtttaccatggcaaagtcgtttgccgaacaaggtgccgaatggattcatatggtcgatttagatggagctaaggcaaaagaacgtatgaaccacgagcacgtcgttaaggtcgcaacagagctcgatgtgaacgttcaagttgggggcggaatccgaacggcagaggacatcgcgtattacctagaccggggaatcagtcgggtgattttagggagtgtggccgtgaacaatcctgcgtttacgaaagaaatgttgcagaaatatggcggagaaaaaatcgccatcggcttagatgcgcgcgacgggtacgtggcaacggaaggctggctggaaacgtcctcggtaaaagcggaaacgcttgggcaagagctcgcccggcatggggcagaagtctttatttttactgatatttctcgcgatggcatgctgtcgggcccgaatacggaggcgattgttcagctagcgaaggcgacaggaaaacaggtgatcgcatcaggaggggttagctccttacaagacctcgatgctctcagaaacgaaaagcagaacggaatcgcaggggctattgtcggtaaagccttgtacacgaatcaatttacgctggaagatgcgttaaaggaggagagctaa

SEQ ID NO: 10069 - protein, 244 aa, Bacillus halodurans
MAKFIIYPAIDMRDGKCVRLVQGDYNQETVYGDSPFTMAKSFAEQGAEWIHMVDLDGAKAKERMNHEHVVKVATELDVNVQVGGGIRTAEDIAYYLDRGISRVILGSVAVNNPAFTKEMLQKYGGEKIAIGLDARDGYVATEGWLETSSVKAETLGQELARHGAEVFIFTDISRDGMLSGPNTEAIVQLAKATGKQVIASGGVSSLQDLDALRNEKQNGIAGAIVGKALYTNQFTLEDALKEES

SEQ ID NO: 10070 - DNA, 729 bp, Halobacterium sp. NRC-1
  CDS (1)..(729)
atgacattcgagtcgttcacggtgctgccggccgtcgacatgcaggacggacaggtggtgcagctcgtgcagggggagcgtgggaccgagcgcacgtacggcgaccccgtggacgccgcgaccgactgggtggccgcgggcgccgaggcgttgcacctcgtggacttggacggcgccttcgagggtgcgcgcgcgaacgccaccgccgtcgaggacatcctcgacgcgaccgacgtgtcagtgcaggtcggtggcggcattcggagcgccgaggacgccacggccctgctcgaccggggcgtcgaccgtgtcatcctcggcaccgccgccatcgagaccccggacatcgtcggggagatcgccgccgcgtacagcgacggcgtgctcgtgagcctggacgccaaggacggcgaggtggtcgtggaaggctggaccgagggcaccggcatggacccggtggcggccgcccagcggtacgccgacctgggggcggcgggcatcctgttcaccgacgtggacgtggaggggaaacaggagggcgtgcgaaccgaccccgttcgagacctcgttgacagcgtcgacatcccggtgatcgccagcggcggcgttgccactgtcgacgacgtgcgcgcactcgaagccgcgggggcggccggcgcggtcgtcgggaccgcactctacgaggggaatttcacgcttgcggacgcgcaggcggccgtcgaggactga

SEQ ID NO: 10071 - protein, 242 aa, Halobacterium sp. NRC-1
MTFESFTVLPAVDMQDGQVVQLVQGERGTERTYGDPVDAATDWVAAGAEALHLVDLDGAFEGARANATAVEDILDATDVSVQVGGGIRSAEDATALLDRGVDRVILGTAAIETPDIVGEIAAAYSDGVLVSLDAKDGEVVVEGWTEGTGMDPVAAAQRYADLGAAGILFTDVDVEGKQEGVRTDPVRDLVDSVDIPVIASGGVATVDDVRALEAAGAAGAVVGTALYEGNFTLADAQAAVED

SEQ ID NO: 10072 - DNA, 774 bp, Vibrio cholerae
  CDS (1)..(774)
atgttggcaaaacggataattccttgtctggatgtacgtgatggacaggtagtgaaaggcgttcagtttcgtaaccacgaaatcattggagacattgtgccactggccaaacgttacgccgaagaaggcgcggatgagctggtgttttacgatattaccgcttccagtgatggccgcgttgtcgataaaagctgggtcgcgcgagtcgcggaagtgatcgacatccctttctgtgtcgcgggcgggatcaagtcggcgcaagatgctgcgcgaatcttggagttcggtgcagataaagtgtcaattaactcgcctgcactggcgaatccacaactgatcaccgatcttgcggatcgctttggcgtgcaatgtatcgtggttggcatcgactcttattttgataaagaaacaggtcaatatcaggtttatcagtttaccggtgacgaaagccgcacccgtgccacgcagtggcaaacttgcgattgggtgcaagaggtgcaaaagcgcggcgctggggaaattgtactgaacatgatgaaccaagatggtgtgcgcaatggttacgatcttgagcagctcaacttagtgcgctcggtgtgccgagttccgctgatcgcctccggtggtgcaggggcgatggaacatttcgcgcaagcttttactcaagcgaacgtcgatggtgctttagccgcttcggtgtttcacaagcagatcatcaatatcggtgaactcaagcagtatctaaaacaacaaggaattgaggtgagacgatga

SEQ ID NO: 10073 - protein, 257 aa, Vibrio cholerae
MLAKRIIPCLDVRDGQVVKGVQFRNHEIIGDIVPLAKRYAEEGADELVFYDITASSDGRVVDKSWVARVAEVIDIPFCVAGGIKSAQDAARILEFGADKVSINSPALANPQLITDLADRFGVQCIVVGIDSYFDKETGQYQVYQFTGDESRTRATQWQTCDWVQEVQKRGAGEIVLNMMNQDGVRNGYDLEQLNLVRSVCRVPLIASGGAGAMEHFAQAFTQANVDGALAASVFHKQIINIGELKQYLKQQGIEVRR

SEQ ID NO: 10074 - DNA, 756 bp, Sulfolobus solfataricus
  CDS (1)..(756)
atgacaacgaaaagaataatagcttgcctcgatgtaaaggacggtaacgtagttaaaggagtaaatttccttaatctccaattgaaaggagatccggttagcctagccagtctatatgaagaagaaggcgctgatgagatagtcttcttagatataactgcaacgatagaagctagaaaagcattatataatgtcattaaggatactgcgagcgtattgtccattcccttaacagttggtggtggtattagaacacctgacgacgtgtcaatggcgttaagatctggagcagataaggttagtataaatactgctgcagttgaaagtagccaaatagtgaaaaaatctgcagaagagtttggatcacaagcagtagtagtagccatagatgttaagaaggtaagcggaaattggatagtcttcacaaaatccggaacttacaataccagacttgatgctataaagtgggctaaaaaggtggaagaacttggtgcaggtgaaatattgctaacgagtattgatagagatggtactagacttggttatgacttagaattaactaggaaaatagttgattctgtcaatatcccagtaatagctagtgggggagctggaaaaatggaacatttttatgaggttttttccctcgcgaaggccgacgcagcgttagctgctggcatattccatgatggaataattaaaataaaagacttgaagtcgtatttaagccagaaaggcatcgaggtgagaatgtga

SEQ ID NO: 10075 - protein, 251 aa, Sulfolobus solfataricus
MTTKRIIACLDVKDGNVVKGVNFLNLQLKGDPVSLASLYEEEGADEIVFLDITATIEARKALYNVIKDTASVLSIPLTVGGGIRTPDDVSMALRSGADKVSINTAAVESSQIVKKSAEEFGSQAVVVAIDVKKVSGNWIVFTKSGTYNTRLDAIKWAKKVEELGAGEILLTSIDRDGTRLGYDLELTRKIVDSVNIPVIASGGAGKMEHFYEVFSLAKADAALAAGIFHDGIIKIKDLKSYLSQKGIEVRM

SEQ ID NO: 10076 - DNA, 738 bp, Bacillus subtilis
  CDS (1)..(738)
atgagtgcttttacattatatccggcaattgatatgagaaacggcaaatgtgttcgccttgttcaaggggattataataaggaaacgatatatggcgattcaccgtacgacatggctgagttatttgagaaagagggtgccgaatggatccatctcgttgatctcgacggggccaaagaagggaaaagagtgaatgaccgccatgtgattgagattgcgcaaaagctgaacctgaaagtcgaaatcggcggtgggatccgttctgaaaatgacgtctatgaatatttatcagcaggagtcgagcgggtgatcctgggaagctcagcagtttctaaccctccgtttgtcaaaaaaatgctgaaacaatatggcgagaaaattgcaatcggactggatgcgagaaacggttttgtttcaacagagggatggcttgaaacatcaacccttaaggcaactgaactgggcaaagagctagccaatgaaggtgcggaagtctttatttttactgacatcgcgacagatggaatgctgtcaggccccaatgttaaaagcacggtcgagcttgctaaggaaacggggaaatcggtgatcgcttccggcggagtcagctccgtcgcggatctcgaagctctcgcccgcaatgaggcggacggcgtctctggagcgatcatcggaaaagcgctgtataccaatcagtttacgctgagtgaggcgcttgaaagggtgaagcgcaaatga

SEQ ID NO: 10077 - protein, 245 aa, Bacillus subtilis
MSAFTLYPAIDMRNGKCVRLVQGDYNKETIYGDSPYDMAELFEKEGAEWIHLVDLDGAKEGKRVNDRHVIEIAQKLNLKVEIGGGIRSENDVYEYLSAGVERVILGSSAVSNPPFVKKMLKQYGEKIAIGLDARNGFVSTEGWLETSTLKATELGKELANEGAEVFIFTDIATDGMLSGPNVKSTVELAKETGKSVIASGGVSSVADLEALARNEADGVSGAIIGKALYTNQFTLSEALERVKRK

SEQ ID NO: 10078 - DNA, 822 bp, Halobacterium sp. NRC-1
  CDS (1)..(822)
atgacactcaccaagcgcgtcatcccctgcatcgacgtggacctcgacgacgacggggagcccgcagtgtacaccggcgtcaacttcgaggagctggcgtacacgggcgaccccgtcgagatggcgaagcggtacaacgaagcgggcgccgacgagttcgtgttcctcgacatcacggccagcgccgagggccgggagacgatgctcgacaccgtttcggcggtcgccgacgaggtgttcatcccgctgaccgtcggcggcggcatccgggacaccgacgacatccgggagacgctgcgcgcgggcgccgacaaggtctcgatcaactcgggcgcgatcgccgacccgtcgctggtggaccgcggcgcgaaagccttcggcagccagtgcatcgtcatcagcgtcgacgcccggcggcgcttcgacgaacagggccaacactacacgcaggtcgacggcgagtcgtgctggttcgagtgcacggtccacggcggccgcgaaggcaccggcatggacgccatcgagtgggtccaggaggcacagcgacgcggcgcgggcgagctgttcgtgaactccatcgacgccgacggcacacaggacggctacgacgttccgctcacggcggcggtctgtgacgccgtttcgacgcccgtgatcgcgtcctcggggtgtggcgcgcccggcgacatggccgacgcctacgacgccggcgctgacgcggcgctggcggcgtcgatcttccacttcgacgagtacagcatcgcggagacgaaagagacgctcgctgacgccggctatccgatccgcgccccggacgcgtga

SEQ ID NO: 10079 - protein, 273 aa, Halobacterium sp. NRC-1
MTLTKRVIPCIDVDLDDDGEPAVYTGVNFEELAYTGDPVEMAKRYNEAGADEFVFLDITASAEGRETMLDTVSAVADEVFIPLTVGGGIRDTDDIRETLRAGADKVSINSGAIADPSLVDRGAKAFGSQCIVISVDARRRFDEQGQHYTQVDGESCWFECTVHGGREGTGMDAIEWVQEAQRRGAGELFVNSIDADGTQDGYDVPLTAAVCDAVSTPVIASSGCGAPGDMADAYDAGADAALAASIFHFDEYSIAETKETLADAGYPIRAPDA

SEQ ID NO: 10080 - DNA, 726 bp, Caulobacter crescentus
  CDS (1)..(726)
atgatcctctatcccgccatcgacctgaaggacggccagtgcgtgcgcctgctgcatggcgacatggacaaggccacggtcttcaacacctcgcccgccgaccaggcccagcgcttcgtccaggacggcttctcgtggctgcacgtcgttgacctgaacggcgccatcgagggcaagtcggtcaatacggccgctgtcgaacagatcctggagtcgatctcgatcccggtgcagctgggcggcggcatccgcaccctggaaggcgtcgaagcctggatcgaggcgggcgtgtcgcgcgtgatcctcggcaccgtggccgtgcacgatcccgaactggtcaagaaggccgcgcgcctgtggcccgagcagatcgccgtggcggtcgacgtgcgcgacggcaaggtcgcggtcgacggctggacaggcctgtcggacctgtcggcgatcgacctttcgcgccgcttcgaggacgccggcgtcgcagccctcattatcaccgacatcagccgcgacggcgccctgacgggcgtcaatgtcgaaggcgtgggcgagctggccgacgccgtctcgatccccgtcatcgcctcgggcggtgtggccgccgtggccgatatcgagcgcctgaaggcccgtcagggcgtcgagatcgccggcgcgatcctgggccgttcgctctatgccggcacgatcaagccttccgaagccctgatcgcggcggccgcctga

SEQ ID NO: 10081 - protein, 241 aa, Caulobacter crescentus
MILYPAIDLKDGQCVRLLHGDMDKATVFNTSPADQAQRFVQDGFSWLHVVDLNGAIEGKSVNTAAVEQILESISIPVQLGGGIRTLEGVEAWIEAGVSRVILGTVAVHDPELVKKAARLWPEQIAVAVDVRDGKVAVDGWTGLSDLSAIDLSRRFEDAGVAALIITDISRDGALTGVNVEGVGELADAVSIPVIASGGVAAVADIERLKARQGVEIAGAILGRSLYAGTIKPSEALIAAAA

SEQ ID NO: 10082 - DNA, 777 bp, Agrobacterium tumefaciens
  CDS (1)..(777)
atgaccctcaaagcccgcattattccctgcctcgacgtgaaagacggacgtgtcgtcaagggtgtgaacttcgtcgacctgatcgatgctggcgacccggtcgaggcagcaaaagcctatgacgcggcgggagcggatgaactctgcttcctcgacatcaccgcgtcctcggacaatcgcgacaccatcttcgatgtcgtctcacgcactgcggaccattgcttcatgccggtgacggtcggtggcggggttcgtagcgtcgcggatattcgtaagctgcttctttgcggtgcggacaaggtctctatcaactccgcagctgtcaaggatcccgacttcgttgcgcaggcggccgacaagttcggcaaccaatgcatcgtcgtttccatcgacgccaagcgggtttccaaagatggcgaagctgaccgctgggaaatttttacccatggcggacgccagccaactggtatcgatgccgtggaattcgccatcaagatggttgaacggggtgccggcgaattgctcgtcacctcgatggatcgcgacggcaccaagagcggttatgatatcggcctgacgcgcagcattgccgatcaggttcgcgtgcccgtcatcgcctcgggcggcgttggtacgcttgatgatctggtggcaggtgttcgcgatggccacgcgacggcagtgcttgccgcttccatcttccacttcggcacctattcgatcggtgaagccaagagctacatggccgaacatggcattgccatgcgtctcgactga

SEQ ID NO: 10083 - protein, 258 aa, Agrobacterium tumefaciens
MTLKARIIPCLDVKDGRVVKGVNFVDLIDAGDPVEAAKAYDAAGADELCFLDITASSDNRDTIFDVVSRTADHCFMPVTVGGGVRSVADIRKLLLCGADKVSINSAAVKDPDFVAQAADKFGNQCIVVSIDAKRVSKDGEADRWEIFTHGGRQPTGIDAVEFAIKMVERGAGELLVTSMDRDGTKSGYDIGLTRSIADQVRVPVIASGGVGTLDDLVAGVRDGHATAVLAASIFHFGTYSIGEAKSYMAEHGIAMRLD

SEQ ID NO: 10084 - DNA, 747 bp, Campylobacter jejuni
  CDS (1)..(747)
atgttaaaaactagaattatcccttgtgtgttattaaaaaattctcaacttgttaaaagtatagaatttaaagattttcgcactatagggcatttaacttcaacaatgagaatttataatgcacgcaatgttgatgagcttattatcttagatatagatgcttcaaaaagtggagaaatagattttgaaagtatagaagatcttgctaaagaatgttttatgcctttaactataggtggcgggataaaaacccttgaagatatacaaaagattttaaatttaggtgcggataaaatttctatcaattctaaggccttagaagatatggattttataagtaaagcgggtaatcgttttggttctcaatgtatagtttgttctatagatgttaaaagaaaaggagatcaattttgtgtttatgataggggaaatttacttgaaaaaagtcctttagaacttgctttagaatatgaaaaaaaaggagctggagagcttcttttaacttctgtggattttgagggaaaagcaaagggttatgatttagaacttttaaagatttttcaaaataaacttaaaattcctcttattatcaatggaggacttagcaagccaagtgatggagttgaggctttaaatttaggcgccgatgctttagcgggtgcttatatttttcatttttctaaatatacccctaaagatgtaaaagaagaattagctaggcaaggctttgcagtgagattgctttaa

SEQ ID NO: 10085 - protein, 248 aa, Campylobacter jejuni
MLKTRIIPCVLLKNSQLVKSIEFKDFRTIGHLTSTMRIYNARNVDELIILDIDASKSGEIDFESIEDLAKECFMPLTIGGGIKTLEDIQKILNLGADKISINSKALEDMDFISKAGNRFGSQCIVCSIDVKRKGDQFCVYDRGNLLEKSPLELALEYEKKGAGELLLTSVDFEGKAKGYDLELLKIFQNKLKIPLIINGGLSKPSDGVEALNLGADALAGAYIFHFSKYTPKDVKEELARQGFAVRLL

SEQ ID NO: 10086 - DNA, 783 bp, Caulobacter crescentus
  CDS (1)..(783)
atgctgaagacccggatcattccctgcctcgacgtgaaggacgggcgggtggtcaagggggtcaacttcgtctccctgcgcgacgccggcgacccggtggagcaggcgcgggcctatgacgccgccggcgccgacgagctgatgttcctggacatcaccgcttccagcgaaggacgcggcctgatcctggacgtcatctcgcgcaccgccgaggtctgcttcatgcccgtctcggtgggcggcggggtgcggcaggtctcagacatgcgccgcctgttgctggccggcgccgacaaggtctcggtcaacaccgccgccgtcgagaaccccgacctgatcgccggcggcgccgacgccttcgggtcccagtgcgtggtcgtggccatcgacgctaaggcgcgcgaggacggctcgggctggaacgtctggacctatggcggccgcaaggacaccgggatcgacgtggtcgaatgggccgccaaggtcgtggaacgcggcgcgggcgagatcctgctgacctcgatggaccgcgacggcgccaagatcggctacgatatcccgctgctgcaggcggtgacgggcgcggtcaatgtgccggtgatcgcctcgggcggcgcgggcaagaccgaacatctgatcgaagccgcccgcgaaggccacgccgccgccgtgctggccgcctcgatcttccacttcggcgagatttcgatcggcgaggccaagcaggccatggccgacgccggcatccccgtgcgcctagacgcgctgaagggagccgcatga

SEQ ID NO: 10087 - protein, 260 aa, Caulobacter crescentus
MLKTRIIPCLDVKDGRVVKGVNFVSLRDAGDPVEQARAYDAAGADELMFLDITASSEGRGLILDVISRTAEVCFMPVSVGGGVRQVSDMRRLLLAGADKVSVNTAAVENPDLIAGGADAFGSQCVVVAIDAKAREDGSGWNVWTYGGRKDTGIDVVEWAAKVVERGAGEILLTSMDRDGAKIGYDIPLLQAVTGAVNVPVIASGGAGKTEHLIEAAREGHAAAVLAASIFHFGEISIGEAKQAMADAGIPVRLDALKGAA

SEQ ID NO: 10088 - DNA, 771 bp, Pseudomonas aeruginosa
  CDS (1)..(771)
atggcactggcaaaacgcatcatcccctgcctcgacgtggacaacggccgagtggtcaagggcgtcaagttcgagaacatccgcgacgccggcgacccggtcgagatcgctcgccgctacgacgagcagggtgccgacgagatcaccttcctcgatatcaccgccagcgtcgacgggcgcgacaccaccctgcataccgtcgagcgcatggctagccaggtgttcattccgctgaccgtgggcggcggcgtacgcagcgtgcaggacatccgcaacctgttgaatgccggcgcggacaaggtctcgatcaacaccgccgcggtgttcaaccccgagttcgtcggtgaggccgccgaccgcttcggctcgcagtgcatcgtggtcgccatcgacgcgaagaaggtttccgccccgggcgaggcgccgcgctgggaaatcttcacccatggcgggcgcaagcccaccgggctggatgccgtgctctgggcgaagaagatggaagacttgggcgctggcgagattctcctgaccagcatggaccaggacggcgtgaagagcggttacgacctgggcgtgacccgcgccatcagcgaggcggtgaacgtgccggtgatcgcttccggcggcgtcggcaacctggagcacctggccgccggcatcctcgagggcaaggccgacgcggtgctcgcggcgagcatcttccacttcggcgagtacaccgtgccggaagccaaggcctacctggccagccgcggtatcgtggtgcgctga

SEQ ID NO: 10089 - protein, 256 aa, Pseudomonas aeruginosa
MALAKRIIPCLDVDNGRVVKGVKFENIRDAGDPVEIARRYDEQGADEITFLDITASVDGRDTTLHTVERMASQVFIPLTVGGGVRSVQDIRNLLNAGADKVSINTAAVFNPEFVGEAADRFGSQCIVVAIDAKKVSAPGEAPRWEIFTHGGRKPTGLDAVLWAKKMEDLGAGEILLTSMDQDGVKSGYDLGVTRAISEAVNVPVIASGGVGNLEHLAAGILEGKADAVLAASIFHFGEYTVPEAKAYLASRGIVVR

SEQ ID NO: 10090 - DNA, 777 bp, Buchnera sp
  CDS (1)..(777)
atgctggcaaagagaatcatagcgtgtcttgatgttgatgatggtgtagtagtgaaaggaattaaatttcagaatcataaaatcgtaggcgatattgtaccattagccagacgctacgcaaaagaaggtatagatgaattagttttttatgatattactgctgcaacaaaaaataaattagttgatcgtagttggataaaaaatgtttctaaagttataaatattccattttgcgtagctggaggtattaaaagtgtagaagatgctaaaaaagttttatctagtggtgcagataaaatatcaatcaattcttcagcattaatagatcctaatttaattactaaaatttcagaacgttttggtgtacagtgtgtagttattggaattgattcttggtttgataaaacaaaaaattcttatatggtacaacaatatacaggagatattagtaaaacttatcaaacgtcttggaaaacatctgattgggtaaaaaaagtacaagaaaaaggtgctggtgaaatagtgttaaatatgatgaataaagatggattacaaaaggggtatgatatatcacatttaagtgaaataagaaaaatatgtaaagtacccttaattgcatcaggtggcgctggaagtgtagaacacttttatgaagcattatattattctaatgttgatggagtgctagctgcatctgtttttcataaaaatatagtagagataaaagtgttgaaaaaaaaattaattgcgcgaggaatggagattagagagtgttaa

SEQ ID NO: 10091 - protein, 258 aa, Buchnera sp
MLAKRIIACLDVDDGVVVKGIKFQNHKIVGDIVPLARRYAKEGIDELVFYDITAATKNKLVDRSWIKNVSKVINIPFCVAGGIKSVEDAKKVLSSGADKISINSSALIDPNLITKISERFGVQCVVIGIDSWFDKTKNSYMVQQYTGDISKTYQTSWKTSDWVKKVQEKGAGEIVLNMMNKDGLQKGYDISHLSEIRKICKVPLIASGGAGSVEHFYEALYYSNVDGVLAASVFHKNIVEIKVLKKKLIARGMEIREC

SEQ ID NO: 10092 - DNA, 777 bp, Haemophilus influenzae
  CDS (1)..(777)
atgttggcaaaacggataattccttgtttggatgtacgtgatggacaggtggtaaaaggggtacaattccgtaaccacgaaattattggcgatattgtgccacttgctcaacgctatgcgcaagaaggagctgatgaattggtattttatgatattacggcttcatcagacggtcgtaccgtggataaaagttgggtagaacgaatcgctcaggtaattgatattccgttttgcgtagcaggtgggattaaaaccattgaagatgcggaaaaattgtttgcatttggggcggataaaatttcgattaattcccctgctctcgctgatccaacgctcatttctcgcttagcagatcgttttggcgtacaagcgattgtagtaggtattgatagttggtttgaacaggaaacaggtaagtattgggtaaaccaatatacaggcgatgaaacacgtacccgacaaactcattggcagttgttagattgggtaaaagaagtacaacaatgcggtgcaggagaaatcgtgctaaatatgatgaatcaagatggtttacgaaacgggtacgatttagcccagctcaagctggtgcgaggagtatgtagagtacctctaattgcatctggcggtgcgggtaaaatggtacattttcgtgatgcttttattgaagcaaaagtagatggggcattagctgccagcgtattccataaacagattattgaaattggcgagttaaaatcctaccttgtgcaatcagccatcgagattcggagtgaataa

SEQ ID NO: 10093 - protein, 258 aa, Haemophilus influenzae
MLAKRIIPCLDVRDGQVVKGVQFRNHEIIGDIVPLAQRYAQEGADELVFYDITASSDGRTVDKSWVERIAQVIDIPFCVAGGIKTIEDAEKLFAFGADKISINSPALADPTLISRLADRFGVQAIVVGIDSWFEQETGKYWVNQYTGDETRTRQTHWQLLDWVKEVQQCGAGEIVLNMMNQDGLRNGYDLAQLKLVRGVCRVPLIASGGAGKMVHFRDAFIEAKVDGALAASVFHKQIIEIGELKSYLVQSAIEIRSE

SEQ ID NO: 10094 - DNA, 774 bp, Corynebacterium glutamicum
  CDS (1)..(774)
atgggcgtggcaattcgagttattccttgcctggacgtggacaacggccgggttgttaaaggcgtgaactttgaaaacctcgcgatgctggctgatcctgtggagttggcaaagcgctatgacgaggaaggggcagatgagctgaccttcctggatgtcaccgcctcgaagcatggtcgcggcaccatgctggatgttgttcgacgcaccgctgatcaggtgttcatccctctgactgtcggtggcggcgtgcgcagcgaagaagatgttgatcaattgctgcgcgctggggccgacaaggtttcggtgaacacgtctgcgattgcccgtccagaactgctgtcagagctgtggaagcgttttggtgctcagtgcatcgtgttgtctgtggatgccaggcgcgttcctgaaggtggaactcctcagccatctggttttgaagtcaccacccacggcggttccaagtccgcagaacttgatgcaatcgagtgggcaaagcgcggcgaagagctgggcgttggcgaaattctgctcaactccatggacggcgacggcaccaaaaacggctttgacctagagctgctggaaaaagttcgcgcagccgtatccattcctgtaatctccggcggcgctggcaaggcggagcatttcccaccagctgttgcacgtggcgccaacgcagtgcttgccgcgaccattttccacttccgcgaagtaaccatcgccgaagtaaagggagccattaaagatgcaggatttgaggtgcggaaatga

SEQ ID NO: 10095 - protein, 257 aa, Corynebacterium glutamicum
MGVAIRVIPCLDVDNGRVVKGVNFENLAMLADPVELAKRYDEEGADELTFLDVTASKHGRGTMLDVVRRTADQVFIPLTVGGGVRSEEDVDQLLRAGADKVSVNTSAIARPELLSELWKRFGAQCIVLSVDARRVPEGGTPQPSGFEVTTHGGSKSAELDAIEWAKRGEELGVGEILLNSMDGDGTKNGFDLELLEKVRAAVSIPVISGGAGKAEHFPPAVARGANAVLAATIFHFREVTIAEVKGAIKDAGFEVRK

SEQ ID NO: 10096 - DNA, 777 bp, Salmonella typhimurium
  CDS (1)..(777)
atgctggcaaaacgtataattccgtgtctggacgttcgtgatggtcaggtggtaaaaggcgtacagtttcgcaaccatgagatcattggcgatatcgttccgctggccaaacgctatgccgacgaaggcgcggacgaactggtgttctatgacattaccgcctccagcgatggtcgcgtagtcgataaaagctgggtagcgcgcgttgccgaggtgatcgacattccgttttgtgtagcgggcggtatccggtcaattgacgacgccgccaaaattctctctttcggggcggataagatctctatcaactcccctgcactggctgacccaacgctgattacccgtctggctgaccgttttggcgtgcagtgcattgtcgtcgggattgatacctggtttgacgacgccacggggaaatatcatgttaaccagtataccggcgatgaaaaccgtacccgcgtgacgcagtgggagacgctggactgggtgcaagaggtacaacagcgcggcgcgggggaaatcgtcctgaatatgatgaaccaggacggcgtgcgtaacggttatgatctgacgcagttgaaaaaagtccgtgacgtttgccgcgtgccgctgatcgcctccggcggcgcgggcacgatggaacactttcttgaggcattccgtgatgccgatgtcgacggcgcgcttgccgcctccgtttttcacaagcaaatcatcaatattggcgaattaaaagcgtacctggcaggccagggcgtggagatcaggatatgttaa

SEQ ID NO: 10097 - protein, 258 aa, Salmonella typhimurium
MLAKRIIPCLDVRDGQVVKGVQFRNHEIIGDIVPLAKRYADEGADELVFYDITASSDGRVVDKSWVARVAEVIDIPFCVAGGIRSIDDAAKILSFGADKISINSPALADPTLITRLADRFGVQCIVVGIDTWFDDATGKYHVNQYTGDENRTRVTQWETLDWVQEVQQRGAGEIVLNMMNQDGVRNGYDLTQLKKVRDVCRVPLIASGGAGTMEHFLEAFRDADVDGALAASVFHKQIINIGELKAYLAGQGVEIRIC

SEQ ID NO: 10098 - DNA, 786 bp, Azospirillum brasilense
  CDS (1)..(786)
atgctcaagatgcgcgtcatcccctgcctggacgtcaaggacgggcgggtcgtcaagggggtcaacttcgtcgatctgatcgacgccggcgaccccgtggagcaggcccgcgtctatgaccgggaaggggcggacgagctgaccttcctcgacatcacggccagccacgagaaccgcgacaccatctacgacgtggtgcgccgcaccgccgagcaggtgttcatgccgctgaccgtcggcggcggcgtgcgcacggtggacgacatccgcaagctgctgctggccggcgccgacaaggtgtcgatcaacaccgcggccatccaccgtccggagttcgtccaagaggcggcggagaagttcggcgcccaatgcatcgtcgtcgccatcgacgccaagcaggtcgagccaggccgctgggagatcttcacccacggcgggcgcaaggccacgggcatcgacgccatcgagtgggccaagcgcatggagtcctacggggccggcgaaatcctgctgacctcgatggaccgcgacggcaccaagagcggcttcgacctcgccctgacccgcaaggtggccgacgggctgcgcataccggtgatcgcgtcgggcggcgtcggcaccctggaccatctggtggagggcatccgtgagggccacgccacggcggtgctggcggcctccatcttccatttcggcacctacaccatcgggcaggccaaggcggcgctggccgaggccggcattccggtgcgcccggcccgcatggcggaggccgcacatggctga

SEQ ID NO: 10099 - protein, 261 aa, Azospirillum brasilense
MLKMRVIPCLDVKDGRVVKGVNFVDLIDAGDPVEQARVYDREGADELTFLDITASHENRDTIYDVVRRTAEQVFMPLTVGGGVRTVDDIRKLLLAGADKVSINTAAIHRPEFVQEAAEKFGAQCIVVAIDAKQVEPGRWEIFTHGGRKATGIDAIEWAKRMESYGAGEILLTSMDRDGTKSGFDLALTRKVADGLRIPVIASGGVGTLDHLVEGIREGHATAVLAASIFHFGTYTIGQAKAALAEAGIPVRPARMAEAAHG

SEQ ID NO: 10100 - DNA, 2429 bp, Saccharomyces cerevisiae
  CDS (420)..(2078)
tagatgtttttttaatgatatatgtaacgtacattctttcctctaccactgccaattcggtattatttaattgtgtttagcgctatttactaattaactagaaactcaatttttaaaggcaaagctcgctgacctttcactgatttcgtggatgttatactatcagttactcttctgcaaaaaaaaattgagtcatatcgtagctttgggattatttttctctctctccacggctaattaggtgatcatgaaaaaatgaaaaattcatgagaaaagagtcagacatcgaaacatacataagttgatattcctttgatatcgacgactactcaatcaggttttaaaagaaaagaggcagctattgaagtagcagtatccagtttaggttttttaattatttacaagtaaagaaaaagagaatgccggtcgttcacgtgattgacgttgaaagtggtaacctacagtcactaaccaatgcaattgagcatttaggttacgaagtacaactggtgaaatcaccaaaggattttaacatatcaggcacgtcaagattgattttgcctggtgtcggaaattatggccatttcgtcgacaatttatttaatagaggattcgaaaagccgataagagaatacattgaatctggaaaaccaataatgggaatttgcgtcgggctacaagcgctctttgccggttccgtggaaagccctaagagtacgggtctgaactacattgattttaagttgtccaggttcgatgattcagaaaagccagtaccagaaataggttggaattcttgcattccctcggaaaacctattctttggattggatccatacaagaggtactatttcgtccattcttttgctgccattctgaattcagaaaagaaaaaaaacctagaaaatgacggttggaaaattgcaaaagctaagtacggttcagaggaatttattgcggcagtcaacaagaataatatattcgctactcagttccatcctgaaaaatcaggtaaagctggtttgaacgtcattgagaattttttgaagcaacaaagtcctccgattccaaactatagtgcggaagagaaggaactcttaatgaatgactattcaaattatggtctaacacgcagaattattgcttgtcttgatgtacgtactaatgaccaaggtgatttggtggttactaaaggtgatcaatacgatgtacgtgaaaaaagtgatggtaaaggtgttagaaaccttggtaagcctgttcagttggcacagaaatattaccaacagggtgcggatgaagtaacatttttgaatataacttcttttagagattgtcctttgaaggatactccgatgctagaggttctgaaacaagccgcaaagacagtctttgttccattgacagtcggtggggggatcaaggatattgtcgatgttgatggaaccaaaatacctgctttagaagttgcaagtctatacttcagatctggtgctgataaagtatcgatcggtacggatgcagtctatgcagccgaaaaatactacgagttgggtaacagaggagatggaacgtcaccaatagagacaatctcgaaagcatacggtgctcaggcagttgttatttctgtcgaccctaagagagtatatgtaaattcacaagcagatacgaagaacaaagtcttcgagacagaatatccgggccccaatggagagaaatactgctggtaccaatgtacaatcaaaggtggaagagaatctagagaccttggtgtgtgggaattaacaagggcatgtgaagctctaggtgctggggagattttattgaactgcatagacaaggatggctctaattctggttatgatctggaattgatagaacatgttaaagatgcggtcaagattcccgtcattgcatccagtggcgccggtgtacccgaacatttcgaagaggccttcctaaagacccgcgcagatgcttgcttgggtgcaggtatgttccacagaggtgaattcactgttaacgatgtaaaggagtatttactagagcacggattaaaggttagaatggatgaagagtaatgtggttggatatgtatactttataatcttgactcagtctatatacgcaataatgatagatgttaaatcagacatttcacaacacaagaggatgtacagcttggagaaattgtaccaacttatatggttgtattattggtggtgtcagtaggggaagaaatagaacatatttttccactttttcattttttttttttagcgaggcatcggaaatgaaaatttttaaaaatcgatgagctcccacttcttcaacattgacgaaaggaaatatgcactaagttgttttaaatccaagatttgtctcgttttaagacttacagataaaacaatatattagaaagattaactata

SEQ ID NO: 10101 - protein, 552 aa, Saccharomyces cerevisiae
MPVVHVIDVESGNLQSLTNAIEHLGYEVQLVKSPKDFNISGTSRLILPGVGNYGHFVDNLFNRGFEKPIREYIESGKPIMGICVGLQALFAGSVESPKSTGLNYIDFKLSRFDDSEKPVPEIGWNSCIPSENLFFGLDPYKRYYFVHSFAAILNSEKKKNLENDGWKIAKAKYGSEEFIAAVNKNNIFATQFHPEKSGKAGLNVIENFLKQQSPPIPNYSAEEKELLMNDYSNYGLTRRIIACLDVRTNDQGDLVVTKGDQYDVREKSDGKGVRNLGKPVQLAQKYYQQGADEVTFLNITSFRDCPLKDTPMLEVLKQAAKTVFVPLTVGGGIKDIVDVDGTKIPALEVASLYFRSGADKVSIGTDAVYAAEKYYELGNRGDGTSPIETISKAYGAQAVVISVDPKRVYVNSQADTKNKVFETEYPGPNGEKYCWYQCTIKGGRESRDLGVWELTRACEALGAGEILLNCIDKDGSNSGYDLELIEHVKDAVKIPVIASSGAGVPEHFEEAFLKTRADACLGAGMFHRGEFTVNDVKEYLLEHGLKVRMDEE

SEQ ID NO: 10102 - DNA, 759 bp, Rhodobacter sphaeroides
  CDS (1)..(759)
atgctcaagacccgcatcatcccctgcctcgacgtggccgacgcgcgcgtggtcaagggtgtcaatttcgtcgatctgcgcgacgcgggcgatccggtcgaggccgcccgcgcctacgatgccgcaggggcggacgagctctgcttcctcgatatccacgccacgcatgagaaccgcggcacgatgtatgacctcgtgacccgcaccgccgagcagtgcttcatgccgctgaccgtgggcggcggcgtgcggacccatcaggacgtgcgggcgctccttctggccggagccgacaaggtcagcttcaactcggccgccgtggccgatccgggcgtggtgccgagccgccgaccgcttcgcagccagtgcatcgtggtggcgatcgacaccaagacggtggctccgggccggtgggagatcttcacccacggcgggcgccgcgccacgggcatcgatgcggtggcgttcgcctgcgaaatggcaagccgcggcgcgggcgagatcctgctgacctcgatggaccgcgacggcacacgggcgggcttcaacctccccctcacccgcgccatctcggacgccgtgccgatcccggtcatcgcgagcggcggagtgggcacgctcgatcatctcgtcgagggcgtgaccgaaggcggtgcgtccgctgtgctcgcggcctcgatcttccatttcggcgaattcaccatcggcgaggccaaggcccacatggccgccgccggcatccccgtgaggctcgcatga

SEQ ID NO: 10103 - protein, 252 aa, Rhodobacter sphaeroides
MLKTRIIPCLDVADARVVKGVNFVDLRDAGDPVEAARAYDAAGADELCFLDIHATHENRGTMYDLVTRTAEQCFMPLTVGGGVRTHQDVRALLLAGADKVSFNSAAVADPGVVPSRRPLRSQCIVVAIDTKTVAPGRWEIFTHGGRRATGIDAVAFACEMASRGAGEILLTSMDRDGTRAGFNLPLTRAISDAVPIPVIASGGVGTLDHLVEGVTEGGASAVLAASIFHFGEFTIGEAKAHMAAAGIPVRLA

SEQ ID NO: 10104 - DNA, 786 bp, Synechocystis sp
  CDS (1)..(786)
atgaccttagcaaaacggattttgccttgtttagatgtcaatgcagggcgggtggtcaagggcataaactttgttgatctccaagatgccggggatccggtggagttggcccgggcctataacgaagcgggggcagacgagttggtgtttttagacatcactgctacccacgagcaacgggacaccattattgatgtggtttatcgcactgcggaagaggtgtttattcccctaacggtagggggcggcatttctacgttggaacatattaaaaatctgctccgggctggggcagataaggtgagtgttaattcctctgctgtgcgggacccggactttattagtcgagctagtgaccgttttgggcggcaatgcattgtggtggcgatcgatgcccgtcgtcggttagatgcggataatcccggctgggatgtgtatgtgcggggggggcgggaaaacaccggcctagatgcgatcgcctgggcggaggaagtggccaaacggggggcaggggaattgctggtcaccagtatggacggggatggcacccaagcgggttacgatctggccctcacagcggcgatcgccgaacgggtggaaattccggtgattgcttccgggggagcgggtaattgtcagcacgtgtacgaagcattcacggaaggcaaagctgaagcggcactgttagcttccctattgcactatggtcagttaaccattggggagttgaaaacctttttagaagcgagacaaattccagtcaggcacactgcggtttgtggctaa

SEQ ID NO: 10105 - protein, 261 aa, Synechocystis sp
MTLAKRILPCLDVNAGRVVKGINFVDLQDAGDPVELARAYNEAGADELVFLDITATHEQRDTIIDVVYRTAEEVFIPLTVGGGISTLEHIKNLLRAGADKVSVNSSAVRDPDFISRASDRFGRQCIVVAIDARRRLDADNPGWDVYVRGGRENTGLDAIAWAEEVAKRGAGELLVTSMDGDGTQAGYDLALTAAIAERVEIPVIASGGAGNCQHVYEAFTEGKAEAALLASLLHYGQLTIGELKTFLEARQIPVRHTAVCG

SEQ ID NO: 10106 - DNA, 771 bp, Synechocystis sp
  CDS (1)..(771)
atgaaaattttaccggcgatcgatctgctaggtggcaagtgtgtgcgcctctatcaaggggattatgaccagtcccaggtgtaccacgaagatccggtggaagtagcccgccagtggcaagcccagggagctagtcgtttgcatttagtcgatcttgatggagctaaggaaggacaaccagttaacctaacggcgatcgccaatattgttgaagccctaaccattcctgtacaggtaggcggaggcttaagggatagaaaccgggtcaaacaattgctggatttgggggtgggccgagttattctaggtacgatcgccgtggaaaatcctgacttagtgggggaattatgtgccgaatttcctgggcaaattgtggtgggtattgatgcccgcaatggcaaagtggccactagggggtggttagaaacttctacggtggaagcgggggaattggcccaacgcatggaaaagctaggagcggcggccattatctacactgatattcaccgggatggcacaatgcaggggcccaacttagatgctctgcgacaattagctagtcagttaaccattccagtgattgcatcggggggagtcagccaagtagaagacctgttgaatctgcttagcttggaaagtctgggggtcaatggagtcatcatcggcaaagccctttacaccggggacattcagttggcagaagcaatccgggcagtgggcaatggtcgctggcaagatgtgccgccgttggactttccccgtttgggctag

SEQ ID NO: 10107 - protein, 256 aa, Synechocystis sp
MKILPAIDLLGGKCVRLYQGDYDQSQVYHEDPVEVARQWQAQGASRLHLVDLDGAKEGQPVNLTAIANIVEALTIPVQVGGGLRDRNRVKQLLDLGVGRVILGTIAVENPDLVGELCAEFPGQIVVGIDARNGKVATRGWLETSTVEAGELAQRMEKLGAAAIIYTDIHRDGTMQGPNLDALRQLASQLTIPVIASGGVSQVEDLLNLLSLESLGVNGVIIGKALYTGDIQLAEAIRAVGNGRWQDVPPLDFPRLG

SEQ ID NO: 10108 - DNA, 2514 bp, Arabidopsis thaliana (mouse-ear cress)
  CDS (33)..(1811)
aacaatcgaagcagtgactgagtttgatatcaatggaggctacggcggcgccattctcttcaattgtctcttccagacaaaacttctcttcatcttcttcgattcgcgcttcttctccggcttctttattcctctcccagaagagtattggcaatgttaatcgcaaattcaaatctcccagaagcctctccgtccgcgcatcttctacctcagattctgttgtgactttgcttgactacggagctggaaatgttcggagcatccgcaatgctcttcgtcatctcggcttcagcatcaaagacgttcaaacgccgggagacattctgaatgctgatcgactcatatttccaggcgttggtgcttttgcacccgccatggatgtacttaacagaactgggatggctgaagctttgtgcaaatatattgagaatgaccgtccatttctaggcatatgtcttggtctacaactacttttcgattctagtgaagagaatggaccagtcaaaggtcttggtgtgataccgggaatagttggacgctttgatgcttcagctggtataagagtaccccacattggctggaatgctttgcaagttgggaaggattctgaaattttggatgatgttggaaaccgtcatgtctattttgttcattcgtacagggccattccatcagatgaaaataaggactggatttcgtctacctgtaattatggtgaatcatttatatcttccataagaaggggaaatgtgcatgcagttcaattccatcctgaaaagagcggggaggtggggctttctgttttaagaaggttcttgcatccaaaattacctgcaacacagaagccaatggaaggaaaggcctcaaaacttgcaaagagggtgattgcttgtcttgatgtgaggacgaatgataaaggagatctcgtagttactaaaggggatcagtatgatgtgagagagcaatctaatgaaaacgaggttcgaaaccttggcaaacctgttgatttggctgggcagtattacaaagatggtgcagatgagattagctttttaaacataactggattccgcgattttcctctaggggatttgccgatgattcaggtgttgaggcagacatcaaagaatgtctttgtaccactaactgttggaggtggtattagagactttacagatgctagtggcaggtactattctagcttggaagttgctgctgagtatttcagatccggtgctgataagatctccataggaagtgacgctgtttctgctgcagaggagttcataaaatcaggggtgaagacaggaaagagtagtttagaacagatatccagagtttatggaaatcaggcagtggttgtaagtattgatcctcgtagagtttatgtgaaccatccggatgatgtgccatacaaagtcatcagagtaactaatccaggcccaaatggagaagaatatgcctggtatcagtgcacggtcagtggaggacgagaaggtcgacctattggagcatttgagcttgcgaaagcggttgaagaattaggtgccggtgaaatactattgaactgcatagactgtgatggtcaagggaaaggattcgacatagacttagtaaagctcatctcagattcagtaggcataccggtgatcgcaagcagtggagcaggtactcccgaccacttttccgaggtgtttgagaagacaaacgcatctgccgcgcttgctgccggcattttccaccggaaagaggtaccaatccaatctgtgaaagagcacttacaagaggagcgcatagaagtcaggatctgagaattttctggtctgcgtgttaccataattcatgacacattcaacaagatagaatctttaccttcaataaattaaattaagtcggaaccatcggagctccaataggtctgagtgaatcctcttatagttgatttccttttgttgacagtaagactgatacaatttatggatttcccttgaaagtaagaaagcaacgtatgttcactttctcagcttttctatttaatacaaagaaagcatgtaacttctctctcgtctagatcttattaggaaatcattcaatccgaaaaacctcaaaagggtatcttattcagtcaaaattgaacatatctgtatcaaactgtgtaaaaagtaagaacgtagacactgaggcctattcttccaatcccgcaatactcgggaaactgtaaagaaacttgaaagataagaattgttgttacccccaaacgttttaaagacactgcaggtctataactggcaaaagccagacactttgtgactcctcgaaaccaaatcttttatatgtcaagaagaagcctttgtggatcctccacaacatccttgacacggcgcaggaagtacacagcctctctaccatcaatcagcctgtgatcatacgtaagtgcgacatacatcattggtctaggcactacgcttcctcctactaccattggacgtgacacaatcgagtgcatgccgagta

SEQ ID NO: 10109 - protein, 592 aa, Arabidopsis thaliana (mouse-ear cress)
MEATAAPFSSIVSSRQNFSSSSSIRASSPASLFLSQKSIGNVNRKFKSPRSLSVRASSTSDSVVTLLDYGAGNVRSIRNALRHLGFSIKDVQTPGDILNADRLIFPGVGAFAPAMDVLNRTGMAEALCKYIENDRPFLGICLGLQLLFDSSEENGPVKGLGVIPGIVGRFDASAGIRVPHIGWNALQVGKDSEILDDVGNRHVYFVHSYRAIPSDENKDWISSTCNYGESFISSIRRGNVHAVQFHPEKSGEVGLSVLRRFLHPKLPATQKPMEGKASKLAKRVIACLDVRTNDKGDLVVTKGDQYDVREQSNENEVRNLGKPVDLAGQYYKDGADEISFLNITGFRDFPLGDLPMIQVLRQTSKNVFVPLTVGGGIRDFTDASGRYYSSLEVAAEYFRSGADKISIGSDAVSAAEEFIKSGVKTGKSSLEQISRVYGNQAVVVSIDPRRVYVNHPDDVPYKVIRVTNPGPNGEEYAWYQCTVSGGREGRPIGAFELAKAVEELGAGEILLNCIDCDGQGKGFDIDLVKLISDSVGIPVIASSGAGTPDHFSEVFEKTNASAALAAGIFHRKEVPIQSVKEHLQEERIEVRI

SEQ ID NO: 10110 - DNA, 756 bp, Streptomyces coelicolor
  CDS (1)..(756)
atgaccctggcggtccgagtcattccctgcctggacgtggacaacggccgggtcgtcaagggcgtcaacttccagaacctgcgcgacgcgggcgaccccgtcgagatggccaaggtgtacgacgccgagggcgccgacgagctgacgttcctggacatcaccgcctcgtcgggcaaccgcgagacgacctacgacgtggtgcgccgcaccgccgagcaggtgttcatcccgctgaccgtcggcggcggggtgcgcaccgccgaggacgtcgacaagctgctgcgggccggtgcggacaaggtgggcgtcaacaccgccgccatcgcccgccccgacctgatccgtgagatcgccgagcgcttcggccgccaggtcctggtgctgtcggtcgacgcccggcgcaccgaggcggggaccttcgaggtgaccacccacggcggccggcgcggcaccggcatcgacgccgtggagtgggcgcaccgggccgccgagctgggcgcgggggagatcctgctcaactcgatggacgcggacggcacgaaggacggctacgacctggagatgctggcggcggtacgcaagcacgtcagtgtcccggtcatcgcctccggcggcgcgggcagcctcgcccacttcgccccggcggtcgaggcgggcgcggacgcggtgctggcggcgtccgtcttccacttcggcgacctgcggatcggcgaggtgaagaccaccctgcgcgaggcgggtcaccccgtcaggtag

SEQ ID NO: 10111 - protein, 251 aa, Streptomyces coelicolor
MTLAVRVIPCLDVDNGRVVKGVNFQNLRDAGDPVEMAKVYDAEGADELTFLDITASSGNRETTYDVVRRTAEQVFIPLTVGGGVRTAEDVDKLLRAGADKVGVNTAAIARPDLIREIAERFGRQVLVLSVDARRTEAGTFEVTTHGGRRGTGIDAVEWAHRAAELGAGEILLNSMDADGTKDGYDLEMLAAVRKHVSVPVIASGGAGSLAHFAPAVEAGADAVLAASVFHFGDLRIGEVKTTLREAGHPVR

SEQ ID NO: 10112 - DNA, 786 bp, Mycobacterium leprae
  CDS (1)..(786)
atgtactcgggtaacggtcttgcggtacgagtgattccttgcctggacgtctattgtgggcgtgtggttaaaggggtcaatttcaagaacctccgggatgcgggtgatctcgtggagttggctgccgcctacgatgctgaaggcgccgacgagctggcttttcttgacgtgactgcgtcgtcgtcgggcagggccaccatgctggaggtggtgcgctgcaccgccgagcaggtgttcatcccgttgatggtcggcggtggggtgcgtacggtcgctgacgtcgacgtgttgctgcgtgcgggagctgacaaggttgcggtcaacaccgcagcaattgctcgtcccgagctattggccgacatggcagggcaattcggttctcaatgcatcgtgttatctgtcgacgcgcgcacggtacccaccggatcagcgcgaacaccgtccgggtgggaggccactactcatggcggttaccgcggcaccggtattgacgctgttgagtgggcggcccgtggggccgaccttggggtgggagaaatcctgctgaactcgatggacgccgacggcactaaagccgggttcgacttggcgatgttgcgggctgttcgtgccgcggtcacggtgccggtcatagctagcggcggcgccggggcaatcgaacacttcgtgccagcggttactgccggtgctgatgcggttttggcggccagtgtctttcatttccgagagctaacgatcgggcaggtgaaagacgctatggccgcagcagggatcgcggtgcgatga

SEQ ID NO: 10113 - protein, 261 aa, Mycobacterium leprae
MYSGNGLAVRVIPCLDVYCGRVVKGVNFKNLRDAGDLVELAAAYDAEGADELAFLDVTASSSGRATMLEVVRCTAEQVFIPLMVGGGVRTVADVDVLLRAGADKVAVNTAAIARPELLADMAGQFGSQCIVLSVDARTVPTGSARTPSGWEATTHGGYRGTGIDAVEWAARGADLGVGEILLNSMDADGTKAGFDLAMLRAVRAAVTVPVIASGGAGAIEHFVPAVTAGADAVLAASVFHFRELTIGQVKDAMAAAGIAVR

SEQ ID NO: 10114 - DNA, 1994 bp, Arabidopsis thaliana (mouse-ear cress)
  CDS (6)..(1787)
tatcaatggaggctacggcggcgccattctcttcaattgtctcttccagacaaaacttctcttcatcttcttcgattcgcgcttcttctccggcttctttattcctctcccagaagagtattggcaatgttaatcgcaaattcaaatctcccagaagcctctccgtccgcgcatcttctacctcagattctgttgtgactttgcttgactacggagctggaaatgttcggagcatccgcaatgctcttcgtcatctcggcttcagcatcaaagacgttcaaacgccgggagacattctgaatgctgatcgactcatatttccaggcgttgggccttttgcacccgccatggatgtacttaacagaactgggatggctgaagctttgtgcaaatatattgagaatgaccgtccatttctaggcatatgtcttggtctacaactacttttcgattctagtgaacagaatggaccagtcaaaggtcttggtgtgataccgggaatagttggacgctttgatgcttcagctggtataagagtaccccacattggctggaatgctttgcaagttgggaaggattctgaaattttggatgatgttggaaaccgtcatgtctattttgttcattcgtacagggccattccatcagatgaaaataaggactggatttcgtctacctgtaattatggtgaatcatttatatcttccataagaaggggaaatgtgcatgcagttcaattccatcctgaaaagagcggggaggtggggctttctgttttaagaaggttcttgcatccaaaattacctgcaacacagaagccaatggaaggaaaggcctcaaaacttgcaaagagggtgattgcttgtcttgatgtgaggacgaatgataaaggagatctcgtagttactaaaggggatcagtatgatgtgagagagcaatctaatgaaaacgaggttcgaaaccttggcaaacctgttgatttggctgggcagtattacaaagatggtgcagatgagattagctttttaaacataactggattccgcgattttcctctaggggatttgccgatgattcaggtgttgaggcagacatcaaagaatgtctttgtaccactaactgttggaggtggtattagagactttacagatgctagtggcaggtactattctagcttggaagttgctgctgagtatttcagatccggtgctgataagatgtccataggaagtgacgctgtttttgctgcagaggagttcataaaatcaggggtgaagacaggaaagagtagtttagaacagatatccagagtttatggaaatcaggcagtggttgtaagtattgatcctcgtagagtttatgtgaaccatccggatgatgtgccatacaaagtcatcagagtaactaatccaggcccaaatggagaagaatatgcctggtatcagtgcacggtcagtggaggacaagaaggtcgacctattggagcatttgagcttgcgaaagcggttgaagaattaggtgccggtgaaatactattgaactgcataaactgtgatggtcaagggaaaggattcgacatagacttagtaaagctcatctcagattcagtaggcataccggtgatcgcaagcagtggagcaggtactcccgaccacttttccgaggtgtttgaagaagacaaacgcatctgccgcgcttgctgccggcattttccaccggaaagagggtaccaatcccaatctgtgaaagagcacttacaagaggagcgcatagaagtcaggatctgagaattttctggtctgcgtgttaccataattcatgacacattcaacaagatagaatctttaccttcaataaattaaattaagtcggaaccatcggagctccaataggtctgagtgaatcctcttatagttgatttccttttgttgacagtaagactgatacaatttatggatttcccttgaaagtaagaaagcaacgtatgttcactt

SEQ ID NO: 10115 - protein, 593 aa, Arabidopsis thaliana (mouse-ear cress)
MEATAAPFSSIVSSRQNFSSSSSIRASSPASLFLSQKSIGNVNRKFKSPRSLSVRASSTSDSVVTLLDYGAGNVRSIRNALRHLGFSIKDVQTPGDILNADRLIFPGVGPFAPAMDVLNRTGMAEALCKYIENDRPFLGICLGLQLLFDSSEQNGPVKGLGVIPGIVGRFDASAGIRVPHIGWNALQVGKDSEILDDVGNRHVYFVHSYRAIPSDENKDWISSTCNYGESFISSIRRGNVHAVQFHPEKSGEVGLSVLRRFLHPKLPATQKPMEGKASKLAKRVIACLDVRTNDKGDLVVTKGDQYDVREQSNENEVRNLGKPVDLAGQYYKDGADEISFLNITGFRDFPLGDLPMIQVLRQTSKNVFVPLTVGGGIRDFTDASGRYYSSLEVAAEYFRSGADKMSIGSDAVFAAEEFIKSGVKTGKSSLEQISRVYGNQAVVVSIDPRRVYVNHPDDVPYKVIRVTNPGPNGEEYAWYQCTVSGGQEGRPIGAFELAKAVEELGAGEILLNCINCDGQGKGFDIDLVKLISDSVGIPVIASSGAGTPDHFSEVFEEDKRICRACCRHFPPERGYQSQSVKEHLQEERIEVRI

SEQ ID NO: 10116 - DNA, 729 bp, Methanococcus voltae
  CDS (1)..(729)
atgtatattatacctgctgtggatatgaaagaaggcaaatgcgtgcagttaatacaaggagaccccacaaagagacatgtggagtatgacaaccctgacgaaatagctaaaatgtggatagaaaatggtgcagagatgttgcaccttgtagatttggatggtgcaattgacggagagcgtgtaaatttaccctgtgttaagaaaataattcaagagtcaaaagtacctgttcaaatgggtggtggcataagaaccatacaagatgtggaagaattagtcgatttggggattaataaagttattatcggtactgtggcagttcaaaatccagattttgttgaacaacttgctaaaaaagtaggtagtgacaaaataatggttgctttagatgcaaaagatggtaaagtagttataaaaggatggaaggaaaaaacagagtacacaccagttcaaatgggtaaaattttagaagaaaaaggtgctggtagtattttatttacaaatgtagactctgaaggtcttttaaatggtataaatatcacacctacaaaagaactcgtagataacttaaatataccgattatagcatctggcggagtaactacaatcgaagatttaattgaattcaaaaaaataggtgtagctggcgttgttgtaggttctgcattgtacaaaaacaattttaaactacaggacgcaataaatacagtaaataactttaaaatttaa

SEQ ID NO: 10117 - protein, 242 aa, Methanococcus voltae
MYIIPAVDMKEGKCVQLIQGDPTKRHVEYDNPDEIAKMWIENGAEMLHLVDLDGAIDGERVNLPCVKKIIQESKVPVQMGGGIRTIQDVEELVDLGINKVIIGTVAVQNPDFVEQLAKKVGSDKIMVALDAKDGKVVIKGWKEKTEYTPVQMGKILEEKGAGSILFTNVDSEGLLNGINITPTKELVDNLNIPIIASGGVTTIEDLIEFKKIGVAGVVVGSALYKNNFKLQDAINTVNNFKI

SEQ ID NO: 10118 - DNA, 717 bp, Methanococcus vannielii
  CDS (1)..(717)
atgcttataattcccgcagttgatatgaaaaataaaaagtgcgtgcaacttatacagggaaatcctgataaaaaacacgtggaacttgataatcctcctgaaattgcaaaaaaatgggttgaacaaggtgctgaaatgcttcatcttgttaacctcgatggtgcaataaatggaaagcgtgtaaacgacgaatttattgaagaaacaatcaaaaattcaggagttcccgttcaaattggtggggggataaggagcgtttcagatgcactttattttattgaaaagggtgcagaaaaagtgatacttggaacagttgcaattcaaaatcctaaaatcgttcgtgaaatctccagtattgtgggaaaggaaaaagtaacagttgcactcgatgcaaaagacggtaaagtattaataaaaggttggactgaaaaaacggactatagtccagttcaaattggaaaaatacttgaaaatatgggtgcaggaagtattttatttacaaatgtagatagtgaaggactacttgaaggtattaatgttttaccaacaaaagaacttgttgataatctaaacattccaataattgcctcaggcggagttacaaccgttgaagacctcttaaaatttaaagaaatcggagtttatgcagttgtagttggttcagcactttataaagatatgataaacttaaaagatgcaattttagcatcgaaatag

SEQ ID NO: 10119 - protein, 238 aa, Methanococcus vannielii
MLIIPAVDMKNKKCVQLIQGNPDKKHVELDNPPEIAKKWVEQGAEMLHLVNLDGAINGKRVNDEFIEETIKNSGVPVQIGGGIRSVSDALYFIEKGAEKVILGTVAIQNPKIVREISSIVGKEKVTVALDAKDGKVLIKGWTEKTDYSPVQIGKILENMGAGSILFTNVDSEGLLEGINVLPTKELVDNLNIPIIASGGVTTVEDLLKFKEIGVYAVVVGSALYKDMINLKDAILASK

SEQ ID NO: 10120 - DNA, 765 bp, Symbiobacterium thermophilum
  CDS (1)..(765)
atgcccctcgcgaagcgcatcatcccgtgcctggatatccgggacgggcgggtggtgaagaacgtccagttccacctgaacacctgggacgccggcgacccggtggccctggccgccgagtacgaccggcagggggcggacgagatcgtctttctggacatcaacgcctcctgggaggggcggtcggccacgctggacgtcctgagccgggccgccgagcaggtcttcgtgcccctgaccatcggcgggggggtgagcgccgtcgagcacgtgaaggcgtacctgcgggcgggggcggacaaggtgtcggtcaacaccgcggccgtgcagcggcccgacctcatcgacgagatcgccgacctgttcggctcctccaccctggtggtggccatcgactgcaagcggcggcccgaggggggctgggaggtctacctgcacggcggacgcacgcccaccggcatcgacgccgtcgcctgggccgaggaggcggcccggcgcggggcgggcgagttgctggtcacgtcgatggacgccgacggcacccggcaggggtacgacatcgcgctccaccaggccctggccgacgcggtcggggtgcccgtcatcgcctccggcggggcagggagcccggaggacatcctcgaagttctgaccgtgggccgggcggatgccgccctggccgcctcgatcttccacagcggcaggcacacggtgggggaggtgaaggccttcctccgggagaggggggtgctggtacggtcatga

SEQ ID NO: 10121 - protein, 254 aa, Symbiobacterium thermophilum
MPLAKRIIPCLDIRDGRVVKNVQFHLNTWDAGDPVALAAEYDRQGADEIVFLDINASWEGRSATLDVLSRAAEQVFVPLTIGGGVSAVEHVKAYLRAGADKVSVNTAAVQRPDLIDEIADLFGSSTLVVAIDCKRRPEGGWEVYLHGGRTPTGIDAVAWAEEAARRGAGELLVTSMDADGTRQGYDIALHQALADAVGVPVIASGGAGSPEDILEVLTVGRADAALAASIFHSGRHTVGEVKAFLRERGVLVRS

SEQ ID NO: 10122 - DNA, 756 bp, Propionibacterium acnes
  CDS (1)..(756)
atggctatacgtgtcattccatgtctggacgttaaggatgggcgggtcgttaaaggggttaacttcgtcggtctgcgcgatgccggtgatcccgtggagctagcggcggaatacgggcggctcggtgccgacgaggtgactttcctcgacatttctgcctcaacagaggggcgcgccaccactcgcgagatggtgacacggtgcgctgagacagttttcgtgcccctcactgtaggtggtggggtgcgcggggtcgacgacgtcgatgtcctgctgagggcgggagctgacaaagttggtgtcaacaccgcagcgattgctcatcccgggatgatcgacgaggtcgctgaccggtttggcaatcaggtcatcgtgttgtctgtcgatgcccgtcgcgaaccagatcggccatccggttttggggtgacgacccatggtggcacccgttcggcagggttggacgccgttgagtgggcttgccaagccgtggagcgtggggcaggtgagattctgctcaattcgatggacgccgatggtacggctgatggcttcgatattgagatgatcgaggcagtgagagcagctgtcgacgtccccctcatcgcttcaggtggagctggaaaggttgccgatttcgtcgaggcggcgcgcgccggagttgacgcggtgctcgccgcgtcagtttttcactatcacaccctgacgatcgcgcagatcaaggacggcctgcgtcatgccggctttgaggtccgctga

SEQ ID NO: 10123 - protein, 251 aa, Propionibacterium acnes
MAIRVIPCLDVKDGRVVKGVNFVGLRDAGDPVELAAEYGRLGADEVTFLDISASTEGRATTREMVTRCAETVFVPLTVGGGVRGVDDVDVLLRAGADKVGVNTAAIAHPGMIDEVADRFGNQVIVLSVDARREPDRPSGFGVTTHGGTRSAGLDAVEWACQAVERGAGEILLNSMDADGTADGFDIEMIEAVRAAVDVPLIASGGAGKVADFVEAARAGVDAVLAASVFHYHTLTIAQIKDGLRHAGFEVR

SEQ ID NO: 10124 - DNA, 1593 bp, Desulfotalea psychrophila
  CDS (1)..(1593)
atgaaagtaacgctattggattatggggctggcaatgttcgtagtatacgtaatgctattcgggcgttaggatgtgaaattgtagaggtacagcatcccgaagatattttaacggcagataaactgatctttccgggggtcggaagctttggctctgtgatgcacaccctgcgtgaccgtggctatatagaacctctcaagcgaagaatagaggaagacaagccctttcttggcatctgtgttgccctgcaggccctgtttgaaggcagtgaagagacccccggcgtggcggggcttggcatcctgccggggcagatcaaaaaatttgtgcgctcggccctatcggtgccgcagattggctggaatggcattcatctcctcaaagaatctccctcctttgctggctatgaggaagaaaagctctattttgttcactcctaccatgcaccccttgatactgtgcctgaggattgggccttaacagcaacagattacggtactcgctttatctcggcggtggaaaagggaaatgttaccgcatttcagttccacccggaaaagagcggacaagccggtttgaaccttctccagaatttcctctcctcccagaagaggccctcgcagactccaatcgtaccgattgagatagagaagaagacagagcatgcaaagcgtgttattgcctgccttgatgtacgctccaatgataacggtgatcttgttgtgaccaagggcgatcagtatgatgttcgtcaggagggtgaggtgcgaaatctgggcaaaccggtggatcttgcccgtcgctactatcaggagggggccgacgaggtaactttcctcaatataacaggctttagagattttcccatggaggaccagcccatgattgaggtgctgcagaaggcctctgaaaatgtatttgtaccccttaccattggtggtggcatccgtgactttaccgatagcaatggtaagtattactctgcccttgacgttgccgctcagtatttcagatccggggccgataaaatatctattggctccgatgccgtagccattgttgaggaatatctggccaccggcaagaagagcggcaagagctccatcgaacagatctctgccgtctatggtgtgcaggcagttgttatctctgtagatccgcgcagagtctacgtacaaagcccggacgagactactcatacctgtgttaaaacagggagtttaggacctaatggcgaagagtactgttggtatcagtgtacgattaagggcggtcgggagggaagtaagctcgatgctgtccagttggtgcagggctgtgaggccctgggggcgggagagattctgctcaactgtattgataaggatggtaccaacgatggttttgagcttgaactgatctctctggtcaagaaggctgtctccattccggttattgcctccagtggtgctggctctgcccgggattttgtcgaggtcttccgagaaacagatgccgatgcggctctggcagcgggaatctttcacagagaagaggttccaatctctgaggtaaagacaacccttatgcaggcaggaatctcctgtcgctga

SEQ ID NO: 10125 - protein, 530 aa, Desulfotalea psychrophila
MKVTLLDYGAGNVRSIRNAIRALGCEIVEVQHPEDILTADKLIFPGVGSFGSVMHTLRDRGYIEPLKRRIEEDKPFLGICVALQALFEGSEETPGVAGLGILPGQIKKFVRSALSVPQIGWNGIHLLKESPSFAGYEEEKLYFVHSYHAPLDTVPEDWALTATDYGTRFISAVEKGNVTAFQFHPEKSGQAGLNLLQNFLSSQKRPSQTPIVPIEIEKKTEHAKRVIACLDVRSNDNGDLVVTKGDQYDVRQEGEVRNLGKPVDLARRYYQEGADEVTFLNITGFRDFPMEDQPMIEVLQKASENVFVPLTIGGGIRDFTDSNGKYYSALDVAAQYFRSGADKISIGSDAVAIVEEYLATGKKSGKSSIEQISAVYGVQAVVISVDPRRVYVQSPDETTHTCVKTGSLGPNGEEYCWYQCTIKGGREGSKLDAVQLVQGCEALGAGEILLNCIDKDGTNDGFELELISLVKKAVSIPVIASSGAGSARDFVEVFRETDADAALAAGIFHREEVPISEVKTTLMQAGISCR

SEQ ID NO: 10126 - DNA, 1773 bp, Debaryomyces hansenii CBS767
  CDS (1)..(1773)
atgaagacagtatacgttatagatgttgagagcggtaatttgcaatccttattcaatgccataaaacgcatagggggttatgatgttaagtttattcatgatgcaaaagaattcgccgactacaatgatagtattgaaaaattaatattcccaggtgtgggtaactatgctcattttatcaagcaattacacgatagagagttagtggatccaattactaagtatatcgagagtggtagggctcttatgggtatttgtgttggattacaagcatttttcgaaagtagtgaagagagtgataattcggaatatcagggtttgggatatttgaaatttggcttatccaaattcaataagtcagatccagtctttactcaaagaaaacaattgaaagcggttccgcatatcggctggaatagtgttaatacaatcaaggctaataataccactctttcgaagacaacgtctttttttggaatcaatacagttaataaatactattttgttcattcatacgcggctatactaaaagatgaacaacaagaaaaggtgatcagcgaagccatttcaaatggctgggatattgcttttgcaagatacggatcagaaatcttcttagcagcggtatcgtataagaacttcttcgccacgcagttccacccagaaaaatctggcgttgctggtttgaaagttatcaaaagcttcttggaaggctcaaggtttagtgaggtcactacatctgatgctcagccggttgataatattgaaaatactttgagtggattaaccagaagaattattgcctgccttgatgttagaagtaatgatgacggagatttggttgtcacgaaaggtgatcaatataatgttcgtgaatcgtccggagattctgatgaaagtaaggtaagaaacttaggaaaacctgttgaattagcaacgagatattacaatcaaggggctgatgaggttacgtttttaaatataacttcattccgtaattcacctttgaaggatttgcccatgttgaaagtcttgagtacagcagcagaaacaatctttgtacctttaacagtaggtggtggaattaaagatttagttgacccaatctctggtgaaaaagtgccagctgccaaggtagccagtttgtattttagatctggtgctgataaagtgagtattggctctgatgctgtcacaatagccgagaattattatgcgaacaacaaacataagacgggaactacttcgattgaaaccatttctgctacctttggtagccaggctgtggttatatctgttgacccaaagcgtaaatacgttctgtccccatctgaaaccacaatggaaaccattcatattcaggatcctctgaagtatggtccagcaggcgagaaatattgctattatcaagtgacttctcaaggtggaagagtaactcacgaattaggtgcgcttgagttatgtcttgcgtgtgaagatttaggtgctggtgaaattttattgaattcaattgatcatgatggttctaataaaggttttaatttggaattattaagacaagttaaagaaaaagcttcaatccctgttatagctagttctggtgctggaaagcctgaacatttccaagaagtttttgacatggattgtggaattgacgctgctttaggagctggtttatttcacagaggtgaatatgaagtcaacgatgttaagagatatttacaaaaagaatgctctatggatgtcaggttagatgacactgtggaattatag

SEQ ID NO: 10127 - protein, 590 aa, Debaryomyces hansenii CBS767
MKTVYVIDVESGNLQSLFNAIKRIGGYDVKFIHDAKEFADYNDSIEKLIFPGVGNYAHFIKQLHDRELVDPITKYIESGRALMGICVGLQAFFESSEESDNSEYQGLGYLKFGLSKFNKSDPVFTQRKQLKAVPHIGWNSVNTIKANNTTLSKTTSFFGINTVNKYYFVHSYAAILKDEQQEKVISEAISNGWDIAFARYGSEIFLAAVSYKNFFATQFHPEKSGVAGLKVIKSFLEGSRFSEVTTSDAQPVDNIENTLSGLTRRIIACLDVRSNDDGDLVVTKGDQYNVRESSGDSDESKVRNLGKPVELATRYYNQGADEVTFLNITSFRNSPLKDLPMLKVLSTAAETIFVPLTVGGGIKDLVDPISGEKVPAAKVASLYFRSGADKVSIGSDAVTIAENYYANNKHKTGTTSIETISATFGSQAVVISVDPKRKYVLSPSETTMETIHIQDPLKYGPAGEKYCYYQVTSQGGRVTHELGALELCLACEDLGAGEILLNSIDHDGSNKGFNLELLRQVKEKASIPVIASSGAGKPEHFQEVFDMDCGIDAALGAGLFHRGEYEVNDVKRYLQKECSMDVRLDDTVEL

SEQ ID NO: 10128 - DNA, 1662 bp, Yarrowia lipolytica CLIB99
  CDS (1)..(1662)
atgccaattatccacgtgatcaacgtcgagtctggcaacctgcggtctctggaaaacgccctcaacgtgctgggatacacggtggagtgggtctctagcccagaccagatcactgactccattgagaagctcattttccccggagttggcaactttggccactttgtgaaggagattgacgcccgaggattcattggccccctcaagaagtacattgagagcaaacggccgttgtttggcatctgtgtgggtctccaggctttttttgagggatccgaggagtccaagactgttgcaggactgggtcttgtgcccggtgttctgagcaagtttgacgataaggacaagagcgtgccccagattggctggaactcggtggatagccgagatttcgccgagcacaagtctctgtacggcatggtgccttcttccaagtactactttgtgcattcgtacgcttgtattctggatgaggccgtcaagaacaagatcgaggctgcaggctgggatattgccacgtcacaatatggtaaccagacatttgtggctgctatttccaaggacaatgttgttgctacccaattccaccccgagaagtctggagcagccggtctgcgtgtgattgacgctttcctcaagggtaagaagtacgtggaggaccctgtaattgctccccagacatcgttcggtctcacaaagcgagtcatcgcctgtctggacgttcgaaccaacgaccagggtgatcttgttgttaccaagggagaccagtatgacgtgcgagagaagactggagagggccacgtacgaaacctcggaaagccagtttccatggccgaaaagtactacaaggacggagccgatgaggtcactttccttaacattacttcgttccgagactgccctgttcaggatcttcccatgctggaggttcttcgacagacttccaagactgtttttgtgcccctgactgtcggaggtggtatccgagacgtaactgactcttctggaaacgtcaccaccgctctacaggttgctacccagtactttatgtctggtgccgacaaggtgagtattggtagtgatgcggtctttgctgccgaggagtactacaagagcggcaagaagctatctggtaagacccccatggagactatttccgccgcatacggagtccaggccgttgttgtttctgtcgaccccaagcgagtctacgttgatgctcccctgaccgacagagtttgcattgagaccaaatacccctctgccgacggaaagaagtactgctggtaccagtgcaccgtcaagggcggacgagaggcccgagatcttggcgttttcgagctcgtccaggcgtgcgaggctctgggagctggagagattctgctcaactgcattgataaggacggaaccaactccggtttcgatcttgagctcatcgaccacgtcaagtctgccgtcaagatccccgtcattgcttcctccggcgctggaaaccccggtcacttcgaggaggtcttccgagagacctctgctgacgcggctcttggagctggtatgttccaccgaggagagtactccgtcaaggatgtcaaggacttcctggagaacaagggcgaggttgtgcgagcctttgagccaattgagctggttcacgttgagtaa

SEQ ID NO: 10129 - protein, 553 aa, Yarrowia lipolytica CLIB99
MPIIHVINVESGNLRSLENALNVLGYTVEWVSSPDQITDSIEKLIFPGVGNFGHFVKEIDARGFIGPLKKYIESKRPLFGICVGLQAFFEGSEESKTVAGLGLVPGVLSKFDDKDKSVPQIGWNSVDSRDFAEHKSLYGMVPSSKYYFVHSYACILDEAVKNKIEAAGWDIATSQYGNQTFVAAISKDNVVATQFHPEKSGAAGLRVIDAFLKGKKYVEDPVIAPQTSFGLTKRVIACLDVRTNDQGDLVVTKGDQYDVREKTGEGHVRNLGKPVSMAEKYYKDGADEVTFLNITSFRDCPVQDLPMLEVLRQTSKTVFVPLTVGGGIRDVTDSSGNVTTALQVATQYFMSGADKVSIGSDAVFAAEEYYKSGKKLSGKTPMETISAAYGVQAVVVSVDPKRVYVDAPLTDRVCIETKYPSADGKKYCWYQCTVKGGREARDLGVFELVQACEALGAGEILLNCIDKDGTNSGFDLELIDHVKSAVKIPVIASSGAGNPGHFEEVFRETSADAALGAGMFHRGEYSVKDVKDFLENKGEVVRAFEPIELVHVE

SEQ ID NO: 10130 - DNA, 1659 bp, Kluyveromyces lactis NRRL Y
  CDS (1)..(1659)
atgacagtcgtgcatattattgatgtggaatctggtaatttgcaatccttgcagaatgctatcaatcatttaggttacgagacaagattaatcaagtctgcttcagatccagagttacaaactgctgaaagaatcatcctgccaggtgtcggtaattttggccattttgtcgataacttaacttctcgtgggtttgagcaacctatcaaagattatattgcatccggaaggccgttgatgggtatttgtgttggcttgcaagcgcttttcgatggatcttctgaatctccttcaagcagagggttaggtttaatcccaggtactttgtccaaatttgatatcagtgaaggtaaaagtgttcccgaaattggatggaataccattattccacaggacgatctttcatttggtttagatccttataaaaggtactacttcgttcattcttttgctatgatcgtcgatgatgtacaacttgatgacttgcatagtaagggatggaaagttgctttgacaagatacggtaacgaaagatttgttgccgccattcacaaggataatgtgttttctacacaattccatccggagaaatctggtaaggccggtctagaaattatagataactttttgaaaggtattcacccagttacagagtacacagatgaacaaaaatctcttttagggaatgactatacaaactttggtttgacaagaagaataattgcttgtctcgatgtccgtacgaatgatcaaggtgatctagtggtaaccaaaggggaccaatacgatgtccgtgaaaaaacagaaggaggcaacgttagaaacttgggaaaacctgtagagctcgcacaacgttactatgaacaaggtgctgatgaagttactttcttaaatatcaccagtttcagaaactgtccattaaaggatactccaatgttggatgtgctaagacttgctgccaagactgtgtttgtaccactgacagtcggaggtggtatcaaagatgtcgtggatgttgacggcacaaaagtaccggctttagatgtggccggcatgtatttcagatctggtgctgataaggtttctattggtacagatgcagtgtttgctgcagaaaagtactatgctaacggagaaaagggtgatggaaaatctccaattgaaacgatttctaaagcttatggtgcacaagcggtggttatttctgtggaccctaaaagagtttatgttaacaataggaacgaaacccctaataaatgtttccaaactttatcgcctaatcctgaggggcaaaattggtgctggtatcaatgtacaatcaagggtggtagagaatccagagacctaggagcctgggaattggctcatgcatgtgaagcccttggtgctggtgagattctcctaaactgtattgataaagacggctcaaactcaggatacgatttggaattaatcgatcatattaaaagtgccgtttcaattcctgttattgcctcatcaggtgcagggaatccaggtcactttgaacaaggatttacaaagacaaaggctgatgcttgtttaggtgcaggtatgttccatagaggagaatacactgttaaccaggtcaaggattacctgatctctaaaggtttaaaagtcagaattgataacgagtaa

SEQ ID NO: 10131 - protein, 552 aa, Kluyveromyces lactis NRRL Y
MTVVHIIDVESGNLQSLQNAINHLGYETRLIKSASDPELQTAERIILPGVGNFGHFVDNLTSRGFEQPIKDYIASGRPLMGICVGLQALFDGSSESPSSRGLGLIPGTLSKFDISEGKSVPEIGWNTIIPQDDLSFGLDPYKRYYFVHSFAMIVDDVQLDDLHSKGWKVALTRYGNERFVAAIHKDNVFSTQFHPEKSGKAGLEIIDNFLKGIHPVTEYTDEQKSLLGNDYTNFGLTRRIIACLDVRTNDQGDLVVTKGDQYDVREKTEGGNVRNLGKPVELAQRYYEQGADEVTFLNITSFRNCPLKDTPMLDVLRLAAKTVFVPLTVGGGIKDVVDVDGTKVPALDVAGMYFRSGADKVSIGTDAVFAAEKYYANGEKGDGKSPIETISKAYGAQAVVISVDPKRVYVNNRNETPNKCFQTLSPNPEGQNWCWYQCTIKGGRESRDLGAWELAHACEALGAGEILLNCIDKDGSNSGYDLELIDHIKSAVSIPVIASSGAGNPGHFEQGFTKTKADACLGAGMFHRGEYTVNQVKDYLISKGLKVRIDNE

SEQ ID NO: 10132 - DNA, 777 bp, Erwinia carotovora
  CDS (1)..(777)
atgctggcaaaacggataatcccctgtctggacgtacgtaacggtcaggtcgtcaaaggtgtgcagttccgcaaccacgaaatcatcggtgacatcgtgccgctggcgcagcgctatgcgcaggaaggtgctgatgagctggttttttatgatatcacagcctcttcggatggccgtgtagtcgataaaagctgggtatcccgcgttgcggaagtcatcgatattcctttctgtgtggcgggcggcattaaaagcgtggaagaagccggtcaaatactctctttcggcgcggataaaatttccatcaactccccggcgctggccgaccctgagttaattacccgattggccgatcgctatggcgtgcagtgcatcgtcgtcgggattgatacctggcatgatgccgcgaccggccgctatcatgtgaatcaatacacgggtgatgaaacgcgaactaaggtcaccacctgggaaacgctggattgggtagaagaagtgcaaaagcgcggcgcgggtgagattgtcctgaacatgatgaatcaggacggcgtgcgcaacggctatgatttgcaccagttaaatctggtgcgtgatgtctgcaacgtcccgctgattgcttctggcggcgcaggcaccatggagcattttctggatgcgttccagaccgcccacgttgatggcgcgctggcagcatcggtgtttcacaagcaaattattaatattggcgaactgaaacaatatcttaagcaacaaggcgtggagattcgagtgtgttaa

SEQ ID NO: 10133 - protein, 258 aa, Erwinia carotovora
MLAKRIIPCLDVRNGQVVKGVQFRNHEIIGDIVPLAQRYAQEGADELVFYDITASSDGRVVDKSWVSRVAEVIDIPFCVAGGIKSVEEAGQILSFGADKISINSPALADPELITRLADRYGVQCIVVGIDTWHDAATGRYHVNQYTGDETRTKVTTWETLDWVEEVQKRGAGEIVLNMMNQDGVRNGYDLHQLNLVRDVCNVPLIASGGAGTMEHFLDAFQTAHVDGALAASVFHKQIINIGELKQYLKQQGVEIRVC

SEQ ID NO: 10134 - DNA, 738 bp, Erwinia carotovora
  CDS (1)..(738)
atgattattcccgcattagatctgattgatgggcaggttgtccgtctgcatcagggtgattatggccagcagcgccaatacggaagcgatccacttccccgcttgcaggattaccagcaacaaggtgcaggcgtgctgcatttggtggatttgaccggagcaaaaaatccctctgcccgacagattccactgttaaccacgctgttggctggcgttagcgtaccggtacagatcggcggcggcattcgtaccgagcaggacgtagaagcgttgctaaaagccggtgccagccgtgtcgttattgggtccaccgcggttaagcagccggaactcgttcagcaatggttcacccgctacggcgcagaggcgctggtgcttgcactagacgtgcgtatcgacgcaaacggcacgaagtacgtcgccatcagcggctggcaggagaattcagacgccacgcttgagcagatcgttgaacaatatctgccgttcggtctgaagcatgtgctgtgcaccgacatttcccgtgacggtacgctgagcggctccaacgtcgagctctatcgtgaaatcagtcagcgctacccgcagattgcctttcaggcgtccggcggcataggtaatctgaccgatatcgccaatttgcgcagcagcggtgtgcagggcgttatcgtcggccgtgcgctgttggaaggtaaatttaacgtcgcggaggctatttcatgctggcaaaacggataa

SEQ ID NO: 10135 - protein, 245 aa, Erwinia carotovora
MIIPALDLIDGQVVRLHQGDYGQQRQYGSDPLPRLQDYQQQGAGVLHLVDLTGAKNPSARQIPLLTTLLAGVSVPVQIGGGIRTEQDVEALLKAGASRVVIGSTAVKQPELVQQWFTRYGAEALVLALDVRIDANGTKYVAISGWQENSDATLEQIVEQYLPFGLKHVLCTDISRDGTLSGSNVELYREISQRYPQIAFQASGGIGNLTDIANLRSSGVQGVIVGRALLEGKFNVAEAISCWQNG

SEQ ID NO: 10136 - DNA, 810 bp, Acinetobacter sp
  CDS (1)..(810)
atgcaatctcggaaaatttatttatttagactcatactgttggatgccacaatgcttgcaaaacgtattattccctgccttgatgtcgataatggccgtgtggtcaagggcgtgcaatttttagatattcgtgatgcaggtgatcctgttgaagttgcacgtcgctacaatgagcaaggtgcagatgaaattacttttctggatattactgcaacgcatcatggtcgtgataccacctatcgtacagttgaacgtatggcagaaagcgtatttgtccctctgactgtcgggggtggtgtgcgtaaggtggaagacattcgtttattgctgaatgcaggtgcagataaagtgagcattaactcggcagccgtgtttaatcctgagtttgtacaagaagcatcacaacgctttggggcccaatgtattgtggttgcaattgatgctaaaaaaacaggcgacaacacatgggaaatttttacccacggtggtcgtaagcctacgggcattgatgcactggagtggtcggtgaagatggcagaatacggcgcaggcgaactgctggtgaccagtatggatgccgatggtaccaaagcaggttatgacattgccttgatgcgtgaaattaacaaccgtgtttcaattcccaccattgcctctggcggcgtagggaatttacagcatatggcagatgggattttaaaaggtggtgcagatgcggtactggcagccagtattttccactttggtcagcataccattcctgaagcaaaacagtttttggctgcacaaggcatcgaaatgcgtctctaa

SEQ ID NO: 10137 - protein, 269 aa, Acinetobacter sp
MQSRKIYLFRLILLDATMLAKRIIPCLDVDNGRVVKGVQFLDIRDAGDPVEVARRYNEQGADEITFLDITATHHGRDTTYRTVERMAESVFVPLTVGGGVRKVEDIRLLLNAGADKVSINSAAVFNPEFVQEASQRFGAQCIVVAIDAKKTGDNTWEIFTHGGRKPTGIDALEWSVKMAEYGAGELLVTSMDADGTKAGYDIALMREINNRVSIPTIASGGVGNLQHMADGILKGGADAVLAASIFHFGQHTIPEAKQFLAAQGIEMRL

SEQ ID NO: 10138 - DNA, 732 bp, Acinetobacter sp
  CDS (1)..(732)
atgctgatcatccctgcaattgacctgaaagatggtaaatgtgtccgcctcaagcaaggtcgtatggaagacgataccgttttctctgacgatccagttgcaaccgcacagcattgggtcaatgaaggtgcacgtcgtttacatttggtcgatttgaatggtgccttcgcaggaacccccattcataaaccagtggttgaagcaattgccaaagcacaacctgagcttcccatccagattggcggtggtattcgctcccttgaaaccattgagcattatttagatgcaggcgtatcctttgtcattattggtaccaaagccgtacaagatcctgagtttgtcgagcaggcatgcaaacagtttgctggtcatatcattgtaggcatcgatgccaaagatggcatggtggcaaccgatggctgggccaatgtgacagatgtaaaagcaactgatttggccaaacgttttgccgatgcaggtgtttcaagcattgtatataccgatattgcacgtgatggcatgatgcaaggtgtaaatgtcgagcagactgtcaatctggcgcagtattctggcttacccgtgattgcttctggcggtgttaccaatctggatgatgtacgcttactcaaaggcaagcctggtattttaggagccattactggtcgtgccatttatgaaggtacgctcagccttcgtgaagcacagttattgcttgatcaaaatacgctttaa

SEQ ID NO: 10139 - protein, 243 aa, Acinetobacter sp
MLIIPAIDLKDGKCVRLKQGRMEDDTVFSDDPVATAQHWVNEGARRLHLVDLNGAFAGTPIHKPVVEAIAKAQPELPIQIGGGIRSLETIEHYLDAGVSFVIIGTKAVQDPEFVEQACKQFAGHIIVGIDAKDGMVATDGWANVTDVKATDLAKRFADAGVSSIVYTDIARDGMMQGVNVEQTVNLAQYSGLPVIASGGVTNLDDVRLLKGKPGILGAITGRAIYEGTLSLREAQLLLDQNTL

SEQ ID NO: 10140 - DNA, 1659 bp, Candida glabrata CBS138
  CDS (1)..(1659)
atgtctacggtacatgttattgatgttgagagtggtaacttgcagtctctgaccaatgcaattgaatatctagggtttagagtccaattgatcaaggactcccaagatcctgaactgctgaaagcagaaaagttgatactgccaggtgttggtaactatgggcatgtgtatgagaatatattatccagagggtttgagaagcccatcagggaatacatagcttctggcaaaccgatcatgggtatttgtgttggtctacaagttttgtttaatagctctaccgaaagtccctccagcggcgggtttggctatgtgaaccatagactatctcgcttcaatgatgatgaaaagccagttcctgaaattggctggaacagcgtcatcccagaaaaggacttgttctttggcttagatccttacaagagatattatttcgttcactcatatgctggtatactagatgcagcaacagaatcaagcttgaaagctgacggctggaggattgcgaaggctaaatatggttctgaggaatttattgctgcagtttacaaggacaatatatttgctactcagttccaccctgagaaatcaggtttggcaggtttgcatataattgaaaactttctaaaacaggcacatccagggttaccagcttactcagaggatgaaaagtccttgcttggcaatgattactcaaactatggattaacgagaagaattatagcgtgtttggacgtacgtactaatgatcaaggagatctcgttgttacaaagggagaccaatatgatgtcagagagaaaagtggtgacaacgacgtaagaaatcttggtaagccagttcaattggctcaaaaatattatgaacaaggtgccgatgaagtgacatttttaaatattacatcattcagagacagtccggtgaaagataccccaatgcttgaagtgttgagacagactgcgaaaaaggtttttgtcccattaaccgttggtggtggtatcaaggatatcgtcgatccggatggaacccatgttagcgctcttgaagtagcaagtctgtacttcagatcaggtgctgataaagtctctatcgggaccgattctgtttatgctgcagagaaatactatgcgaatgaaggaaaaggggatggtacatcgccaattgaaactatctcaaaagcttacggtgctcaagcagttgtaatttctgttgatcccaagagagtttatgttaacgatccaagtgaaactaaaaacaaaacaataaaaacaaaattccctaatgagaagggacaagatgtatgctggtaccaatgcacaattaaaggtggtagagagagtagagatattggtgtttgggaactagctagagcgtgtgaagcattgggtgctggtgaaattcttctaaattgtattgataaagatggttctaactcaggctatgatcttgaactcatcaaccatgctaaggaagctgtgaaaattcccgttattgcgtcttcgggtgcgggaaaccctgcacattttgaagaaggtttcaagcaatctgctgcagatgcttgtctgggtgcaggtatgttccacagagaagaatacactgtaaatgatgtaaaggaatacttattgaaaaaagggttgaaagttagagtagataaaaactaa

SEQ ID NO: 10141 - protein, 552 aa, Candida glabrata CBS138
MSTVHVIDVESGNLQSLTNAIEYLGFRVQLIKDSQDPELLKAEKLILPGVGNYGHVYENILSRGFEKPIREYIASGKPIMGICVGLQVLFNSSTESPSSGGFGYVNHRLSRFNDDEKPVPEIGWNSVIPEKDLFFGLDPYKRYYFVHSYAGILDAATESSLKADGWRIAKAKYGSEEFIAAVYKDNIFATQFHPEKSGLAGLHIIENFLKQAHPGLPAYSEDEKSLLGNDYSNYGLTRRIIACLDVRTNDQGDLVVTKGDQYDVREKSGDNDVRNLGKPVQLAQKYYEQGADEVTFLNITSFRDSPVKDTPMLEVLRQTAKKVFVPLTVGGGIKDIVDPDGTHVSALEVASLYFRSGADKVSIGTDSVYAAEKYYANEGKGDGTSPIETISKAYGAQAVVISVDPKRVYVNDPSETKNKTIKTKFPNEKGQDVCWYQCTIKGGRESRDIGVWELARACEALGAGEILLNCIDKDGSNSGYDLELINHAKEAVKIPVIASSGAGNPAHFEEGFKQSAADACLGAGMFHREEYTVNDVKEYLLKKGLKVRVDKN

SEQ ID NO: 10142 - DNA, 750 bp, Picrophilus torridus
  CDS (1)..(750)
atgcttgcaaaaaggattatagctgcacttgatgtaaggaacggcagggttgtcaagggtgtaagattcatggatataaaagatgccggcgatcctgttgaaaatgctgttatataccaggatcagggtgcagatgagatcgtcttccttgatataagcgcaacagatgaaaaacgtgatataatgatcgatcttgttaaaagtgtctcaagggaattaaacataccatttactgttggtggtgggataagatctgtaaaaactgcattgaaccttctaagggagggctgtgacaaggtttttttaaatacatatgcaattgaaaatccatggataataaaagagatatcaagagaaactgggtctgcaaatcttgttatagcagttgacgcaatgtacaacaatggttattatgtttacaaaaacgctggcaggataaacagcggattaaaattaaatgaatggcttccaatggctgaataccttggcgccggcgagatacttttaacatcaatagacagcgatggtacaatgaaaggcttcgataacaggctaatatcagaggccgcatcaatgattgatataccagtaatagcatctggcggtgccggaaaaccggagcattttcttgatgcctttatggcaggtgcctcgggggcgcttgcggcatcaatactccattttaaaatcaacacagtaaatgatataaaaagatatttaaggagcaatggtgttaatgtcagattataa

SEQ ID NO: 10143 - protein, 249 aa, Picrophilus torridus
MLAKRIIAALDVRNGRVVKGVRFMDIKDAGDPVENAVIYQDQGADEIVFLDISATDEKRDIMIDLVKSVSRELNIPFTVGGGIRSVKTALNLLREGCDKVFLNTYAIENPWIIKEISRETGSANLVIAVDAMYNNGYYVYKNAGRINSGLKLNEWLPMAEYLGAGEILLTSIDSDGTMKGFDNRLISEAASMIDIPVIASGGAGKPEHFLDAFMAGASGALAASILHFKINTVNDIKRYLRSNGVNVRL

SEQ ID NO: 10144 - DNA, 735 bp, Methanococcus maripaludis
  CDS (1)..(735)
atgtataggaatagaataataccttgtttattattaaaagatgaaaggttagttaaaacagttaaatttaaagatccaaattatataggtgatcctttaaatgcagtcaggatattcaatgataaagaagctgatgaacttttttttattgatattagtgcttcaaaaagagagagtataaattttgatttacttaaaaaaatatcatcccaaagtttcatgcctctgggttatgctggcggcattaaatgtttaaatgatgcgaaaaagattttttccataggttttgaaaaaatctcgttaaataccattgttctcaaaaatcctgatttgataacggaaatttctaagatatatggttctcaaagtgtgttagtaactattgatgttaaaaaaaattttttcggaaaatattatgtctataaccatttgaaaaaaaaaataactaaatataatcccgtagattttgcaagaaaaatggaagttttgggtgctggagaactcgtaataaactgcgtagataatgatggtgttatgaaaggttataatttaaaattaataggtgaaatttcaaaagcagttaaaattccaatcgttgcgttgggtggtgcaggtagtttaaaagatttagacgatgcaattaatgtgggagcaagtgctgcaggtgcaggtagtttatttatatattatggcccgcataaagcggttttaataaactatccgagaggagattaa

SEQ ID NO: 10145 - protein, 244 aa, Methanococcus maripaludis
MYRNRIIPCLLLKDERLVKTVKFKDPNYIGDPLNAVRIFNDKEADELFFIDISASKRESINFDLLKKISSQSFMPLGYAGGIKCLNDAKKIFSIGFEKISLNTIVLKNPDLITEISKIYGSQSVLVTIDVKKNFFGKYYVYNHLKKKITKYNPVDFARKMEVLGAGELVINCVDNDGVMKGYNLKLIGEISKAVKIPIVALGGAGSLKDLDDAINVGASAAGAGSLFIYYGPHKAVLINYPRGD

SEQ ID NO: 10146 - DNA, 780 bp, Bdellovibrio bacteriovorus
  CDS (1)..(780)
atgttaagaccacgtataattccgtgcctcctagttaaggatggcggtctagttaaaacggtaaaattcaaggatcctaaatatgtgggcgatccgattaatgctgttaaaatatttaatgaaaagcgtgctgatgagctgattgttgtggacattgatgcaacagttaatggcgtcgagccaaattataaaatgatcagtaatctggctatggaatgccgtatgccgctatgttatggcggtggagttcgaacagccgctcaagcgaagaagattgtgtcattgggagtagagaaggtcgcaatcagtgcggcggctcttgaaaatatgagtcttatcactcagatggccgaggaaatcggacgccagagtgttgttgtcgtcttagacgtaaaaaagcggttgttagggcgtacatttgatgtttggactcacaatggcactaagaatacaaagcgcgagtttattgaggtagctaaagaggcagagcagcttggagcgggagagatagtcgttaactcaattgacgacgatggtaaaatgtctggctacgatgtcgctcttattaaaaagctgcgtgagtcggtgaaaattccggttacagttcttgggggggcgggttccctcgatgatatttctaaagttattgaggaatgcggtactgttggcgtggctgcaggaagtttgtttgtcttcaaggggccctataaggctgttctgatcaattacccggatttgcgtcagaaggatgaaatgatcaaaagcgcattgcgcaggtaa

SEQ ID NO: 10147 - protein, 259 aa, Bdellovibrio bacteriovorus
MLRPRIIPCLLVKDGGLVKTVKFKDPKYVGDPINAVKIFNEKRADELIVVDIDATVNGVEPNYKMISNLAMECRMPLCYGGGVRTAAQAKKIVSLGVEKVAISAAALENMSLITQMAEEIGRQSVVVVLDVKKRLLGRTFDVWTHNGTKNTKREFIEVAKEAEQLGAGEIVVNSIDDDGKMSGYDVALIKKLRESVKIPVTVLGGAGSLDDISKVIEECGTVGVAAGSLFVFKGPYKAVLINYPDLRQKDEMIKSALRR

SEQ ID NO: 10148 - DNA, 789 bp, uncultured bacterium 440
  CDS (1)..(789)
atgaaagaaatattaagaattattcccgttttgtttataaaaaatggactgattgtaagaagtcaaaatttttataaacatcagtttataggaaacgttatagaacaagcaaaaagacttaatgattatgatgtcgatgaacttgtatatattgatatcactagaaatgataattatgatttaggaagagacgatcttcttgttaaatctaaacgtgacataatgtcgattatcaaagatataagcaaagtttgttttatgcctctaacttttggtggtggcatcagaagtgtagatgatgctgttaatcggataagagcaggagcagacaaaataactattaacagtctcttatataaagatttaaatatagtaaaaaaaataatttcagaaattggatctcaagcagttgtagcttcaatagattataaaattataaacgaaaagttaataatttttaataacttcggtcaagataatacaaacatagagttaattgattttataaaaaaaattgaaaatttaggtgttggagaattttttattcaaaatgttgaattagacggcatgcaaaaaggttttgatttaaataatattaagaaaatagttaattcagttaatttaccagttatagcatgttctggcgcaggttctttagagcactttttagaagctgtaaaaataaaaggtttatcagcagttgctgctggtaattattttaattataaagaaagatcgtacccaataattaaaaaagaacttaaagactttaatataaatgtcagataa

SEQ ID NO: 10149 - protein, 262 aa, uncultured bacterium 440
MKEILRIIPVLFIKNGLIVRSQNFYKHQFIGNVIEQAKRLNDYDVDELVYIDITRNDNYDLGRDDLLVKSKRDIMSIIKDISKVCFMPLTFGGGIRSVDDAVNRIRAGADKITINSLLYKDLNIVKKIISEIGSQAVVASIDYKIINEKLIIFNNFGQDNTNIELIDFIKKIENLGVGEFFIQNVELDGMQKGFDLNNIKKIVNSVNLPVIACSGAGSLEHFLEAVKIKGLSAVAAGNYFNYKERSYPIIKKELKDFNINVR

SEQ ID NO: 10150 - DNA, 786 bp, Buchnera aphidicola
  CDS (1)..(786)
atgttggcaaaaagaattattccctgtttagatgtaaaaaatggtttagtagttaaaggtattcaatttaaaaatcaccgagttgtaggaaatatattatctttagcgaaaagatatgttaaagaaggagctgatgaattagttttttatgatatttctgcatctgtacaaaaaaaattagttaataaaaattggatttctatgattgctgaagtaattaatattccattttgtgtagctggtggaattaaaactctgaaagatgcaaaagaaatttttaattatggcgctgataaaatatctataaattctcatgctattaataatccttctttaattactgaaattgcagataaatttggagtacaagcggtggttattggaattgattcttattttcataaaatagaaaaaaagtattttgtacatcaatatactggagatgcaaaatatgaaaaaaaaacagttttagaaacttctaaatgggtaaaaattgtacaaaaatatggtgcaggagaaattgttttaaattgtatgaatcaagatggagtaaaaaatggatatgatattaaacaattaagaaaaataagaaaaatatgtaaagtacctttaattgcctctggaggagctggacatataaatcacttttatgatgtatttaaattttcagatgtagatggagctctagcagcatctatttttcatgaaaatattgttaatataaataaattaaaaaattttttatctagaaaaaatattgagattaggacacatgctaactattag

SEQ ID NO: 10151 - protein, 261 aa, Buchnera aphidicola
MLAKRIIPCLDVKNGLVVKGIQFKNHRVVGNILSLAKRYVKEGADELVFYDISASVQKKLVNKNWISMIAEVINIPFCVAGGIKTLKDAKEIFNYGADKISINSHAINNPSLITEIADKFGVQAVVIGIDSYFHKIEKKYFVHQYTGDAKYEKKTVLETSKWVKIVQKYGAGEIVLNCMNQDGVKNGYDIKQLRKIRKICKVPLIASGGAGHINHFYDVFKFSDVDGALAASIFHENIVNINKLKNFLSRKNIEIRTHANY

SEQ ID NO: 10152 - DNA, 723 bp, Listeria monocytogenes
  CDS (1)..(723)
atgcaaatcttcccagcaatagacttaaaaaatggacagtgcgtccgtctcttccaaggcgacttctctaaaaaaacagttgtcaatgaagacccaattgcccaagcaaaagcatttgctacagacggcgcaacctatttgcacatcgtcgacctagacggtgcattagaaggacgtcctatcaatctagaaattattcaaaggatgaaaaaagcagctaaaatccctgttcaagttggtggaggaattcgtagcatggcgcaagtggattattatcttgaatccggcatcgaccgcgtgattatcggttctgccgctctaacaaatccagatttcctacgtgcggcagtccaaaaatacggagctaaaattgtagcaggtatcgatgccaaaaacggttttgtcgcaacaagaggttggctcgatgtcagtcaggtaagctatttagatttggctaaacgaatggaaaaagtgggtgttgagacaatcatttacactgatattagccgtgatggcacgctaactggacctaatttagaacaaatggcaaatctcaaagagcacgttaaagttagtttaattgcttctggcggagtgagcagtcgtgcagatttggaagcactcgcccaactcggcttatatggagcaattgccggaaaagccctttataatcatgatatttccatgtcagatattgtagaggtggaacaaattgcttactaa

SEQ ID NO: 10153 - protein, 240 aa, Listeria monocytogenes
MQIFPAIDLKNGQCVRLFQGDFSKKTVVNEDPIAQAKAFATDGATYLHIVDLDGALEGRPINLEIIQRMKKAAKIPVQVGGGIRSMAQVDYYLESGIDRVIIGSAALTNPDFLRAAVQKYGAKIVAGIDAKNGFVATRGWLDVSQVSYLDLAKRMEKVGVETIIYTDISRDGTLTGPNLEQMANLKEHVKVSLIASGGVSSRADLEALAQLGLYGAIAGKALYNHDISMSDIVEVEQIAY

SEQ ID NO: 10154 - DNA, 1650 bp, Ashbya gossypii
  CDS (1)..(1650)
atggtacaggtcgtgcacatcgtggacgtcgaaagcggcaacctgcaatcgatcacaaacgcaattgagcatctaggctatgaggtgaagctgatacgaagtggcgctgatcctgagctggacaaggcggagacgctaattctaccgggcgtcgggaattttggccatttcactcgcaacatgcgcgcccgtgggtttgtggacgctatctcctcatacatcgcatctgggaggcccctgatgggcatctgcgttgggctacaagtgctatttagaagctccgaagaagaccctggcgcagaaggactggcgctggtcgacatgtcgctgtcgcggttccgcgatgagtcaaagccggttccggagataggttggaacaccctgcaactggacggagaccaattcttcggtcttgacccctgcggaaggtactacttcgtgcactcgtatgctgcgatgttggcaaatggtgcgggccggttgcgagagcagggctggcgcgtcgcgacagccaggtacggcgatgagcgatttgtagcggcgctggcacgtggaaacctgtttgcaacgcaattccacccagaaaagtcggggaagctcgggttgcaactactggccaacttcctgaagcagcaacacccttctattgaccgcggctcgcaggatatagagctgctcaccaatgattactctaattatgggttgaccagacggattatcgcatgtttagatgtgcgcgccaacgatgagggagatctcgtggtgacgaaaggcgaccaatatgatgtcagagacaagcaagaaagtggtgcgatcagaaacctaggcaagccggtcgagctggcgcagctttattacgagcaaggtgcagacgagattacattcctgaatataacgagcttcaaggattgtccattaagggatgcaccaatgctggaggtgctgcggctagctgctaagacgacttttgttccgttgactgtgggcggcggaatccgggatatagttgatccggacgggacaagaatctctgctctggacgttgctggcctttacttccgatccggtgcagataaagtttccatcgggacagacgctgtctatgccgcggagcggtactacgaggccgggacacgtggggatggctcgtctcccatagaaaccatttcgaaggcctacgggtcccaggcggtggtaatttctgttgatcctaagcgagtttatgttgattccccggatgatactcccaataagaccatcgagtccaagtatcctaattctaaaggtcaaagatggtgctggtaccaatgtactttgaaaggagggcgagaatgcagtaagattggcgtctgggaattagtaagggcatgcgaagccctaggtgccggcgagattctcttaaattgcatcgacagagatggtacaaatgttggatacgatctcgagttgcttaaactggttaagtatgccgtaaaaattcccgtcgttgcctcgagcggcgcagggaagcctgagcatttccaagaagcatttctcgagactggagtagatgcctgtttgggagcgggtatattccataggggagaatacaccgttcgagaagtcaaggaccatctcagcaggaacggattgaaagtgaggctgatttga

SEQ ID NO: 10155 - protein, 549 aa, Ashbya gossypii
MVQVVHIVDVESGNLQSITNAIEHLGYEVKLIRSGADPELDKAETLILPGVGNFGHFTRNMRARGFVDAISSYIASGRPLMGICVGLQVLFRSSEEDPGAEGLALVDMSLSRFRDESKPVPEIGWNTLQLDGDQFFGLDPCGRYYFVHSYAAMLANGAGRLREQGWRVATARYGDERFVAALARGNLFATQFHPEKSGKLGLQLLANFLKQQHPSIDRGSQDIELLTNDYSNYGLTRRIIACLDVRANDEGDLVVTKGDQYDVRDKQESGAIRNLGKPVELAQLYYEQGADEITFLNITSFKDCPLRDAPMLEVLRLAAKTTFVPLTVGGGIRDIVDPDGTRISALDVAGLYFRSGADKVSIGTDAVYAAERYYEAGTRGDGSSPIETISKAYGSQAVVISVDPKRVYVDSPDDTPNKTIESKYPNSKGQRWCWYQCTLKGGRECSKIGVWELVRACEALGAGEILLNCIDRDGTNVGYDLELLKLVKYAVKIPVVASSGAGKPEHFQEAFLETGVDACLGAGIFHRGEYTVREVKDHLSRNGLKVRLI

SEQ ID NO: 10156 - DNA, 756 bp, Rhizobium leguminosarum bv
  CDS (1)..(756)
atgagaaaaaggcttatacccgtcctgctagtcgatcagaagcgtcggctggtgaagacgatagagtttggcgagcgcacctacgtcggcgatcccttcaatgttgttcgcctgttcaacgaaaaggaagtcgacgagatctgcattctcgatatcgacgccacgcgtacggggcgaggtcctgacctcggcttcgttcgcgaactcgcaaccgaatgtttcatgcctttggcatatggcggcggcatcaccgagcttaagcagtgcgaggaacttaaccgctccggcgtcgagaagtttgtactcggtcaaggcgcgcgcaattcgcaactggtgggagcgatcgctgccgatatgggcagccaggctctggttgcctgtgtcgacgtagacggtcgcggcgcggcggcgagctgctacgcttcaagcggtgcgaggcaagagccgatagaattctgcctgaggttgcaggatgccggcgttggcgaaataattcttcagtcgaaaactctcgacggcacccgcaacggatatgatcttgagttgatccagtcgattacccgaaagctgagcattccggtcgttgccttgggtggcgccggagacgtcgcccacctgatggaaggccttcatgccggcgcttccgccgcggcctcggggagcgccttcacctttatcggtcggctaagggcagttcttataagctaccctgcaccagaaattttggaggaagcggagcaaggtgctcatggataa

SEQ ID NO: 10157 - protein, 251 aa, Rhizobium leguminosarum bv
MRKRLIPVLLVDQKRRLVKTIEFGERTYVGDPFNVVRLFNEKEVDEICILDIDATRTGRGPDLGFVRELATECFMPLAYGGGITELKQCEELNRSGVEKFVLGQGARNSQLVGAIAADMGSQALVACVDVDGRGAAASCYASSGARQEPIEFCLRLQDAGVGEIILQSKTLDGTRNGYDLELIQSITRKLSIPVVALGGAGDVAHLMEGLHAGASAAASGSAFTFIGRLRAVLISYPAPEILEEAEQGAHG

SEQ ID NO: 10158 - DNA, 1662 bp, Neurospora crassa
  CDS (1)..(1662)
atgccgaccgttcacctcctggattacgtcgccggcaacgtgcgcagcttggtcaatgccattgagagggttggctacagcgtcgagtgggtccggtcgccggaggaggttgccaatgctgataaactcatcctccctggcgtaggccacttcggccactgcctctcccagctcgcctccgccggctacatggcccccatccgcgcccacatcgagtccggtaagcccttcatgggcatctgcgtcggcctccaggctctcttcgaaggctcgtccgaagaccccaactgccccggtctgggtgtcctccccggcaagctcgaccgcttcgacgacacctccaagtccgtcccccacattggctggaacgacgcctcgtgcccgaccaacccgaacctctttggtctcaaccccgactccaaatactactatgtccactcgtacaagatgccctacaccaagggccagctcgagtcgcaagggtgggcggtggctaccggtgtctatggcggcgagacctttattggcgccattgccaagggcaacgtgatggccacccagttccaccctgagaagtcgggtgtcgccggtctgcgcgtcatccgggccttcctcgatggctctggcgccgctgctctggcttcccaccctccccaggaggtccccaacgccggcgacgatgccctcgtcagcaaggagggcctcacccgtcgtgtcattgcctgcttggatgtgcgcaccaacgaccagggcgacttggtggtcaccaagggtgaccaatatgatgtccgcgaaaagtctgacgaccgcaacgtccgcaacctcggcaagcccgtcgagatggcgcgcaagtactacgaacaaggcgccgacgaagtgaccttcctcaacatcacctccttccgcgactgccccgttgccgacctgcccatgctcgagatccttcgcctgacctccaagaccgtcttcgttcccctgaccgtcggcggcggcatccgcgacaccgtcgacacggacggcaccaaggtctccgccctcgaaatcgccaccatgtacttccagtcaggcgccgacaaggtgtccattggctccgacgccgtcatcgctgccgaggagtactatgcctccggcaagacgctctttggcaacacggccattgagcagatcagcaaagcctacggaaaccaggctgtcgtcgtctcggtcgatcccaagcgcgtctacgtccccaagcccgatgccacgagacaccacaccgtcaagacgtcgtaccccggccccaagggcgaggaatactgctggtacgcctgcacgatcaagggcgggcgcgagacgagggatctggatgtggttgaactcacgcaggccgtggaagccatgggctgcggcgagattctgttgaactgcattgacaaggacggcaccaacagcgggtttgatctggagttgatcaggcaggtcaaggcggccgtgaggataccggttattgccagctcgggggcgggcaacccgggtcactttgaggaggtgtttagggagacgacgacggacgccgcgctgggagcaggcatgttccaccgtggggagtatacagtacagcaggtcaaggaggagctgaaggcgagggggttggtggtcagacagtttgagggagatctctga

SEQ ID NO: 10159 - protein, 553 aa, Neurospora crassa
MPTVHLLDYVAGNVRSLVNAIERVGYSVEWVRSPEEVANADKLILPGVGHFGHCLSQLASAGYMAPIRAHIESGKPFMGICVGLQALFEGSSEDPNCPGLGVLPGKLDRFDDTSKSVPHIGWNDASCPTNPNLFGLNPDSKYYYVHSYKMPYTKGQLESQGWAVATGVYGGETFIGAIAKGNVMATQFHPEKSGVAGLRVIRAFLDGSGAAALASHPPQEVPNAGDDALVSKEGLTRRVIACLDVRTNDQGDLVVTKGDQYDVREKSDDRNVRNLGKPVEMARKYYEQGADEVTFLNITSFRDCPVADLPMLEILRLTSKTVFVPLTVGGGIRDTVDTDGTKVSALEIATMYFQSGADKVSIGSDAVIAAEEYYASGKTLFGNTAIEQISKAYGNQAVVVSVDPKRVYVPKPDATRHHTVKTSYPGPKGEEYCWYACTIKGGRETRDLDVVELTQAVEAMGCGEILLNCIDKDGTNSGFDLELIRQVKAAVRIPVIASSGAGNPGHFEEVFRETTTDAALGAGMFHRGEYTVQQVKEELKARGLVVRQFEGDL

SEQ ID NO: 10160 - DNA, 783 bp, Pseudomonas aeruginosa
  CDS (1)..(783)
atgctaaagcctagaataattccttgcctgctcatgcaagatggcggacttgtcaaaaccgtacgttttaaggatccacggtatatcggtgatccgattaatgcggtcaagatttttaatgagaaagaagcggatgagctgattatccttgacatcgatgctacctcgcagggtagagaacctgattataagaagattgctaaccttgctgccgagtgccgtatgcccttgtgctatggtggaggtattcgtaaaccagagcaagcgcgtttaattatttccctaggtgtcgaaaaagtagcaatcagtgctgctgcaattgaggacgcaaacttaatatctaaagttgctgaagaaataggtcggcaaagtgtcgtcgttgttctagaccataagcagcgactattgagcaaacagcatgatgtttggacacacaacgggacacataataccaagcgcaatgtcattgacgtggcgaagcagatggaggatgcaggtgccggtgagatcgtgctcaactcaattgacaacgatggacggttgtgtggttacgagatagcgcttgccgtccgtttacgggaagcagtgaatgtacctgttacaatacttggtggcgccggttcgctgaaggatatggggagcttgattgcagcctgtggagtggttggtgctgcggctggcagtctttttgtgtttaaaggcagctatcgagccgtcctgattaactatcccagtttccagcaaaaaaccgatgtaatattttcggtactgaactcccgataa

SEQ ID NO: 10161 - protein, 260 aa, Pseudomonas aeruginosa
MLKPRIIPCLLMQDGGLVKTVRFKDPRYIGDPINAVKIFNEKEADELIILDIDATSQGREPDYKKIANLAAECRMPLCYGGGIRKPEQARLIISLGVEKVAISAAAIEDANLISKVAEEIGRQSVVVVLDHKQRLLSKQHDVWTHNGTHNTKRNVIDVAKQMEDAGAGEIVLNSIDNDGRLCGYEIALAVRLREAVNVPVTILGGAGSLKDMGSLIAACGVVGAAAGSLFVFKGSYRAVLINYPSFQQKTDVIFSVLNSR

SEQ ID NO: 10162 - DNA, 2306 bp, Candida albicans
  CDS (161)..(2044)
tgtgcgagtcagatgttgaaaaaaaaaaaaaaaaattatccaacacattcaacctaacccaacccaactaaccaacttgccatttctttcgaactaatactaaaccccttttttatattcatattttttggatttaggggaagggaaattatttaaaatcatgacgaaaacaatccatatcatcgatgtagaaagtggtaatttacaatcactttcaaatgcaatcaaacgtatcgattctaattatatcattaaattcattcataatgaacaagatttcattgataatgattctcaaattgaaaaattgattttccctggtgttggtaattttggacattttgttaaacaattaaatgaacggaaattaattaatcatttaaaatcatatattaaacaagatcgtccattaatggggatttgtgttggtttacaatcgatttttcatgaatcggaagaaagtccaaatattaaaggattaggattattattagataatgatgataatgatgatgatgatgagaagaagttaaaattatataaatttgataatgatgatgaaaaatttaaaatcaggggcattaaaaaatctgttcctcatattggttggaataatattcatgatataattattaatggcaaacaaacaacgactaaatctttatatggattgaataagattgataaatattattttgttcattcttatgctgcaattattaaaaataataatgatgaaataattgaaaataaattcattaaggatttatcttcaaaaggttgggatttggcaattagtcaatatggatcagaaaaatttatatctgctatatcaaaaaataatttatttgctactcaatttcatccagaaaaatccggaattgttggtttaaaaattattaaaaattttttaaatggtgaaaagaacccaaccccaaccccaaccccaaccccaactccaaacaacctagcccaaggggtagattcttcttctactttggatgttgaaaccaccttaacggggttgactagaagaattattgcatgtcttgatgttagaactaatgatgatggtgatttagtggtcactaaaggtgatcaatataatgttcgagaacaattatcatcatcatcaactaacgaatctgccgaggaggattcttcacaggttcgtaatttaggtaaaccagttgaattagcaacaaaatattataatcaaggagctgatgaaattacatttttaaatatcacatctttccgtaattctcctttaaaagatttacccatgttacaagtattgaaaaaagctgctgaaactatatttgttccattgactgttggtggaggtattaaagatttatatgatccagaaactgggaaaactgttcctgctgttgatgtggctcatttatatttccaatcaggtgctgataaaattagtattggatctgatgccgttaccattgccgaaaattattatgccaataatggggaaattaccggtctttcatcaattgaaaccatttcttccaaatttggtaatcaagcagttgttatatcagttgatcctaaaagaaaatatatcaaagatccaacaactgaaactactactatgcaaacaataaaaatcactgatccttcacaatatggtccaaatggtgaacaatattgttattatcaagtaacttctcaaggtggaaggaaaattcatgaattaggtgcattagaattatgtttagcttgtgaaaaattgggagctggagaaattttattaaattcaatcgatcatgatggttccaataaaggatttaatttacaattattacaacaaattaaatctcaagtttcaatccccgtgattgctagtagtggtgctggtaatcctcaacatttccaacaagtatttgaaatggattgtggaattgatgctgctttaggtgctggtttgtttcatcgtggtgaatataccgttaatcaagtaaagaaatatttacaacaagaagcaaaaatggatgttagattagatgaagatttggagttgtaaaggggttgggtttacccaaccccgagaaggatgtgtgttttagttatatatatatatacagaagatgtattggagtttatgaatgtaaataaggtcaatcaatggtcaataacccatatccatacccattaccaacatattctgtattgtgtgcatcaagagagtagaccttatttgtttaattttgtgtaatttaatttcttgtacaaaaaaaaatcgacttgtcgaaaagtaaagacggacaacaactaactattcctat

SEQ ID NO: 10163 - protein, 627 aa, Candida albicans
MTKTIHIIDVESGNLQSLSNAIKRIDSNYIIKFIHNEQDFIDNDSQIEKLIFPGVGNFGHFVKQLNERKLINHLKSYIKQDRPLMGICVGLQSIFHESEESPNIKGLGLLLDNDDNDDDDEKKLKLYKFDNDDEKFKIRGIKKSVPHIGWNNIHDIIINGKQTTTKSLYGLNKIDKYYFVHSYAAIIKNNNDEIIENKFIKDLSSKGWDLAISQYGSEKFISAISKNNLFATQFHPEKSGIVGLKIIKNFLNGEKNPTPTPTPTPTPNNLAQGVDSSSTLDVETTLTGLTRRIIACLDVRTNDDGDLVVTKGDQYNVREQLSSSSTNESAEEDSSQVRNLGKPVELATKYYNQGADEITFLNITSFRNSPLKDLPMLQVLKKAAETIFVPLTVGGGIKDLYDPETGKTVPAVDVAHLYFQSGADKISIGSDAVTIAENYYANNGEITGLSSIETISSKFGNQAVVISVDPKRKYIKDPTTETTTMQTIKITDPSQYGPNGEQYCYYQVTSQGGRKIHELGALELCLACEKLGAGEILLNSIDHDGSNKGFNLQLLQQIKSQVSIPVIASSGAGNPQHFQQVFEMDCGIDAALGAGLFHRGEYTVNQVKKYLQQEAKMDVRLDEDLEL

SEQ ID NO: 10164 - DNA, 771 bp, Leptospira interrogans
  CDS (1)..(771)
atgagtaatcttactgccagagtaattccctgtctggacatcaaagacgggcgtgtagttaagggagtaaattttgtaaatctagtggacgctggagatccagtggaatcggctgcgatctacgaagagaatttagccgatgaactttgttttttagatataaccgcttcttcggatagaagagagatattacttcatcttgtagagaggatagccgaaaagattttcattccttttacagtaggaggaggaattagaaccgtagacgacgtaaaagccgttttagaaaaaggagcggacaaggtatcaatcaatactgcagcttttcaaaaccccaaattgttaacatattcttccgaaatttatggatctcaatgtatcgtttgtgcaattgatgttaagcatgaaaaagaaagagatcgatacgaagtttttttacacggaggaagaacagcaaccggaagggaggctttggattgggctcaagaggccgccgaaaaaggtgctggagaaattttacttacgtctatggatcgagatggaactagaaatggatttgatattcatcttctaaagaatttttcctcgtctctgggaattccaattatagcatctggaggggccggaaatccggagcatatggtggaagccattttacgcgggaaagcagatgcagtacttgctgcttctatttttcattttggagaatattctatccgtgagactaaaaaagctatggaagagatgggtatttcggttcgtttagattaa

SEQ ID NO: 10165 - protein, 256 aa, Leptospira interrogans
MSNLTARVIPCLDIKDGRVVKGVNFVNLVDAGDPVESAAIYEENLADELCFLDITASSDRREILLHLVERIAEKIFIPFTVGGGIRTVDDVKAVLEKGADKVSINTAAFQNPKLLTYSSEIYGSQCIVCAIDVKHEKERDRYEVFLHGGRTATGREALDWAQEAAEKGAGEILLTSMDRDGTRNGFDIHLLKNFSSSLGIPIIASGGAGNPEHMVEAILRGKADAVLAASIFHFGEYSIRETKKAMEEMGISVRLD

SEQ ID NO: 10166 - DNA, 771 bp, Prochlorococcus marinus
  CDS (1)..(771)
atggtcgcgcttcgtttgattccttgccttgacgtggctgatggtcgcgttgtgaagggcgtgaactttgtgggccttcgtgatgcgggtgatcccgtggagctcgcctgccgctatagccaggctggagctgatgagttggtgtttcttgatatcgccgccagccatgaaggtcgggccacgctggtggcgttagttcgacgtactgctgaggctgtgaccattccattcacagttggagggggtatcagctctttggatggcatcacagagctgcttcgggctggagccgacaaggtgagtcttaattcatctgcggtgcgggatccagatctcgtagcgcagggagccgaccgttttggctgtcagtgcattgtggtggccatcgatgctcggcgtcgtcctgagtgctcggggtgggatgtttttgttaagggtggacgccaaaacaccggtttggatgctgtgagctgggctcggcaggcagcggaacttggtgctggcgaaatcctgttgacctcaatggatggagatggaactcaggctggttatgacttggagctcacgcaagcagtcgtggaagcggtgccggtgcctgtgatcgcttcgggaggtgcaggttgtctagatcacatcgcagaagccttcacgattggcaaggcctcagctgcattgttggcctctctacttcacgatggcgtgctgagtgtggagcaaattaagactgatctgctgatgcgaggtttgtcgattcggcctcttgagttctga

SEQ ID NO: 10167 - protein, 256 aa, Prochlorococcus marinus
MVALRLIPCLDVADGRVVKGVNFVGLRDAGDPVELACRYSQAGADELVFLDIAASHEGRATLVALVRRTAEAVTIPFTVGGGISSLDGITELLRAGADKVSLNSSAVRDPDLVAQGADRFGCQCIVVAIDARRRPECSGWDVFVKGGRQNTGLDAVSWARQAAELGAGEILLTSMDGDGTQAGYDLELTQAVVEAVPVPVIASGGAGCLDHIAEAFTIGKASAALLASLLHDGVLSVEQIKTDLLMRGLSIRPLEF

SEQ ID NO: 10168 - DNA, 771 bp, Synechococcus sp
  CDS (1)..(771)
atggttgctctccgcttgattccctgcctggatgtcgcccgcggacgggtggtgaagggcgtcaacttcgtcggtctgcgagacgccggtgatcctgtggaactggcctgtcgctacagcggcgccggggcggacgagctggtctttcttgacatcgcggccagccacgaaggccgcggcaccctgatcgacatggtgcatcgcaccgccgaatcggtcacgattcctttcactgtgggtggtgggatctccacggtggagggcatcaccgatctgctgagggccggggccgacaaggtgagcttgaactcctctgcagtgcgacggcctgagttggtgcgtgagggggctgagcgttttggctgtcagtgcatcgttgtggcgatcgatgcccgcaggcgggatggggatggctgggacgtttttgtgaagggtgggcgcgagaacaccggtctggatgcggtggattgggcacgacgggtggcggagctcggtgctggcgaaattctgctgacctccatggacggcgatggcacccaggccggctacgaccttgccctgacccgtgcagtggccgatgcggtcccggtgcccgtgatcgcatccggtggggccggttgcatcgaccacatcgcccaggccctggagacaggaccggacggtggacatgcctccgctgcgctgctggcctccctgttgcatgacggtgttctcacggtcgaggagatcaagcaggatctgctggcgcgaggtctatcgattcgtccgtga

SEQ ID NO: 10169 - protein, 256 aa, Synechococcus sp
MVALRLIPCLDVARGRVVKGVNFVGLRDAGDPVELACRYSGAGADELVFLDIAASHEGRGTLIDMVHRTAESVTIPFTVGGGISTVEGITDLLRAGADKVSLNSSAVRRPELVREGAERFGCQCIVVAIDARRRDGDGWDVFVKGGRENTGLDAVDWARRVAELGAGEILLTSMDGDGTQAGYDLALTRAVADAVPVPVIASGGAGCIDHIAQALETGPDGGHASAALLASLLHDGVLTVEEIKQDLLARGLSIRP

SEQ ID NO: 10170 - DNA, 765 bp, Leptospira interrogans
  CDS (1)..(765)
atgctaaaacctcgaattatacctacattattggtccaacatggcggattagtcaaaacaataaagtttagtaatcagagatatattggagatccattgaatgctgttaggatttttaacgaaaaggaagcagacgaacttacagtcttggatatctctgctagtagggagggaaaggcccctgattatcgattgatagaaagacttgctaatgaatgtagaatgcctctttcatatggaggaggtattaaaaatcttgagcaagctagccggattctaagctttggagtggaaaaaataatagttagttctctagctatcgaaaatccaaaagtaatctcttcaatggcaacatatttaggaaatcaaagtgtcgtagttgcgattgattttaaaaagactttgttaactagaagatacgaagtttttatacataacggaaccaaaaaaacaggaatcagtcctgaagacttattaaaacacgcaattgaatttggggcgggtgaaattttactcaattcgatagatagagacggagttatggaaggatacgacttggagatgcttaaaaaatttagaagtatttgtactgttcctatgacagttttaggtggtgctggatcgctacaagatttaaaaagtttaattcaaaatcttggaatcgttggcgtctccgcaggaagtctttttgtttataaaggaattcacaaggccgtgcttattaattatcctaatcgtgaggataaggaagcattgttttattaa

SEQ ID NO: 10171 - protein, 254 aa, Leptospira interrogans
MLKPRIIPTLLVQHGGLVKTIKFSNQRYIGDPLNAVRIFNEKEADELTVLDISASREGKAPDYRLIERLANECRMPLSYGGGIKNLEQASRILSFGVEKIIVSSLAIENPKVISSMATYLGNQSVVVAIDFKKTLLTRRYEVFIHNGTKKTGISPEDLLKHAIEFGAGEILLNSIDRDGVMEGYDLEMLKKFRSICTVPMTVLGGAGSLQDLKSLIQNLGIVGVSAGSLFVYKGIHKAVLINYPNREDKEALFY

SEQ ID NO: 10172 - DNA, 786 bp, Prochlorococcus marinus
  CDS (1)..(786)
atgctgaaaaaacgccttataccaaagcttcagttctcgattaagccaagttatcgtggcccaaaacctgtcctagtcattacccgtcaatttgactcaaagagggctatcggcgaccctgtctcgcaggccaagatatatgaagctcagctcgccgacgaactcgttcttgtagatttagaaggaacttctgatagctggccaattttacttgacacgctttcgaatatgtctgaatcacttgcaactccactttctgtaggtggtggtataacatctttcgagcaagttcagcaattattagatcgaggagcagataaggttgtcctcaactctggagctgttaataatccccagctaatagaccttgtagctaattcatatggctcccaatgtgtagttattagtattgatattcgcaaggagtctgatctaagtagacacgtatatatagatggtggctctacagctactgattggagtttattttcatgggcaaatgattgcgcttccagaggtgctggtgaactattgattacttctatcgacaacgatggtactggtaccggacttgatttagattctattaggcaactcagatacgaagtcaatttgccacttattgcttctggaggatgtggcttggctcagcattttgttgctggttatgaggtaggagcctctgctgttgcagctggaaccttcttctcgcaacgtgatcagaatcctatgcagtgccgttctcatattcgtaatgcgggccttccaattagactagagcaatga

SEQ ID NO: 10173 - protein, 261 aa, Prochlorococcus marinus
MLKKRLIPKLQFSIKPSYRGPKPVLVITRQFDSKRAIGDPVSQAKIYEAQLADELVLVDLEGTSDSWPILLDTLSNMSESLATPLSVGGGITSFEQVQQLLDRGADKVVLNSGAVNNPQLIDLVANSYGSQCVVISIDIRKESDLSRHVYIDGGSTATDWSLFSWANDCASRGAGELLITSIDNDGTGTGLDLDSIRQLRYEVNLPLIASGGCGLAQHFVAGYEVGASAVAAGTFFSQRDQNPMQCRSHIRNAGLPIRLEQ

SEQ ID NO: 10174 - DNA, 819 bp, Vibrio vulnificus
  CDS (1)..(819)
atgtttcacatgcttaaaataagattaattccatgcatagtcaccaaaggtgaactagtagtgcagagttttgcattcaaaaactacttaccaataggaaatgtaaagacagcgattgatttttttgtgaactgggatgttgatgaaatcattgtaaatgatattgatgcatcgaaagagtttagagagccaaatgtcgatcttgttagctgggcagctaaagagtgttttgtaccgctgactgttggcggtggtatcaagactttggagcatataagaaatctactcaaagctggagcggataaagttaccataaatactaaagctattgatgacccggattttattaaaaatgcagcttcagtttttgggagccaatgcataactgtttcggttgatgcaattaagcagggtaatgtttataaactctatgattatagagatggtcgggttttagatgtagatgttgttgattgggttcgaaaagtagagtcctacggtgctggagaaattctactgaattctgtagatcgcgatggcagcagagaaggctatgacgtagagttattgaaaactgtaagcggtattgtgtccattccggtgattgcactaggagggattggaaggtttgaccagttagctgaaggagctatagaaggtggatgccaagccttatctgcggctaatatttttcagcatatggaacatagtactattgctgcaaaagctcaaatgagaaacgctaaactgaatgtacgacttagttccaaagttaagtatgagaactttgatctagattttcttggccgcccgtattga

SEQ ID NO: 10175 - protein, 272 aa, Vibrio vulnificus
MFHMLKIRLIPCIVTKGELVVQSFAFKNYLPIGNVKTAIDFFVNWDVDEIIVNDIDASKEFREPNVDLVSWAAKECFVPLTVGGGIKTLEHIRNLLKAGADKVTINTKAIDDPDFIKNAASVFGSQCITVSVDAIKQGNVYKLYDYRDGRVLDVDVVDWVRKVESYGAGEILLNSVDRDGSREGYDVELLKTVSGIVSIPVIALGGIGRFDQLAEGAIEGGCQALSAANIFQHMEHSTIAAKAQMRNAKLNVRLSSKVKYENFDLDFLGRPY

SEQ ID NO: 10176 - DNA, 783 bp, Vibrio vulnificus
  CDS (1)..(783)
atgcgagtttatagaatgttacgatctcgagttatccctgttttattaatgcgtgaaaaaggcttggtaaaaacagtaaagtttaaagagggaaaatatgttggcgatcctcttaatgctgtaaaaatatttaatgaacaagaagctgatgagttaacgttactcgatattgatgcatcacgtttaggtcatgagcctgactatgtgttaatagagcgaatagcgtctgagtgtagaatgcctctttgttatggcggtggtattaaaacggttgaacaggctgagagaatattaaagctcggtgttgagaaagtatcattaagttccgcggtgtttgaaaatccaaaaattatcacccaattagctgaaagagttggtcgccaaagtattgttgtttgtttagatgttaagaaaaggctatttggttctaagtttgattgttttactattaatggaacaaaaaaacagtctgttgatactattgaatttgtcaaacaaatacagacattaggcgctggtgagatagttttaaacttcattgataatgacggtgtaatgaaaggatacgatttagacgctgttagtaagtttaaagcgttggtaaaagtaccgttaacagtcgttggtggagctggttgcgtagatgatatagcaaaacttgttcaacaagaaaaattagtaggtgccgccgcaggaagtttatttgtatttaaaggtaaatacaaagcagtgcttattaactatccatcaccaagtgaaaagaaaaaagctttggagttgtaa

SEQ ID NO: 10177 - protein, 260 aa, Vibrio vulnificus
MRVYRMLRSRVIPVLLMREKGLVKTVKFKEGKYVGDPLNAVKIFNEQEADELTLLDIDASRLGHEPDYVLIERIASECRMPLCYGGGIKTVEQAERILKLGVEKVSLSSAVFENPKIITQLAERVGRQSIVVCLDVKKRLFGSKFDCFTINGTKKQSVDTIEFVKQIQTLGAGEIVLNFIDNDGVMKGYDLDAVSKFKALVKVPLTVVGGAGCVDDIAKLVQQEKLVGAAAGSLFVFKGKYKAVLINYPSPSEKKKALEL

SEQ ID NO: 10178 - DNA, 720 bp, Bacillus anthracis
  CDS (1)..(720)
atggaaatcttcccagctatcgatttaaaagaagggcgatgcgtgagactgtatcaaggcgagtttagtaaagaaacagtaatgaatgaggacccggttgcgcaagcgattatatttgaaaaatttggggcgaaaaggttgcacattgttgatttagatggagcagttgctggcgagtcattaaacttgtccgtcattgaaaggatttgcaaggcagtacgtattcctgtgcaagttggaggaggaattcgatcacttgtagcggtagagaagttattttcagtaggggtagataaagtgattttaggaacagctgctctttatgataagacatttttagaagaagcagttcttctatataaagaaaaaatcatcgttggaattgatgcgaaaaatggtttcgtagcaacgagaggttggcttgatgtgtctgaaatttcttacattgatttagcaaagcaaatggagaagataggtgttcaaacgattgtatttacagacatttcgaaagacgggacacttgcagggccgaatatagagcaattggagttactacaaaaaagcgttgctattcgtcttattgcttctggaggagttgcatctatacaagatgtgaaaaagttaaatgatatgaacatatacggcgtcataattggtaaggctctttacgagaaaacgattgatttagaagaagtggtagaggtaacaaagttatgttag

SEQ ID NO: 10179 - protein, 239 aa, Bacillus anthracis
MEIFPAIDLKEGRCVRLYQGEFSKETVMNEDPVAQAIIFEKFGAKRLHIVDLDGAVAGESLNLSVIERICKAVRIPVQVGGGIRSLVAVEKLFSVGVDKVILGTAALYDKTFLEEAVLLYKEKIIVGIDAKNGFVATRGWLDVSEISYIDLAKQMEKIGVQTIVFTDISKDGTLAGPNIEQLELLQKSVAIRLIASGGVASIQDVKKLNDMNIYGVIIGKALYEKTIDLEEVVEVTKLC

SEQ ID NO: 10180 - DNA, 783 bp, Chlorobium tepidum
  CDS (1)..(783)
atgctgattataccggctatagatattaaagaaggaaagtgcgtcaggctgacccgcggggacttcgctcagaagaaaatctatcttgacaatccgtgcgacatggcggtcatctggcggaagcagaacgccaagatgatccatgtggtcgatctcgacgcagccctgactggtgagacggtcaacttcgagaggattcgcgagatcgtcaatgtgctcgatattccgatccaggtcggcggtggcatccgctctgtcgaggcggttgaaaagtaccttgacattggcgtcagccgtgtggttattggctctgcggcggttaccaatcccggcctcatcgccgatctcctgaagaaatatcgtccttcgcagatcgtcgtcggcatcgatgccgagcacggcgtgcccaaaatcaaggggtggaccgagagcagcaatatgcaggattacgagcttgctggcgaaatgaagaagctcggcgtcgagcgcatcatttacaccgacatcacccgtgacggcatgttgcagggggtcggctacgaaaccaccaaacgctttgccgagaaggcgggcatgaaggtgaccgcgtctggtggcgcgaccacttccgatgacctgcacaagctccgctcgctcgaaaagtacggcgtcgattcggtcattatcggcaaggcgctttacgagtgcaattttccgtgccaggagctgtggtacgcctacgagcaggggcttggcatcgacggcgaattttccacggcccgcaagaaggagtgctgctcctga

SEQ ID NO: 10181 - protein, 260 aa, Chlorobium tepidum
MLIIPAIDIKEGKCVRLTRGDFAQKKIYLDNPCDMAVIWRKQNAKMIHVVDLDAALTGETVNFERIREIVNVLDIPIQVGGGIRSVEAVEKYLDIGVSRVVIGSAAVTNPGLIADLLKKYRPSQIVVGIDAEHGVPKIKGWTESSNMQDYELAGEMKKLGVERIIYTDITRDGMLQGVGYETTKRFAEKAGMKVTASGGATTSDDLHKLRSLEKYGVDSVIIGKALYECNFPCQELWYAYEQGLGIDGEFSTARKKECCS

SEQ ID NO: 10182 - DNA, 741 bp, Corynebacterium glutamicum
  CDS (1)..(741)
atgaccttcactattcttcctgcagtcgatgtagttaacggacaagcagttcgcctagatcagggcgaggccggcactgaaaagtcttatggcacccctttggaatccgcactgaagtggcaggagcagggtgcaaagtggttgcactttgtggacctggacgcagcgttcaaccgtggttccaaccatgagatgatggcggaaattgtcggcaagctcgatgttgatgtggagctcactggcggtatccgtgatgatgagtctctggagcgcgcgctggcaaccggtgcacgtcgtgtaaacattggtaccgctgctctggagaagccagagtggattgcttctgcgattcaacgctatggcgagaagattgctgtcgatatcgctgtgcgtttggaagatggtgaatggcgcacccgtggaaacggttgggtctccgatggtggcgatctgtgggaagttctcgagcgtttggattcccaaggttgtgcacgtttcgtggttaccgatgtgtccaaggacggcaccttgagtggtccaaatgttgagctgctgcgtgaggttgctgcagctacagacgcacctatcgtggcatctggtggaatttctgttttggaagatgttttggaactagccaagtaccaggatgagggcattgattccgtcatcattggcaaggcactttatgagcacaagttcaccctcgaagaggctttggctgcagtagaaaagctcggttaa

SEQ ID NO: 10183 - protein, 246 aa, Corynebacterium glutamicum
MTFTILPAVDVVNGQAVRLDQGEAGTEKSYGTPLESALKWQEQGAKWLHFVDLDAAFNRGSNHEMMAEIVGKLDVDVELTGGIRDDESLERALATGARRVNIGTAALEKPEWIASAIQRYGEKIAVDIAVRLEDGEWRTRGNGWVSDGGDLWEVLERLDSQGCARFVVTDVSKDGTLSGPNVELLREVAAATDAPIVASGGISVLEDVLELAKYQDEGIDSVIIGKALYEHKFTLEEALAAVEKLG

SEQ ID NO: 10184 - DNA, 735 bp, Geobacter sulfurreducens
  CDS (1)..(735)
atgatcgtcatacctgccattgacctgaaagaaggaaagtgcgtccgcctcgaacaggggctcatggaaaaggataccgttttctgtgacaatcccgccgaccaggccagggagtgggagcgccagggggcggagctgctccacattgtcgacctggacggcgcctttgccggcgaacccaagaaccgcgcctccatcgaggccatcgtcaaggccattgccatcccaacccagctggggggcggcatccgggacattcccaccatcgaggcgtatctctccctcggcattggccgggtgatcctcggtactgcggcccagcggaaccccgaactggtggaggaggcctgccgcctcttccccggccggatcgtggtggggatcgacgcaaagaacggcatggtggcggtccaggggtgggccgaggtcaccggcgtcacggcggtggatctggcaaaacggttcgagggatacggcgtcgccgccatcatttacaccgacatcgcccgggacggcatgatgcaggggccgaacattgaagcgaccagggctctggccgaggcgatctcgatcccggtcatcgcctccggaggggtgtcgtccctgaaggatatcgagaaccttatggccattgagacgagcggcatcgccggcgccatcaccggcaaggcggtctacaccggggccatcaatctggctgaagcggtagcactcacgaagcggggaggggcctga

SEQ ID NO: 10185 - protein, 244 aa, Geobacter sulfurreducens
MIVIPAIDLKEGKCVRLEQGLMEKDTVFCDNPADQAREWERQGAELLHIVDLDGAFAGEPKNRASIEAIVKAIAIPTQLGGGIRDIPTIEAYLSLGIGRVILGTAAQRNPELVEEACRLFPGRIVVGIDAKNGMVAVQGWAEVTGVTAVDLAKRFEGYGVAAIIYTDIARDGMMQGPNIEATRALAEAISIPVIASGGVSSLKDIENLMAIETSGIAGAITGKAVYTGAINLAEAVALTKRGGA

SEQ ID NO: 10186 - DNA, 768 bp, Gloeobacter violaceus
  CDS (1)..(768)
atggatattattcctgcgattgacatactcgacggccgctgcgtgcgcctctaccagggcaactaccagcttgctgagacctacggggaggacccggtggccgttgcctgcaactgggcgaaactgggggcgccgcggctgcacgtggtcgacctggacggtgcgcgccaggggatgcccgtgcacctcgacgccctcgaagcgatcgtcacccaggtgccctgcccggtacagttcgggggtggcctgcgcagcatcgaggcggtcagtgccgtgctcgatcgcggtgtggaccgggtgatcctgggcaccgccgcggtcgaaaatccggcgcttatccgcgagtgctgcgagcgcttcggcggcagaatcgccgtcggcctcgacgcgcgcggcgggcaggtggcggtgcgcggctggcgggaaacctcggaagtggaggtgaccgaactggccggcgagatggaaaagctcggcgtcagcgccatcgtctacaccgacatcctcaaagacggtaccctcaccggtccgaacctggtggagctgcagcggctcaccgacgcggtcaaagtgccgatcatcgcctccggcggcgtgggcaccctggcggatgtgctctacctgctggcgctggagccgcgcggattgcaaggagtgattatcggccgggccctctacacgggcgatgtcgatctggccgaggcgctcagggcggccgggccgagccgctggcaggatcttcccccggacgatgtggccttcgcctga

SEQ ID NO: 10187 - protein, 255 aa, Gloeobacter violaceus
MDIIPAIDILDGRCVRLYQGNYQLAETYGEDPVAVACNWAKLGAPRLHVVDLDGARQGMPVHLDALEAIVTQVPCPVQFGGGLRSIEAVSAVLDRGVDRVILGTAAVENPALIRECCERFGGRIAVGLDARGGQVAVRGWRETSEVEVTELAGEMEKLGVSAIVYTDILKDGTLTGPNLVELQRLTDAVKVPIIASGGVGTLADVLYLLALEPRGLQGVIIGRALYTGDVDLAEALRAAGPSRWQDLPPDDVAFA

SEQ ID NO: 10188 - DNA, 738 bp, Methanosarcina acetivorans
  CDS (1)..(738)
atggcttttgaagtgattcctgcagtggacatgaggggaggaaaatgcgttcagctggtgcagggtgtgcctggcagtgagatcgtgtcccttaatgaccctcttgcagttgcccttgactggataggaaaaggagcgaagacccttcatctggtagaccttgacggagcgattgaaggggaaagaaaaaatgcccctattattgaaaagatagtccaggcgtgcagggagaaaggtgtgagtatccaggttggaggaggaatccggagctttgaagatgcggcttccctgcttgagcttggggtttcaagaataattctcggaactgctgccctccagaaccccgaacttgtaaaacagctttccgatgcctttggaagctcgtgtgtaaatgttgcactggatgcaaagaacgggaaaatctcgatcaaaggctggaccgaggagtgcgcgcaaacccctgtcgaaatgggcagagagtttgaagagcttggagccggaagccttcttttcacgaatatcgacaccgaaggactaatgcagggagtaaaccctggcccgacaagggaacttgtggaatcggtcagcatccctgtaattgcatccggaggggtaagttccctcgaagacctgaaggttttaaagcagaccggagcctcaggagttgtggtaggcagtgccctctacacaggcaggtttacccttgaggcagctatcgaaactattcgaaatgattga

SEQ ID NO: 10189 - protein, 245 aa, Methanosarcina acetivorans
MAFEVIPAVDMRGGKCVQLVQGVPGSEIVSLNDPLAVALDWIGKGAKTLHLVDLDGAIEGERKNAPIIEKIVQACREKGVSIQVGGGIRSFEDAASLLELGVSRIILGTAALQNPELVKQLSDAFGSSCVNVALDAKNGKISIKGWTEECAQTPVEMGREFEELGAGSLLFTNIDTEGLMQGVNPGPTRELVESVSIPVIASGGVSSLEDLKVLKQTGASGVVVGSALYTGRFTLEAAIETIRND

SEQ ID NO: 10190 - DNA, 726 bp, Methanococcus maripaludis
  CDS (1)..(726)
atgctagttattcctgcagttgatatgaaaaataaaaaatgtgtacagcttatccagggaaatcctgataaaaaacacgttgaattagataatcctcctgaaattgcaaaaaaatgggtaaatgaaggtgcagaaatgcttcacctcgtggaccttgatggtgcacttgacggaaaacgggtaaacgatgaatttatcgaagaaataattaaaaaatctggggtacctgttcaaattggtggcggaattcgatcaatcgaagatgcagaatacctcgttgaaaaaggggctaaaaaagtaattattggaactattgctgtagaaaatccagaaataataaaagaactttctaaacgtatcggcagtgaaaaaataatggtttcacttgatgcaaaagacggcaaagttgtaataaaaggctggaaagaaaaaacaaaatacactcctgttcaaattggaaaaatactcgaagaaatgggcgctggaagtattttatttacaaatgtagatagtgaaggtcttttgaatggaataaatatcgaaccaacaaaagaacttgtcgacaacttgaaaatacctattgtagcatcaggcggcgttacaacaatcgatgatcttttaaaattaaaagaaatcggggtatatggggtagttgtaggttctgcaatttacaaaaatatgataaatttaaaagatgcgattgaagcagtaaataaaagtaattaa

SEQ ID NO: 10191 - protein, 241 aa, Methanococcus maripaludis
MLVIPAVDMKNKKCVQLIQGNPDKKHVELDNPPEIAKKWVNEGAEMLHLVDLDGALDGKRVNDEFIEEIIKKSGVPVQIGGGIRSIEDAEYLVEKGAKKVIIGTIAVENPEIIKELSKRIGSEKIMVSLDAKDGKVVIKGWKEKTKYTPVQIGKILEEMGAGSILFTNVDSEGLLNGINIEPTKELVDNLKIPIVASGGVTTIDDLLKLKEIGVYGVVVGSAIYKNMINLKDAIEAVNKSN

SEQ ID NO: 10192 - DNA, 720 bp, Methanobacterium thermoautotrophicum
  CDS (1)..(720)
atgcttataataccggccgtggatataaaggatggaaaatgtgttcagcttgttcagggaaaacccggtacggagcaggtcgtgcttgatgatcctgccggagttgctggaaggtgggaatccctgggggctgaaacaatccatgttgtggaccttgatggggcccttggtcttgagaagaatacaggtatactgaaggagatcacagagagagtttcagtgcccctccagataggtggaggtataaggagtagagaatatgcagggaaactccttgatatgggctttgagagggttatactgggcaccatggccatagaaaatccggccatcgttgaggaacttgcaggtgaatacggatcggaacgcataatggtctcacttgatagcagggactcacgggttgttataaggggatggacagagaaggtccccttcacagcagaggagatggccaggaaattccaggagaggggagctggtagcatactctttaccaacgtggacttcgagggtcttctctcaggatttgacctgaaacccgtgagtgaacttgtggaggcagttgagatacctgtaatctactccgggggtgttagcagcctaaatgacctgaggatgctgcaggggaccggtgtaatgggggtcgttataggatcagccatctacaggggcctcatagacctcaccgaggccctcaaatatcaggaccttaaatga

SEQ ID NO: 10193 - protein, 239 aa, Methanobacterium thermoautotrophicum
MLIIPAVDIKDGKCVQLVQGKPGTEQVVLDDPAGVAGRWESLGAETIHVVDLDGALGLEKNTGILKEITERVSVPLQIGGGIRSREYAGKLLDMGFERVILGTMAIENPAIVEELAGEYGSERIMVSLDSRDSRVVIRGWTEKVPFTAEEMARKFQERGAGSILFTNVDFEGLLSGFDLKPVSELVEAVEIPVIYSGGVSSLNDLRMLQGTGVMGVVIGSAIYRGLIDLTEALKYQDLK

SEQ ID NO: 10194 - DNA, 748 bp, Methanococcus thermolithotrophicus
  CDS (22)..(738)
gtataatacctaggtgaaagaatgatcgttattccggcagttgatatgaaaaacggaaaatgtgtccagttaattcaaggtgatcccaataaaaagcatgttgaattggagaatccagttgaagttgcagaaaaatgggtgagcgaaggggcagaaatgcttcacttagttgatttagatggtgcaattgaaggagaaagcgttaatagagaactaataaaggaaataatccaaactgtaaatgtgccagttcagattggtggaggaatcagtgtaagatgcactgaatctaatctaatcgagataggggctaaaagaataattttaggcaccgttgcagttgaaaatccagatattgttgaagaaatatcaaaaaaggtaggtaaagaaaaggtaatggtggcgttagatgcaaaagatggcaaagttgtcataaaaggttggaaagaaaaaacaaaatatactcctgttgaaatgggaaagatattggaggaaaaaggtgcaggaagtatcttgtttacaaatgtcaatgtagaaggactattaactggaatgaatgtggagccagttgaaacgttggtggaagagttggaaataccagttattgcatcaggtggtgtgactacaattgaagacctgattaaactaaaagcagtcggtgttgaaggggtagttgtgggttctgcaatttataaaaaccttatagacttgaaagaagctattaaagcctgtaggtgatagaatggaa

SEQ ID NO: 10195 - protein, 238 aa, Methanococcus thermolithotrophicus
MIVIPAVDMKNGKCVQLIQGDPNKKHVELENPVEVAEKWVSEGAEMLHLVDLDGAIEGESVNRELIKEIIQTVNVPVQIGGGISVRCTESNLIEIGAKRIILGTVAVENPDIVEEISKKVGKEKVMVALDAKDGKVVIKGWKEKTKYTPVEMGKILEEKGAGSILFTNVNVEGLLTGMNVEPVETLVEELEIPVIASGGVTTIEDLIKLKAVGVEGVVVGSAIYKNLIDLKEAIKACR

SEQ ID NO: 10196 - DNA, 768 bp, Prochlorococcus marinus subsp
  CDS (1)..(768)
atgaaactaattccagccatagatttaatgaatggtaaatgtgtaagactttttaaaggtgactttaacaagaaaaaagacttctccagagaaccttatgagcaagcaaaatactgggagaatgagggagcaaaatgtattcatattgttgatctggatgctgctaagaccggtattccaacaaatgatcaatcaattcaaaagattgtcaaatcagttaatattcctattcaaattggaggaggtataagatcgctagaaaggattaaacaattattttcttacggcgtggataaggttattatgggaacttccgctatagaaaataaagaactagttaaaagcttatcaaccaaattcccaagcagaattattattggaatagatgcaaaggagggaaaagtaagcacaaggggatggctaaaacaatcagatgtattagccacagaattagtacaagaattttcctcttttaaaattgccagttttattgttacagatattaataccgatggaactctagaagggactaatgaagtttttataaaaaagattcttgaaattactgatattcctgttattgcatcaggcggtgtaggttcaatttcagacttgttatcattaactaaatttgaagattctggactatatggagtaatagtaggaaaagctctttatgaaaataaatttacaataagtgaagcaagtaatattttatctacagaaagaataaatgatattccaattaataaagactattacgcctga

SEQ ID NO: 10197 - protein, 255 aa, Prochlorococcus marinus subsp
MKLIPAIDLMNGKCVRLFKGDFNKKKDFSREPYEQAKYWENEGAKCIHIVDLDAAKTGIPTNDQSIQKIVKSVNIPIQIGGGIRSLERIKQLFSYGVDKVIMGTSAIENKELVKSLSTKFPSRIIIGIDAKEGKVSTRGWLKQSDVLATELVQEFSSFKIASFIVTDINTDGTLEGTNEVFIKKILEITDIPVIASGGVGSISDLLSLTKFEDSGLYGVIVGKALYENKFTISEASNILSTERINDIPINKDYYA

SEQ ID NO: 10198 - DNA, 738 bp, Pseudomonas putida
  CDS (1)..(738)
atgctgattatccccgctatcgatctgaaggacggtgcttgcgtgcgcctgcgccagggccgcatggaagactctacggtattttccgacgacccggtgagcatggccgccaagtgggtcgagggtggctgccgccgcctgcacctggtcgacctcaacggcgccttcgaaggccagccggtcaatggtgaagtggttaccgccatcgccaagcgctacccgaacctgccgatccagatcggcggcggtatccgttcgctggaaaccatcgaacactacgtcaaggctggcgtcagctacgtgatcatcggcaccaaggccgtcaagcagcccgagttcgtcgctgaagcgtgcaaagccttcccgggcaaggtcatcgtcggcctggacgccaaggacggtttcgtcgccaccgacggttgggccgaagtgagctcggtgcaggtcatcgacctggccaagcgtttcgaggccgatggcgtctcggcgatcgtctacaccgacattgccaaggacggcatgatgcagggctgcaacgtgcccttcaccaaggcactggctgaagccacccgtatcccggtgatcgcctcgggcggcattcacaacctgggtgacatcaaggccctgctggacgccaaggccccgggcatcatcggcgccatcaccggccgtgccatctacgaaggcaccctggatgtcgctgaggcccaggccttctgtgacaactaccaaggctga

SEQ ID NO: 10199 - protein, 245 aa, Pseudomonas putida
MLIIPAIDLKDGACVRLRQGRMEDSTVFSDDPVSMAAKWVEGGCRRLHLVDLNGAFEGQPVNGEVVTAIAKRYPNLPIQIGGGIRSLETIEHYVKAGVSYVIIGTKAVKQPEFVAEACKAFPGKVIVGLDAKDGFVATDGWAEVSSVQVIDLAKRFEADGVSAIVYTDIAKDGMMQGCNVPFTKALAEATRIPVIASGGIHNLGDIKALLDAKAPGIIGAITGRAIYEGTLDVAEAQAFCDNYQG

SEQ ID NO: 10200 - DNA, 720 bp, Streptococcus mutans
  CDS (1)..(720)
atgcaaattcttccagctatcgatattaaaaacggtcatgctgtccgccttgtcaagggggattttgagcaagagacggttgttaatgataatgttctcgaccaagctagtattttcatggaagcaggtatccaatacatccatgttgtcgatttggatggtgcacttgaaggtcgggctgctaatcgtgatttaattgctaagattaaagaaatgacaggcttggctattgaagtcggcggtggtattcgcaccattgaacaaattgaagattatttatctgtcggtattaatcgtgtgattattggttctatggcagttaagcatccccaatttgtcaaggaagctctggataaatttggcagcgataaaattgttgttggtattgatgctaaaaatgggatggtagctacagaaggttggctggagactagcaccgttgattacatcagcctagctttagagatggaaaagatgggtgtcagactccttatctataccgatgttgaccgtgatggcacattgacaggccccaattttgagcattatgagaaactaattgctcacttgacaagtgccaaggttattgcctcaggtggtatccatgccctgtcagatttgcaacaattagaaaagattggtgttgccggaaccattgtcggcaaagcttattataatggcgatattagtctaaaagaattaagagaatttgagggttag

SEQ ID NO: 10201 - protein, 239 aa, Streptococcus mutans
MQILPAIDIKNGHAVRLVKGDFEQETVVNDNVLDQASIFMEAGIQYIHVVDLDGALEGRAANRDLIAKIKEMTGLAIEVGGGIRTIEQIEDYLSVGINRVIIGSMAVKHPQFVKEALDKFGSDKIVVGIDAKNGMVATEGWLETSTVDYISLALEMEKMGVRLLIYTDVDRDGTLTGPNFEHYEKLIAHLTSAKVIASGGIHALSDLQQLEKIGVAGTIVGKAYYNGDISLKELREFEG

SEQ ID NO: 10202 - DNA, 765 bp, Synechococcus sp
  CDS (1)..(765)
atggacgtaatcccagccattgacctcctcggagggcagtgcgtacgccttttccaaggggattacgatcaggcggaagtctacggcaaagatcccgtgggaatggccttgcgctgggccgaagccggagcccagcgtctgcacttggtcgacctagatggtgccaaggagggttcacctgtcaatgcggaggcgatcgcaacgatcgcgcaacggctctcaattccggttcaagtggggggcggcctgcgcgatcgcgacaccgtggctcgcctgcttgacagcggggttgaacgggccattctcgggactgtggcggtcgaaaggccagcgctcgttgaagccttagctggggaatttccgggtcagattgccgtggggatcgatgcccgcagcggcaaagtcgccacaggggctgctggaagattctggctcacagccgttgcactgcacagcagatggcagacttggcgcttgcgcactgatctgcaccgacattgggcgagatggcacgcttcaggtccgaacctggaggaattgcgggcgatcgcggctgcagtctccattccggtcattgcgtcgggtggtgtcggatcgctaactgatctcctcagcttgctgcccctcgaggcccaaggggtgagcggcgtgatcgttggcaaagctttttataccggtgccgtcgatctccaagaggccctacgggcgatcggttcaggacgctggcaagatgtggccgtggatgattcctcccgcttggcttaa

SEQ ID NO: 10203 - protein, 254 aa, Synechococcus sp
MDVIPAIDLLGGQCVRLFQGDYDQAEVYGKDPVGMALRWAEAGAQRLHLVDLDGAKEGSPVNAEAIATIAQRLSIPVQVGGGLRDRDTVARLLDSGVERAILGTVAVERPALVEALAGEFPGQIAVGIDARSGKVATGAAGRFWLTAVALHSRWQTWRLRTDLHRHWARWHASGPNLEELRAIAAAVSIPVIASGGVGSLTDLLSLLPLEAQGVSGVIVGKAFYTGAVDLQEALRAIGSGRWQDVAVDDSSRLA

SEQ ID NO: 10204 - DNA, 768 bp, Synechococcus sp
  CDS (1)..(768)
atggagatccttcccgctattgatctgctggacggagcctgcgtgcgcctgcacaagggggattacgagcaggtcacccgctttagcgatgaccctgtcgctcaggccctcagttggcagcagcagggcgcaacccgactgcacctagtggatctcgatggtgccaagcggggagaaccggtgaatgattccgccgtccaggcgatcacatcagccctggatatcccggtgcagctcggtggcggcgtccgctccctggaacgggctgagcagttgctcgcctgcggtcttgatcgcgtgatcctcggcaccgtggcgatcgagcagcccgacctggttcgatccctcgccgagcggtaccccggtcggatcgtggtgggaatcgatgccaaggacgggcgggtggccacccgcggctggatcgagcagagcgatgtcctggcgacggacctggccagaaccttcagcagctctgggattgccgcgatcatcaccaccgatatcgccaccgatggcaccctggccgggccgaacctcgaggctctcaggaccatggcggcgagcagcagcgttccggtgatcgcctccggcggcattggctgcatggcggatctgctgtctctcctgcccctggaaccactcggtgtgagtggtgtgatcgtcggtcgtgccctgtacgacggtcgtgttgatctggcggaagcggtgcgggcgctggcggagccgaggctgcaggacatcacagctgttgcagcggacctggcttga

SEQ ID NO: 10205 - protein, 255 aa, Synechococcus sp
MEILPAIDLLDGACVRLHKGDYEQVTRFSDDPVAQALSWQQQGATRLHLVDLDGAKRGEPVNDSAVQAITSALDIPVQLGGGVRSLERAEQLLACGLDRVILGTVAIEQPDLVRSLAERYPGRIVVGIDAKDGRVATRGWIEQSDVLATDLARTFSSSGIAAIITTDIATDGTLAGPNLEALRTMAASSSVPVIASGGIGCMADLLSLLPLEPLGVSGVIVGRALYDGRVDLAEAVRALAEPRLQDITAVAADLA

SEQ ID NO: 10206 - DNA, 1662 bp, Emericella nidulans
  CDS (1)..(1662)
atgcccactgttcatctgcttgattatgtcgctggaaatgtgcgttccttggtgaatgccatcaacaaggttggatatgaagttgagtgggtgagatcgcccagcgatttgaaagatgtcgagaagctcatacttccaggagtcggccacttcggccattgcctttctcagctttcaagcggtggctatttgcagccgataagagagcatattgcttccgggaaaccgtttatgggaatatgtgttggtttacaatcccttttcgagagttccgaggaggatcccaacattcctggtttgggtacaatcccagcgcggttgcgcaaatttgacgcaaaaacgaagagcgtacctcatatcggttggaactcggcaacagatacccgcattgactcgactggaggccagaccttctatggattgagcccaagcagcaagtactactacgtacactcatacgccgcgccatatgagccgggaattcttgagaaagatggttggttggtcgccacggcgagttatggggaggagaaattcatcggcgcgatagcacgagataacatctttgcgacacaattccatcccgagaagagcggccaagcaggcctacgcacccttcgcgctttcttggacggagctcagctccattctgtcacattagaagactcgattttgacaggagagaaaaacggtcttacccgtaggatcatcgcctgtcttgatgttcgtacgaatgatgtcggcgatctcgttgtgactaagggcgatcaatatgatgttcgcgagaaggatggtgcggatgctggagggcaagtgaggaacctgggaaagccggttgatatggctaagaaatattacgaacagggggcagatgaggtgacgtttttaaacatcacctctttcagaaactgtccgttagccgacctccctatgctcgagattctccgaagaacgtcggagaccgtcttcgtacctttgactattggtggcggcattagggacactgtggatacagacggtactcacatcccagctctagacgtggcatcgatgtacttcaaatctggggctgacaaagtcagcattggttcggatgccgttgttgctgcggaagattattacgcagctggcaaagttctgtctggcaaaactgccattgaaactatttctaaggcgtatggaaaccaggctgtcgttgtaagcgttgacccgaagcgcgtttatgtcagccaaccagaagacacgaaacaccgtacgatagaaacgaaatttcctaacgccgccgggcaaaatttctgttggtaccagtgtactataaagggtggcagagagaccagagacttagatgtctgccagctggtgcaagccgtcgaggcaatgggtgctggggagattctgctgaattgcattgataaagacgggagcaacagtggtttcgatcttgaactgatcaaccacgtcaaagctgcagtaaaaatacccgtgattgcctctagcggagctggtatgccgaagcattttgaggaagtttttgatcaaacgacgacagatgctgctctgggtgctgggatgttccatcgtggtgagtatactgttggtgaagtcaagcaataccttgaggatagaggtttccttgttcgacgattcgagcctgatgtctga

SEQ ID NO: 10207 - protein, 553 aa, Emericella nidulans
MPTVHLLDYVAGNVRSLVNAINKVGYEVEWVRSPSDLKDVEKLILPGVGHFGHCLSQLSSGGYLQPIREHIASGKPFMGICVGLQSLFESSEEDPNIPGLGTIPARLRKFDAKTKSVPHIGWNSATDTRIDSTGGQTFYGLSPSSKYYYVHSYAAPYEPGILEKDGWLVATASYGEEKFIGAIARDNIFATQFHPEKSGQAGLRTLRAFLDGAQLHSVTLEDSILTGEKNGLTRRIIACLDVRTNDVGDLVVTKGDQYDVREKDGADAGGQVRNLGKPVDMAKKYYEQGADEVTFLNITSFRNCPLADLPMLEILRRTSETVFVPLTIGGGIRDTVDTDGTHIPALDVASMYFKSGADKVSIGSDAVVAAEDYYAAGKVLSGKTAIETISKAYGNQAVVVSVDPKRVYVSQPEDTKHRTIETKFPNAAGQNFCWYQCTIKGGRETRDLDVCQLVQAVEAMGAGEILLNCIDKDGSNSGFDLELINHVKAAVKIPVIASSGAGMPKHFEEVFDQTTTDAALGAGMFHRGEYTVGEVKQYLEDRGFLVRRFEPDV

SEQ ID NO: 10208 - DNA, 759 bp, Bacillus anthracis
  CDS (1)..(759)
atgttagcgaaacgcattattccatgtctagatgtgaaagaagggcgagtcgtaaagggggtaaattttatagggttacaagatgtcggtgatcctgttgaaatagcagctttatataatgatgcgggagcagatgaaatagtatttttagatattacggcaacgcatgaaggacgaaaaacaattatagatgttgtagaaaaaacggcttcaaaagtatttattcctcttacagttggcggaggaatttcaagtgtgaaagatatgtacaatttactaagagcgggagcagataaagtttcaattaactcagcagcagtgcgaaatccaaaattaatcgaagaaggggcacagcactttggttcacaatgtattgtcgtagcaattgatgctagaaaagtagcagaaggtaagtggaatgtatatgtgaacggcggaagagttgatacgggaatggatgcaattgggtgggcaaagcgcgttgttatgcttggtgccggcgaaattttgttaacgagtatggatgcagatggaacgaaaaacggatatgaccttcgtttaacagaagaaatttcaaaaagtgtttccataccagtcattgcgtcgggtggatgtggtcatgctgatcacattatagaagtgtttcaaaagacaacagtagatgcagcgttagcggcatcaatctttcattacggtgaggcgacaataggggacgtaaagagaaaattaagaaatgcaaacgtcgaggtgcggttatga

SEQ ID NO: 10209 - protein, 252 aa, Bacillus anthracis
MLAKRIIPCLDVKEGRVVKGVNFIGLQDVGDPVEIAALYNDAGADEIVFLDITATHEGRKTIIDVVEKTASKVFIPLTVGGGISSVKDMYNLLRAGADKVSINSAAVRNPKLIEEGAQHFGSQCIVVAIDARKVAEGKWNVYVNGGRVDTGMDAIGWAKRVVMLGAGEILLTSMDADGTKNGYDLRLTEEISKSVSIPVIASGGCGHADHIIEVFQKTTVDAALAASIFHYGEATIGDVKRKLRNANVEVRL

SEQ ID NO: 10210 - DNA, 759 bp, Bacillus cereus
  CDS (1)..(759)
atgttagcaaaacgcgttattccatgtctagatgtgaaagaagggcgagtcgtaaagggtgtaaattttataggactacaagatgtcggggatcctgttgaaatagcagctttatataatgatgcgggagcagatgaaatagtatttttagatattacggcaactcatgaaggacgaaaaacgattgtagatgttgtagaaaaaacggcttcaaaagtatttattcctcttacagttggcggaggaatttcaaatgtgaaagatatgtacaatttactaagagctggagcagataaagtttcaattaactcagcagcagtgcgaaatccaaaattaatcggagaaggggcagagcattttggctcacaatgtattgtcgtcgcaattgatgctagaaaagtagcagaagataagtggaatgtatatgtgaacggcggaagagttgatacgggaatggatgcaatcaggtgggcaaagcgcgttacagagctaggcgcaggcgaaattttattaacgagtatggatgcagacggaacgaaaaacggatatgaccttcgtttaacagaagaaatttcaaaaagtgtttccgtacctgtcatcgcgtcaggcgggtgcggtcatgctgatcacattatagaagtgtttcaaaagacagcagttgatgcagcattagcggcatcaatctttcattacggtgaggcgacaataggggacgtaaagagaaagttaagaaatgcaaatgttgaggtgcggctatga

SEQ ID NO: 10211 - protein, 252 aa, Bacillus cereus
MLAKRVIPCLDVKEGRVVKGVNFIGLQDVGDPVEIAALYNDAGADEIVFLDITATHEGRKTIVDVVEKTASKVFIPLTVGGGISNVKDMYNLLRAGADKVSINSAAVRNPKLIGEGAEHFGSQCIVVAIDARKVAEDKWNVYVNGGRVDTGMDAIRWAKRVTELGAGEILLTSMDADGTKNGYDLRLTEEISKSVSVPVIASGGCGHADHIIEVFQKTAVDAALAASIFHYGEATIGDVKRKLRNANVEVRL

SEQ ID NO: 10212 - DNA, 759 bp, Bacillus cereus
  CDS (1)..(759)
atgttagcgaaacgaattattccatgtctagatgtgaaagaagggcgagtcgtaaagggtgtaaattttataggattacaagatgtcggtgatccggttgaaatagctgaagcatataacgaggcaggggcagatgaaatcgtatttttagatattacggcgactcatgaaggaagaaaaacgattatagatgttgtagaaaaaacagcagcaaaagtatttattcctcttacggttggcggggggatatcaagtgtgaaagatatgtacaatttactaagagctggggcagacaaagtttcaataaactcagcggcagtgcgaaacccgaagttaatagaagaaggggcagaacactttggatcacaatgtattgtcgtggcaattgatgctagaaaagtagcagaaggtaaatggaacgtatatgtcaacggcggaagagttgacacaggaatggatgccatagaatgggcgaagcgtgttgttaaacttggggcaggtgaaattttgttaacgagtatggatgcagatggaacgaaaagcggatatgaccttcgtttaacagaagaaatttcaaaaagtgtttctattccagtcatcgcatcaggaggctgtggtcatacggatcatattatagaagtttttcaaaagacaacggttgatgcagcgttagcggcatccatctttcattatggtgaggcgacagtgcagagtgtaaagcgaaaattaagagatgcaaatattgaggtgcggttatga

SEQ ID NO: 10213 - protein, 252 aa, Bacillus cereus
MLAKRIIPCLDVKEGRVVKGVNFIGLQDVGDPVEIAEAYNEAGADEIVFLDITATHEGRKTIIDVVEKTAAKVFIPLTVGGGISSVKDMYNLLRAGADKVSINSAAVRNPKLIEEGAEHFGSQCIVVAIDARKVAEGKWNVYVNGGRVDTGMDAIEWAKRVVKLGAGEILLTSMDADGTKSGYDLRLTEEISKSVSIPVIASGGCGHTDHIIEVFQKTTVDAALAASIFHYGEATVQSVKRKLRDANIEVRL

SEQ ID NO: 10214 - DNA, 756 bp, Bacteroides thetaiotaomicron
  CDS (1)..(756)
atgttagcaaaaagaatcataccctgtctggatataaaagacggacagaccgtaaaaggaacgaactttgtcaatttgcgccaggccggtgatccggtagaactggggcgggcttacagcgaacaaggagcagatgaacttgtttttttggatattactgcaagtcacgaaggacgtaagactttcacggaactggtaaagcggattgctgccaatatcaatatcccgtttaccgtgggcggtggcatcaatgaattgagcgatgtagatcgcttgctgaatgccggagcggataagatctcaatcaattcttccgccattcgcaaccctcagctgattgatgatatagccaagaacttcggctctcaggtttgcgttctggcggtagatgccaagcaaacagaaaacggctggaagtgttatctgaacggcgggcgtatcgaaaccgataaagaattgctggcatggactaaagaggctcaggagcgtggagcaggcgaaatcctgtttacgagcatgaaccatgatggggtgaagaccggttatgcgaacgaggcgcttgcttccttggccgatcaactctctattcccgtgatcgcttcgggcggggcagggctgaaagaacacttccgtgatgcttttttagtaggaaaagcagatgcggcgttggctgccagcgtttttcatttcggagaaattaaaattcccgaattaaaatcgtatctttgcggcgaaggaataaccatcagagggtga

SEQ ID NO: 10215 - protein, 251 aa, Bacteroides thetaiotaomicron
MLAKRIIPCLDIKDGQTVKGTNFVNLRQAGDPVELGRAYSEQGADELVFLDITASHEGRKTFTELVKRIAANINIPFTVGGGINELSDVDRLLNAGADKISINSSAIRNPQLIDDIAKNFGSQVCVLAVDAKQTENGWKCYLNGGRIETDKELLAWTKEAQERGAGEILFTSMNHDGVKTGYANEALASLADQLSIPVIASGGAGLKEHFRDAFLVGKADAALAASVFHFGEIKIPELKSYLCGEGITIRG

SEQ ID NO: 10216 - DNA, 771 bp, Bifidobacterium longum
  CDS (1)..(771)
atgtcgttggcggtacgagtcatcccgtgcctggacgttgacgccggtcgcgtggtgaagggtgtgcatttcgagaacctcaaggacgcgggtgacccggtggagctggcggccgaatactaccgtcagagagccgacgagatcaccttcctggatgtgaccgcatccagctcccaccgcaacacgatgattgacgtggtctcccgcaccgccgaacaggtgttcatcccaatgactgtgggcggcggcgtacgcacgcccgaggacgtcgactcactgctgcgctgcggtgcagacaaggtcggtgtcaacacggcggccatcaacgacccgtcgcttatcagccgtgtggccgatcgtttcggcaaccaggtgctggtgctctccgtggatgcccgccgcgaaaagggtgagcagcatacgcagtccggttttgaggtcaccacgatgggtggccgcaaatccaccggtattgatgccatctggtgggtcaagcgcgccgagcagcttggcgccggcgagattctgcttaactcgatggacgccgacggcaccaaggaaggctttgacctcgagatgattcgcgccgtgcgcaaggaagtcaagattccgatcatcgcctccggcggtgccggcaaggtcgaggacttcccgcccgccatcgaagcaggtgccgacgcggtgctggctgcatccgtgttccattacggcatcctgactatcgccgatgtcaaggcggaactcaagaagcacggctacaccgttcgctaa

SEQ ID NO: 10217 - protein, 256 aa, Bifidobacterium longum
MSLAVRVIPCLDVDAGRVVKGVHFENLKDAGDPVELAAEYYRQRADEITFLDVTASSSHRNTMIDVVSRTAEQVFIPMTVGGGVRTPEDVDSLLRCGADKVGVNTAAINDPSLISRVADRFGNQVLVLSVDARREKGEQHTQSGFEVTTMGGRKSTGIDAIWWVKRAEQLGAGEILLNSMDADGTKEGFDLEMIRAVRKEVKIPIIASGGAGKVEDFPPAIEAGADAVLAASVFHYGILTIADVKAELKKHGYTVR

SEQ ID NO: 10218 - DNA, 810 bp, Bordetella bronchiseptica
  CDS (1)..(810)
atgaatgccagccgcattgccgccgccggcgccagcacgctgacgcgccgcatcatcccctgcctcgacgtgaccgccggccgcgtcgtcaagggcgtgaacttcgtcaacctcaccgatgccggcgatccggtcgagatcgcgcgccgctacaacgagcagggcgccgacgagctcaccttcctcgacatcaccgccaccagcgacgggcgcgacctcatcctgcccatcatcgagcaggtggcctcgcaggtcttcattcccctgacggtgggcggcggcgtgcgccaggtctccgatgtacagcgcctgctcaatgccggcgccgacaagatcagcatcaacagcgcggcggtcgccaaccccgagctggtgcgcgcggcggccgactaccatggctcgcaatgcatcgtggtcgccatcgacgcgcgccgcagctcggccgagggcgaaccggcccgctgggaagtcttcacgcacggcggccgcaaggccaccgggctggacgccgtggcctgggcgcgccgcatggccgcctatggcgccggcgaaatcctgctgaccagcatggaccgcgacggcaccaaatcgggcttcgacctggagctcacccgcgccgtctccgatgccgtacccgtgcccgtcatcgcctcgggcggcgtgggcaacctgcagcacctggccgatggcgtgaccaccggccgcgccagcgccgtgctggccgccagcatcttccacttcggccaacacaccgtgcgcgagtgcaagcagtacatggccgagcgcggcattgccgtgagactgacatga

SEQ ID NO: 10219 - protein, 269 aa, Bordetella bronchiseptica
MNASRIAAAGASTLTRRIIPCLDVTAGRVVKGVNFVNLTDAGDPVEIARRYNEQGADELTFLDITATSDGRDLILPIIEQVASQVFIPLTVGGGVRQVSDVQRLLNAGADKISINSAAVANPELVRAAADYHGSQCIVVAIDARRSSAEGEPARWEVFTHGGRKATGLDAVAWARRMAAYGAGEILLTSMDRDGTKSGFDLELTRAVSDAVPVPVIASGGVGNLQHLADGVTTGRASAVLAASIFHFGQHTVRECKQYMAERGIAVRLT

SEQ ID NO: 10220 - DNA, 774 bp, Bradyrhizobium japonicum
  CDS (1)..(774)
atgttcaaggtgcgcgtgatcccctgcctcgacgtcaaggacggaagagtcgtcaagggcgtcaatttcgtcgacctgcgcgatgccggcgaccccgtcgaagccgcgatcgcctatgacgccgccggcgccgatgagctcaccttcctcgacatcaccgcgacccatgagaaccgcggcatcatgctcgacgtggtccgccgcacggcggaggcctgcttcatgcctgtgaccgtcggcggcggcgtgcgcgaggttgacgatatcaagacgttgctgcgcgccggcgcggacaaggtctcgatcaacagcgccgcggtgtcgcggcgcgagttcgtcaaggaagcggccgaaaagttcggcgagcagtgcgtggtggtcgcgatcgacgccaagcgggtcaagcgcccgggtggtgaccgctgggagatcttcacccatggcggccgcaacgcgaccggcatcgacgccatcgaatatgcccaggaagtggtctcgctcggcgccggtgaaatcctgctgacctcgatggaccgcgacggcacaaggcaggggttcgatatcccgctgactcgggcgatcgccgacagtattcccgttcctgtaatcgcctcgggcggcgtcggcaatctcgaccacctcgtcgacggtatccgcgacggacacgccacggcggtgctggcggcctcgatcttccatttcggggaattcaccgtccgcgaggccaaggagcacatggcccggcgcggcctgcccatgcgcctggatgcctga

SEQ ID NO: 10221 - protein, 257 aa, Bradyrhizobium japonicum
MFKVRVIPCLDVKDGRVVKGVNFVDLRDAGDPVEAAIAYDAAGADELTFLDITATHENRGIMLDVVRRTAEACFMPVTVGGGVREVDDIKTLLRAGADKVSINSAAVSRREFVKEAAEKFGEQCVVVAIDAKRVKRPGGDRWEIFTHGGRNATGIDAIEYAQEVVSLGAGEILLTSMDRDGTRQGFDIPLTRAIADSIPVPVIASGGVGNLDHLVDGIRDGHATAVLAASIFHFGEFTVREAKEHMARRGLPMRLDA

SEQ ID NO: 10222 - DNA, 777 bp, Buchnera aphidicola
  CDS (1)..(777)
atgctggcaaagcgaataattgcatgtttagatgttaacaatggagttgtagtaaaaggcattcaatttaaaaaccatgaaattgtaggtgatattatatctttgtctaaacgttatacaaaagaaggtatagatgaattagtattttatgacataacagcttctactaataataagctagttgatagaagttggataaagaaagtagcagaaataattaatattccattttgcgtagccggaggtattaaaagtgtagaagatgcacagaatattctatcttttggtgcagataaaatatcaattaattcttcagcattaatagatcctgatttaataactaaaattgctaatcgttttggtgtacaatgtacagttgttggcattgattcttggttcgactcagacaagaaaaaatacatggtccaacaatatacaggtgacgctaatcgtacttatcaaactgattgggaaacaatagattgggttgaaaaagtgcaaaaaaaaggtgctggagaaattgttttaaacatgatgaatcaagatggattacaaaatggatatgatttatcacagttaaatgaaataagaaaaaaatgtaaagtacctttaattgcatcagggggggcagggtgcgcagatcatttttatcaagcattcgatcatgctaatgtagacggtgttttagctgcttccgtttttcataagaaaatcgttaacataaaagatttaaaatattttttaattcaaaaaggtttggaaattagaatatgttaa

SEQ ID NO: 10223 - protein, 258 aa, Buchnera aphidicola
MLAKRIIACLDVNNGVVVKGIQFKNHEIVGDIISLSKRYTKEGIDELVFYDITASTNNKLVDRSWIKKVAEIINIPFCVAGGIKSVEDAQNILSFGADKISINSSALIDPDLITKIANRFGVQCTVVGIDSWFDSDKKKYMVQQYTGDANRTYQTDWETIDWVEKVQKKGAGEIVLNMMNQDGLQNGYDLSQLNEIRKKCKVPLIASGGAGCADHFYQAFDHANVDGVLAASVFHKKIVNIKDLKYFLIQKGLEIRIC

SEQ ID NO: 10224 - DNA, 777 bp, Buchnera aphidicola
  CDS (1)..(777)
atgttagctaaacgaataattccatgtctagatgtgaaatctggaatagtagttaaaggagtacaatttagaaaccatgaaattgttggcggtattttatctttagcaaagcgttatactcaagaaggtgctgatgaattagtattttatgatattgaggcttcatctaataatagattgataaaaaaaaaatgggtttctcagatagcagagataattaatattccattttgtgtagctggtggtatacaaactattcaagatgtacaaagtattttatctagtggtgctgataaaatatctattaattctcctgctatatcagatccttatttaattagtcgtattgcagatcgttttggagttcaatgtgttgttgtaggtatagattcttggtttaataaagaagaatctcaatattatgtatatcaatacactggtgacaatacgaaaactattaaaacctcttggaagacgtgtgattgggtacaaaaagtacaggcattaggtgctggggaaatagtgttaaacgttatgaatcaagatggaatgaaaaatggatatgatttagttcaattaaaaaaaattcgtaaaatatgtaatgttcccttaattgcttcaggtggcgcaggagactattttcacttttatgatgtttttaatgaggcaaaagttgacggtgcgttagcagcgtctgtatttcataatcgtattataaaaattaatcagcttaaaaaatttttaatgaaaaagggtttagaaattagagtatgttaa

SEQ ID NO: 10225 - protein, 258 aa, Buchnera aphidicola
MLAKRIIPCLDVKSGIVVKGVQFRNHEIVGGILSLAKRYTQEGADELVFYDIEASSNNRLIKKKWVSQIAEIINIPFCVAGGIQTIQDVQSILSSGADKISINSPAISDPYLISRIADRFGVQCVVVGIDSWFNKEESQYYVYQYTGDNTKTIKTSWKTCDWVQKVQALGAGEIVLNVMNQDGMKNGYDLVQLKKIRKICNVPLIASGGAGDYFHFYDVFNEAKVDGALAASVFHNRIIKINQLKKFLMKKGLEIRVC

SEQ ID NO: 10226 - DNA, 774 bp, Burkholderia multivorans
  CDS (1)..(774)
atggctctagctaaacgcatcatcccctgcctggacgtgactgccgggcgtgtcgtcaagggcgtcaacttcgtcgaactgcgcgacgcgggcgaccccgtcgagatcgcccgccgctacgacgagcagggcgccgacgaactgacgttcctcgacatcaccgcgacgtccgaccagcgcgacctgatcctgccgatcatcgaggccgtcgcgtcgcaggtcttcatcccgctgacggtcggcggcggcgtgcgcgccgtcgaggacgtgcggcgcctgctcaacgcgggcgcggacaaggtcagcatgaattcgtcggcggtcgcgaatccgcagctcgtgcgcgacgcggccgacaagtacggttcgcagtgcatcgtcgtcgcgatcgacgcgaagcgcgtgtcggccgacggcgaagcgccgcgctgggaagtgttcacgcacggcggccgcaagggcacgggcctcgacgcgatcgaatgggcgcgcaagatggccgagttcggcgcgggcgagatcctgctcacgagcatggaccgcgacggcacgaagtcgggcttcgacctcgcgctcacgcgcggcgtctccgacgcggtgccggtgccggtgatcgcatcgggcggcgtcggctcgctgcaggatctggccgacggcatcaaggacggccgtgcggatgcggtgctcgccgcgagcatcttccactacggcgagcacacggtcggcgaagcgaagcgcttcatggccgagcagggcattccggtgaggctgtga

SEQ ID NO: 10227 - protein, 257 aa, Burkholderia multivorans
MALAKRIIPCLDVTAGRVVKGVNFVELRDAGDPVEIARRYDEQGADELTFLDITATSDQRDLILPIIEAVASQVFIPLTVGGGVRAVEDVRRLLNAGADKVSMNSSAVANPQLVRDAADKYGSQCIVVAIDAKRVSADGEAPRWEVFTHGGRKGTGLDAIEWARKMAEFGAGEILLTSMDRDGTKSGFDLALTRGVSDAVPVPVIASGGVGSLQDLADGIKDGRADAVLAASIFHYGEHTVGEAKRFMAEQGIPVRL

SEQ ID NO: 10228 - DNA, 777 bp, Candidatus Blochmannia floridanus
  CDS (1)..(777)
atgttggcaaaacgcatcatcccgtgtttagatgttatcaataatcaagttattaaaggtatacaatttcaaaatcatcaaataataggagatattgtatctttagctcaatattattcacaagaaggagcagatgaattagtcttttatgatattatggcatctcctaataaccaaacagttagtaaaaaatgggttgctaaaattgctgaagttattaatattccattttgtgttgctggtggaattagtacattgtatcaagctaaagaaattcttaaatttggagcagataaaatttccattaattctccagctttattaaatccatcattaattcaaaaattagcagatcacttaggtacacaatgtgttgttgtaggtattgatgcgtggtataacgctcaacttggtacttatcaaataaaatgctttagcggaaattcttctcgtatgcaatctacaacatgggaattattagattgggttatacaaatacaacagtatggagcaggagaaattgtattaaatatgatgaatcaagatggtatgcaaaatggttatgatttaaaacaactatcaaagattcgaaaacattgtacaatacctttaatagcttctggaggagcaggtaccgctcaacattttttggatgttttccaatatgccgatgtagatggcgcattagcagcttctgtttttcacaaaaaaatcattaaaattaatgaactaaaaaattttttaattaaacaaggagttgaaattagattatgttaa

SEQ ID NO: 10229 - protein, 258 aa, Candidatus Blochmannia floridanus
MLAKRIIPCLDVINNQVIKGIQFQNHQIIGDIVSLAQYYSQEGADELVFYDIMASPNNQTVSKKWVAKIAEVINIPFCVAGGISTLYQAKEILKFGADKISINSPALLNPSLIQKLADHLGTQCVVVGIDAWYNAQLGTYQIKCFSGNSSRMQSTTWELLDWVIQIQQYGAGEIVLNMMNQDGMQNGYDLKQLSKIRKHCTIPLIASGGAGTAQHFLDVFQYADVDGALAASVFHKKIIKINELKNFLIKQGVEIRLC

SEQ ID NO: 10230 - DNA, 756 bp, Chlorobium tepidum
  CDS (1)..(756)
atgttagccaaacgcatcataccctgccttgacgtccgcgacggacgggtggttaaaggcatcaacttcgaaggcctcagggatgccggttcgattctcgaacaggcccgcttttataacaatgaaatggccgacgagctggtctttctcgacatctccgcgtcgctggaatcaagaaggacaaccctcgaagaggtactgaaagtttcaggcgaggtgttcattccgctcacggtcggcggcggtatcagctcggtcgagcgggcgcacgacgcgttcctgcacggcgcggacaaggtgtcggtcaacaccgccgccgtcagcgagccggagttgatctcgcgcatcgccgaaaagttcggctcgcaggcggtggtggtggcgattgatgtgaaaaaggtcgatgggcggtacatcgttcatactcattcgggcaaaaagccgacggagtacgaagcggttgaatgggcacacaaggtgcaggaactcggcgcgggcgagattctcctgaccagcatggatcgcgacggcacgcaggagggctacgacaacgaaattctcaaaatgatctcgaccaccgtacacattccggtgatcgcctccggcggcgcaggcaacctcgaacatctctaccggggatttacggatggccacgccgacgctgcgctcgcggcctcgatcttccacttccgcacctactcgatccggcaggccaaggagtacctgcgcgaacggggaatcacggtcaggctctga

SEQ ID NO: 10231 - protein, 251 aa, Chlorobium tepidum
MLAKRIIPCLDVRDGRVVKGINFEGLRDAGSILEQARFYNNEMADELVFLDISASLESRRTTLEEVLKVSGEVFIPLTVGGGISSVERAHDAFLHGADKVSVNTAAVSEPELISRIAEKFGSQAVVVAIDVKKVDGRYIVHTHSGKKPTEYEAVEWAHKVQELGAGEILLTSMDRDGTQEGYDNEILKMISTTVHIPVIASGGAGNLEHLYRGFTDGHADAALAASIFHFRTYSIRQAKEYLRERGITVRL

SEQ ID NO: 10232 - DNA, 765 bp, Chromobacterium violaceum
  CDS (1)..(765)
atgcttgccaaacgcatcatcccttgcctggacgtgaccgccggccgcgtggtcaagggcgtcaactttctcggcctgcgcgacgccggcgatccggtcgagatcgcccgccgctacaacgagcagggcgccgacgagctgaccttcctcgacatcaccgccagttccgaccagcgcgacatcatcctgcacgtgatcgaggcggtggccgaccaggtgttcatcccgctgacggtcggcggcggcgtgcgcagcatcgccgacatccgccgcctgctgaacgccggcgccgacaaggtcagcatcaacaccgccgcggtgacccaccccgaattcgtccaacaggcgtccgagcacttcggcaaccagtgcatcgtcgtcgcgctggacgccaaggcggtgacgcccgagaacgaccgctgggagatcttcactcacggcggccgcaaccgcaccgggctggacgccgtcgaatgggcgcgcaagatgcagcaactgggcgccggcgaaatcctgctgaccagcatggaccgcgacggcaccaaggcaggcttcaacctgccgctgacccgcgcggtgtccgacgcggtgaacattccggtgatcgcctccggcggcgtcggcaaccttcagcacctggtcgacggcgtgaaggagggccacgccgacgcggtgctggccgccagcatcttccatttcggcgaatacacggtggatcaggccaagcaagcgatgcgcgccgccggcatcgaggtcaggctgtga

SEQ ID NO: 10233 - protein, 254 aa, Chromobacterium violaceum
MLAKRIIPCLDVTAGRVVKGVNFLGLRDAGDPVEIARRYNEQGADELTFLDITASSDQRDIILHVIEAVADQVFIPLTVGGGVRSIADIRRLLNAGADKVSINTAAVTHPEFVQQASEHFGNQCIVVALDAKAVTPENDRWEIFTHGGRNRTGLDAVEWARKMQQLGAGEILLTSMDRDGTKAGFNLPLTRAVSDAVNIPVIASGGVGNLQHLVDGVKEGHADAVLAASIFHFGEYTVDQAKQAMRAAGIEVRL

SEQ ID NO: 10234 - DNA, 777 bp, Corynebacterium diphtheriae
  CDS (1)..(777)
atgccagtcgcagttcgagtcattccatgtttggacgtgaaaaacggtcgcgtggttaaaggagttaactttgaagggcttaaagatgccggcgatccagtcgagttggctgctcgttatgatgccgagggtgccgacgaactaacatttctcgatgtttcagcatctcaagatggcagaggaaccatgcttgaagtggtgcggcgaacagcagaccaagtgtttattccgttaactgttggcggtggtgttcgcagcgccgaggacgtagaccaactactgcgtgcaggtgctgacaaagtcagtgtgaatacttctgcgatcgctcgtcctgagttacttcaagagctttctcagcgtttcggtgctcagtgtgtcgtcttaagcgtggatgctcgccgagtcccagaaggaggcaagccgcagccgtcgggctttgaagtaaccacacacggcggaactcgttccgctggaatcgatgctgttgagtgggcgcagaaaggcgaggcgctgggcgtgggcgaaatcttgttgaactctatggatggcgatggaacaaagcgtggatttgatctggaactgattgaaaaagtccgccatgcggtatctatccccgtgattgcttcaggtggtgcaggtaaacctgaggacttccccccagcaatagctagtggtgctgatgcagttcttgcagcttcaattttccatttcggtgaagtcacaatttctgaagtgaaaaagcaggtagtggctgctggctacgaagttcgaagctag

SEQ ID NO: 10235 - protein, 258 aa, Corynebacterium diphtheriae
MPVAVRVIPCLDVKNGRVVKGVNFEGLKDAGDPVELAARYDAEGADELTFLDVSASQDGRGTMLEVVRRTADQVFIPLTVGGGVRSAEDVDQLLRAGADKVSVNTSAIARPELLQELSQRFGAQCVVLSVDARRVPEGGKPQPSGFEVTTHGGTRSAGIDAVEWAQKGEALGVGEILLNSMDGDGTKRGFDLELIEKVRHAVSIPVIASGGAGKPEDFPPAIASGADAVLAASIFHFGEVTISEVKKQVVAAGYEVRS

SEQ ID NO: 10236 - DNA, 777 bp, Corynebacterium efficiens
  CDS (1)..(777)
atgggtgtggcaatcagggtgatcccctgcctggacgtggacaacggccgggtggtcaagggcgtcaactttgagaacctccgcgatgccggtgatccggtggaactggccaagcggtacggcgaggagggcgcggatgaactgaccttcctggatgtctccgcctcgaaggatgggcgtggaaccatgctcgatgtagtgcgtcgcaccgccgagcagatcttcatcccactcaccgtcggtggtggtgtgcgcagcgtggaggatgtggaccagctgctgcgcgccggtgcggacaaggtcagtgtgaacacctccgcgatcgcccgcccggagctgctgtcggagctgtcccagcgtttcggtgcacagtgcatcgtcctgtccgtcgacgcccgtcgtgtacccgccggggaggcaccgcagccctccggcttcgaggtcaccacccacggtggcacccgctccgcgggcctggatgccgtggaatgggcgatcacgggggagaagctcggcgtcggcgagatcctcctgaactccatggatggtgacggcaccaagaacggattcgacctggagctgctggagaaggtccgcgccgcggtgtcgatcccggtgatcgcctccggtggtgccggcaccgccgagcatttcccacccgcggtccgcgccggtgccaatgccgtcctggccgccaccatcttccacttcggtgaggtcaccatcaccgaggtcaaggacgccatcgagaaggccggtttcgaggtccgccggtga

SEQ ID NO: 10237 - protein, 258 aa, Corynebacterium efficiens
MGVAIRVIPCLDVDNGRVVKGVNFENLRDAGDPVELAKRYGEEGADELTFLDVSASKDGRGTMLDVVRRTAEQIFIPLTVGGGVRSVEDVDQLLRAGADKVSVNTSAIARPELLSELSQRFGAQCIVLSVDARRVPAGEAPQPSGFEVTTHGGTRSAGLDAVEWAITGEKLGVGEILLNSMDGDGTKNGFDLELLEKVRAAVSIPVIASGGAGTAEHFPPAVRAGANAVLAATIFHFGEVTITEVKDAIEKAGFEVRR

SEQ ID NO: 10238 - DNA, 777 bp, Corynebacterium glutamicum
  CDS (1)..(777)
atgggcgtggcaattcgagttattccttgcctggacgtggacaacggccgggttgttaaaggcgtgaactttgaaaacctccgcgatgctggcgatcctgtggagttggcaaagcgctatgacgaggaaggggcagatgagctgaccttcctggatgtcaccgcctcgaagcatggtcgcggcaccatgctggatgttgttcgacgcaccgctgatcaggtgttcatccctctgactgtcggtggcggcgtgcgcagcgaagaagatgttgatcaattgctgcgcgctggcgccgacaaggtttcggtgaacacgtctgcgattgcccgtccagaactgctgtcagagctgtccaagcgttttggtgctcagtgcatcgtgttgtctgtggatgccaggcgcgttcctgaaggtggaactcctcagccatctggttttgaagtcaccacccacggcggttccaagtccgcagaacttgatgcaatcgagtgggcaaagcgcggcgaagagctgggcgttggcgaaattctgctcaactccatggacggcgacggcaccaaaaacggctttgacctagagctgctggaaaaagttcgcgcagccgtatccattcctgtaatcgcctccggcggcgctggcaaggcggagcatttcccaccagctgttgcagctggcgccaacgcagtgcttgccgcgaccattttccacttccgcgaagtaaccatcgccgaagtaaagggagccattaaagatgcaggatttgaggtgcggaaatga

SEQ ID NO: 10239 - protein, 258 aa, Corynebacterium glutamicum
MGVAIRVIPCLDVDNGRVVKGVNFENLRDAGDPVELAKRYDEEGADELTFLDVTASKHGRGTMLDVVRRTADQVFIPLTVGGGVRSEEDVDQLLRAGADKVSVNTSAIARPELLSELSKRFGAQCIVLSVDARRVPEGGTPQPSGFEVTTHGGSKSAELDAIEWAKRGEELGVGEILLNSMDGDGTKNGFDLELLEKVRAAVSIPVIASGGAGKAEHFPPAVAAGANAVLAATIFHFREVTIAEVKGAIKDAGFEVRK

SEQ ID NO: 10240 - DNA, 780 bp, Desulfovibrio vulgaris
  CDS (1)..(780)
atgctcagtaagcgaatcatcccctgcctcgacgtgcgcgcgggcagactcaccaagggcgtgaagttcgagggcaacgtggacatcggcgacccggtggccactgcgcggcgctactatgaagagggcgcggacgaaatcgtcttctacgacatcaccgcctcgcacgaggacaggggcatcttcctcgatgtggtcgagcgcgtggcctcggagatattcatccccttctcggtgggtggtggcatcaacacggtggacgatatgcgggccgtgctcatggcaggtgccgagaaggtctctgtcaattcgggcgcggtgaagacccccgacatcatcagtcagggggctgcggccttcgggtcgcaagccatcgtggtgggcatggacgtgaagcaggtcgagaagtccgcaaccatcccatccggttatgagatcgtcatccacggcgggcgcaagtacatgggcatggacgccatcgagtgggcgaagacgtgcgagtcgctgggcgcaggtgaactgtgcgtgaactccatcgacgccgacggcaccaaggacggctacgaactgaccctcacccgcatgataagtgatgccgtgaccattcccgttatcgcctcgggcggcgcgggtagcccggaacacatgtacgatgcgctgaccagaggcggggcttcggctgcgctcatcgcctccatcgtgcattacggcacctacaccatccccgacctcaagcgccgtatctccggcatgggcgcgaagatgcgcatggtgtggtag

SEQ ID NO: 10241 - protein, 259 aa, Desulfovibrio vulgaris
MLSKRIIPCLDVRAGRLTKGVKFEGNVDIGDPVATARRYYEEGADEIVFYDITASHEDRGIFLDVVERVASEIFIPFSVGGGINTVDDMRAVLMAGAEKVSVNSGAVKTPDIISQGAAAFGSQAIVVGMDVKQVEKSATIPSGYEIVIHGGRKYMGMDAIEWAKTCESLGAGELCVNSIDADGTKDGYELTLTRMISDAVTIPVIASGGAGSPEHMYDALTRGGASAALIASIVHYGTYTIPDLKRRISGMGAKMRMVW

SEQ ID NO: 10242 - DNA, 762 bp, Geobacter sulfurreducens
  CDS (1)..(762)
atgctgaccaagcggatcatcccgtgtctggacgtgaagggcggccgggtcgtcaaaggggtccagttcctggagctgcgtgatgccggcgatccggttgagatcgccgagctctatgaccgccagggggccgacgagctcacgttcctcgacatcaccgcctcttccgacgagcggagcatcatcattgacgtggtgcgccgcaccgccgagcgggttttcatgcccctcaccgtgggtggcggggtgcggaccgtggacgatatccgcaatctcctcaacgccggggccgacaaggtgtccatcaacacggcggcggtccaccggcccgaattcgtacgggaagcggcggagcgcttcggttcccagtgcaccgtggtggctatcgacgcccggcaggttcccggcgagaaccgctgggaggtttacactcacggcggccgcaaccccaccggcatcgacgcggtggagtgggcccgtaggatggaggagtacggcgccggcgagatcctcctcaccagcatggaccgggatggcaccaaggacggctatgacatccccctgacccgcgccattgtcgacgcggtctccattccggtcatcgcctccggcggggtgggaaaccttgagcatctgtacgacggcttcgtcaaggcaggggcaagcgcctgtcttgctgcgtccatctttcactataaggagtacaccatcggcgaggccaaggagtatctccgtcaacggggggttccggtccggttatga

SEQ ID NO: 10243 - protein, 253 aa, Geobacter sulfurreducens
MLTKRIIPCLDVKGGRVVKGVQFLELRDAGDPVEIAELYDRQGADELTFLDITASSDERSIIIDVVRRTAERVFMPLTVGGGVRTVDDIRNLLNAGADKVSINTAAVHRPEFVREAAERFGSQCTVVAIDARQVPGENRWEVYTHGGRNPTGIDAVEWARRMEEYGAGEILLTSMDRDGTKDGYDIPLTRAIVDAVSIPVIASGGVGNLEHLYDGFVKAGASACLAASIFHYKEYTIGEAKEYLRQRGVPVRL

SEQ ID NO: 10244 - DNA, 756 bp, Helicobacter hepaticus
  CDS (1)..(756)
atgagccttgccaaaaggattatcccgtgccttgatattaatggtgggcgcgtagtaaaaggagtgaattttattggattacaagatgcgggcgacccagtagaaattgctcggcgctataatgatgaaggtgctgatgaaatagtgcttcttgatattactgcaagctatgagcagcgcggcataatgatagaggttgtaaaaaatattgcaaaagaggtttttattccttttagcgtaggaggagggataagatcactagaggatatgtctgcattattaaatgcaggttgtgataaaattagcattaatagtgcggcaattagaaatccacagcttattgatgaaagtgcaaagcgatttggttcacaatgtatagtggtagcggttgatgtgaaaaaggtatcccaaaattcttggaatgtttatattaatggtgggcgcgtagatagcggtaaggatatgttagagtggataaatgaagcgtgtgcaagaggtgcaggagagattctccttacaagtatagatactgatggcaccaaaggtggttatgacaaggcaatgatagaagcagttaaatctataaatgtgccaattattgcaagtggaggagctgggagtatggaagattttgctgatgtatttgttcacggagctgatgcagctttagctgcgagtgtgtttcattataaagaaattgaaataaaaatgctaaagacttatttgcaagataaaggcgtgcctgtaagaatttaa

SEQ ID NO: 10245 - protein, 251 aa, Helicobacter hepaticus
MSLAKRIIPCLDINGGRVVKGVNFIGLQDAGDPVEIARRYNDEGADEIVLLDITASYEQRGIMIEVVKNIAKEVFIPFSVGGGIRSLEDMSALLNAGCDKISINSAAIRNPQLIDESAKRFGSQCIVVAVDVKKVSQNSWNVYINGGRVDSGKDMLEWINEACARGAGEILLTSIDTDGTKGGYDKAMIEAVKSINVPIIASGGAGSMEDFADVFVHGADAALAASVFHYKEIEIKMLKTYLQDKGVPVRI

SEQ ID NO: 10246 - DNA, 786 bp, Heliobacillus mobilis
  CDS (1)..(786)
atgctagcgaaacgcatcatcccctgccttgacgtccatgggggacgcgtcgtgaaaggaacgaactttgtcaatttacgggacgccggcgaccccgtagaactggctgctgtatatgacaaagaaggcgctgatgaactggttttcttggatattaccgcttcttctgacggacgagccatcatgcttgacgtggtccggcggacggcggaagaggtcttcatcccctttaccgtcggcggcggtctgcgaacagtcgaagacattcgggagatgctgaaggcaggcgctgacaaaatctctctgaacacatcagcggtgcaaacgccgcaactgatcggagacagtgcctggaaattcggttcccaatgcatcgtcgtagctatcgatgcacgacgtcggcgggacgaagaaggacgcttgttggagggatgggaagtctacacccatggcggccggaaaccgaccggtatcgacgtgctggaatgggctcgtaaggtggaagaactaggttgcggtgaaatcctgttgaccagcatggacaaggatggaaccaaagatggttacgacatccccttgactcgggccgtaagcgaagctgtaaagataccggtcatcgcatcgggcggtgtggggaacttggagcacatctgcgaaggtttgacggctggcaaagccgatgccgccttggccgcctccatcttccattataaggagtacaccattcgcgaaaccaaagagtaccttcggggaaaaggagtgcacgtgcgaaaatggcgcgactag

SEQ ID NO: 10247 - protein, 261 aa, Heliobacillus mobilis
MLAKRIIPCLDVHGGRVVKGTNFVNLRDAGDPVELAAVYDKEGADELVFLDITASSDGRAIMLDVVRRTAEEVFIPFTVGGGLRTVEDIREMLKAGADKISLNTSAVQTPQLIGDSAWKFGSQCIVVAIDARRRRDEEGRLLEGWEVYTHGGRKPTGIDVLEWARKVEELGCGEILLTSMDKDGTKDGYDIPLTRAVSEAVKIPVIASGGVGNLEHICEGLTAGKADAALAASIFHYKEYTIRETKEYLRGKGVHVRKWRD

SEQ ID NO: 10248 - DNA, 759 bp, Lactobacillus plantarum
  CDS (1)..(759)
atgttagcaaagcggattattccgtgcttggatgtggcggatggtcgggtcaagaagggcgttaatttcgtcaacttgacggatgtcggagatccggtggcgattgcagctgcctatcagcaacagggcgcggatgaacttgtctttttagatattgcagccaccaatgagcaccgcgagacgatggccgccatggtcgaacaagtctcagctcaggtcttcatgccactgacgattggtggcggaattacaagcgttgctgatatgcaacgaatcttacgtgcgggtgctgataagacggctattaattcggctgcagttgccaaccctgaactgattcgtgccggtgctgaaaaatttggtaaccagtgcattgttgttgcgattgacgcggcgtgggatgcggcagctggtcaatatcgtgtctatacacatgggggtcagcaagcgaccgacctcgatgcagtggcgtgggccaagcaagcggtcgccttaggggctggcgagttattggtcactagcatggatcgcgatggcactaaggcggggtttgataccaagttatatcaggccctgggagcaacggtcaatgtgccaatcattgccagcggcggtgcgggtaacttacaagactttgtggatgtttttagcacaaccccggttgatggtgcattggcggcttccgtctttcactttggcgagttaacgattgcagatgtcaaagcgacattaagaaaacaaggagtggtcgtaagatga

SEQ ID NO: 10249 - protein, 252 aa, Lactobacillus plantarum
MLAKRIIPCLDVADGRVKKGVNFVNLTDVGDPVAIAAAYQQQGADELVFLDIAATNEHRETMAAMVEQVSAQVFMPLTIGGGITSVADMQRILRAGADKTAINSAAVANPELIRAGAEKFGNQCIVVAIDAAWDAAAGQYRVYTHGGQQATDLDAVAWAKQAVALGAGELLVTSMDRDGTKAGFDTKLYQALGATVNVPIIASGGAGNLQDFVDVFSTTPVDGALAASVFHFGELTIADVKATLRKQGVVVR

SEQ ID NO: 10250 - DNA, 639 bp, Legionella pneumophila
  CDS (1)..(639)
atgagtaatgtccgtctaattgcacgactagatattaaaggacctaacctaatcaaaggagtgcatctggagggattaagagtagtaggaaatcccaatgaatatgctatggcatattatgcacaaggtgcagatgaattgatttatatggatacagttgcatctttgtatgggcgtaataatttgtcagaaattgtaaagactactgctgaaaatgtatttatcccaattactgtaggtggcggaattcgcagtgttgatgatgccgagcaattattgcgttgcggtgccgataaggtagctattaatacagcggcaactaaaaaccctactctaatatctgatattgccagaagatttgggtctcaatgtgttgttttatctatcgaagcaaaacgcactgtgaatggaagatgggaggtcatgacagacaatggacgtgaacataccggaatggatgttgttgattgggctaggaatggcgaaaaatttggtgcaggtgaaattcttctgacctctattgatcaggaaggtacgcgtaagggatttgatctggaattagtgaaacaggtgtcttccatggtttctatcccggtgattgcaagtgggggtatgggtaagctggaagaatttaactga

SEQ ID NO: 10251 - protein, 212 aa, Legionella pneumophila
MSNVRLIARLDIKGPNLIKGVHLEGLRVVGNPNEYAMAYYAQGADELIYMDTVASLYGRNNLSEIVKTTAENVFIPITVGGGIRSVDDAEQLLRCGADKVAINTAATKNPTLISDIARRFGSQCVVLSIEAKRTVNGRWEVMTDNGREHTGMDVVDWARNGEKFGAGEILLTSIDQEGTRKGFDLELVKQVSSMVSIPVIASGGMGKLEEFN

SEQ ID NO: 10252 - DNA, 765 bp, Leptospira borgpetersenii
  CDS (1)..(765)
atgttaagacccagaatcatacctgtgttgttgttacaagaaaacggattggtcaaaacgatccaattcggcgacgaaagatatatcggtgacccattgaatgccgtaaggatttttaatgaaaaagaagcggatgaacttgcggttttagatatttccgccagcaaaaaaggaaaggaaccgaattatcgtctaatcgaacgtttggcgaatgaatgcagaatgcctttgtgttacggcggtgggattaaggatttggatcaggcgaatcgaattttgagttttggtgtggaaaaaataattgtaagttcactcgcaatcgaaaatccgaaaatgatttccactatggcctcctacttgggaagtcagagtgtggtcgtagcaattgattttaaaaaagcgatgttatcgagaagatatgaagtgatgattcataacgggactaaaaaaactggaaaacatctcgaggatttagtgaaagaagttatcgaattgggcgcgggtgaaatcatactcaattccattgatcgcgacggaactatggtcggttatgagatcgagatcatcaaaaagattcaaagcatctgtaagattcccattacggttttaggtggagcggggtcgctggatcacatcaaaaatctaattcaggaacttggaattatcggcgtagctgcgggaagtctttttgtttataaaggagtacataaggcggttttaatcaattatccgaacggcacggataaagaagcactatttccctga

SEQ ID NO: 10253 - protein, 254 aa, Leptospira borgpetersenii
MLRPRIIPVLLLQENGLVKTIQFGDERYIGDPLNAVRIFNEKEADELAVLDISASKKGKEPNYRLIERLANECRMPLCYGGGIKDLDQANRILSFGVEKIIVSSLAIENPKMISTMASYLGSQSVVVAIDFKKAMLSRRYEVMIHNGTKKTGKHLEDLVKEVIELGAGEIILNSIDRDGTMVGYEIEIIKKIQSICKIPITVLGGAGSLDHIKNLIQELGIIGVAAGSLFVYKGVHKAVLINYPNGTDKEALFP

SEQ ID NO: 10254 - DNA, 822 bp, Methanosarcina acetivorans
  CDS (1)..(822)
atgctcaccaaaagaataataccatgccttgatgtgacccttgacagggcaggcggctgtgtagtcaagggtgtggagtttgtggacctgaaagaggccggagaccctgtggagctcgccaagcgttataatgaagacggcgcagatgaacttgttttcctggatatcacagcttcagcccacggaagggaaacaatgatcgatgtaatcgaaaggactgcagatgaggttttcattcccctcacagtgggaggcgggatcagttcgatcgacgcaatccgccagatcctcagggcaggcgcggataaggtttcggtcaatacctcggcagtaaagaatcctgattttatcaaagagtcttcggatatattcggggcccagtgtatcgttactgcgattgactgcaggcgaaataccgatataaagaataatcccgacaaaaccgtcctggaacttgaagacgggaccccggcctggtacgaagtggtaatttacggaggcagggaagcgacagggattgatgccgtgcagtgggcaaaaaaagctgaagaactggggtccggcgaaatcctccttacaagcatggatcgggacgggacctgtgctggctacgacctaccgattacaagaaagctctccgaagagctcgacattcccatcatcgcctccggaggagtagggaacccgcagcacatctacgaaggattttccgaaggaaaagccgatgcagcccttgcagcaagcattttccacttcagtgaatattcgatatgggaagttaaagaatacctgagagagcgggaaatccctgtaaggctctga

SEQ ID NO: 10255 - protein, 273 aa, Methanosarcina acetivorans
MLTKRIIPCLDVTLDRAGGCVVKGVEFVDLKEAGDPVELAKRYNEDGADELVFLDITASAHGRETMIDVIERTADEVFIPLTVGGGISSIDAIRQILRAGADKVSVNTSAVKNPDFIKESSDIFGAQCIVTAIDCRRNTDIKNNPDKTVLELEDGTPAWYEVVIYGGREATGIDAVQWAKKAEELGSGEILLTSMDRDGTCAGYDLPITRKLSEELDIPIIASGGVGNPQHIYEGFSEGKADAALAASIFHFSEYSIWEVKEYLREREIPVRL

SEQ ID NO: 10256 - DNA, 819 bp, Methanopyrus kandleri
  CDS (1)..(819)
atggccttagccaaacgcatcataccctgcctcgacgtcaaggacggacgtgtcgtgaaaggcgtacggttccgcggactgcgcgacgctggcgatcccgctgagttggcccatcactactaccgtcacggtgccgacgagatcgtgttcctggatatctcggcctctcctgaaggtcgccggttaatggtggacgtggtgcgtcgcaccgcggagaaggtgttcattcccatgaccgtaggtggcgggatatccgacgtcgaggacttccgaagggcgctgaccgccggagccgataaagtttccgtgaacaccgcggcggtggagaacccggagttaatctccgaggccgccgatattttcgggtcgcagtgcgtggtagtggcgatcgacgcaaagcgggagcctctgaagccggagcatgaacacgtggcggatcatatcttctcgaacgacgatggagaatactggttccgggtctacgtccgtggaggtcgtgagcccgtagatctcgacgccataacctgggctaagagggtggaggagctgggcgcgggcgagatactcttgacgagcatcgacgccgacggtactcaagaaggttacgacatcgaactgacccgagaggtgtgtaacgcagtgagcattcccgtgatagcctccgggggttgcggtcacccgaagcatatggtggaggttttcaaggaggccgacgccgacgcagctctcgcggcttcgatcttccactatgggaaattcacgatcgaagaggtgaaggagcacctggccgaaaggggtgttcgggtcagacagtgctga

SEQ ID NO: 10257 - protein, 272 aa, Methanopyrus kandleri
MALAKRIIPCLDVKDGRVVKGVRFRGLRDAGDPAELAHHYYRHGADEIVFLDISASPEGRRLMVDVVRRTAEKVFIPMTVGGGISDVEDFRRALTAGADKVSVNTAAVENPELISEAADIFGSQCVVVAIDAKREPLKPEHEHVADHIFSNDDGEYWFRVYVRGGREPVDLDAITWAKRVEELGAGEILLTSIDADGTQEGYDIELTREVCNAVSIPVIASGGCGHPKHMVEVFKEADADAALAASIFHYGKFTIEEVKEHLAERGVRVRQC

SEQ ID NO: 10258 - DNA, 819 bp, Methanococcus maripaludis
  CDS (1)..(819)
atgcttactaaaagaatcattccctgccttgatatcaaagagggtagagttgttaaaggaacaaattttgtagagttaagagatgccggagatccggttgagctatctaaaatttacaacgaacagggtgctgacgaacttgtatttttggatattaccgcatcttttgaaaaaagagacattattattgacgttgtaaaaagaactgccgaacaagtattcattccattaactgttggtggaggcataaaaacagttgatgactttagaaaaatattgagagctggcgctgataaaatttcaataaatacatcagcagtaaaaactccagacttgataaaagaagcttctgaaatttttgggacgcagtgtgttgttgttgcaatggatgtaaaaagaaagtatataacagattctcaggatgaaaatttgaaaaataagaacatctttgaaacaaaacttggatcctgctggtttgaagtctatatctatggtggaagagaaggaactggtattgatgcaatagaatgggctaaaaaggttgaatatttaggtgctggagaaattcttttaactagtatggatgcagatggtacaaaagatgggtacgatttagtattgacgaaagcaatttctgaaaatacaaaacttccaataattgcaagcggaggttgtggaaatgcaaaccacgttgtcgatgcatttactgaaggaaaagctgatgctgcattaatggcaagcattttacactatagagaatgtactgttaatgatttgaaaaaagaagttgaaaaaaataatattcctgtaagattttaa

SEQ ID NO: 10259 - protein, 272 aa, Methanococcus maripaludis
MLTKRIIPCLDIKEGRVVKGTNFVELRDAGDPVELSKIYNEQGADELVFLDITASFEKRDIIIDVVKRTAEQVFIPLTVGGGIKTVDDFRKILRAGADKISINTSAVKTPDLIKEASEIFGTQCVVVAMDVKRKYITDSQDENLKNKNIFETKLGSCWFEVYIYGGREGTGIDAIEWAKKVEYLGAGEILLTSMDADGTKDGYDLVLTKAISENTKLPIIASGGCGNANHVVDAFTEGKADAALMASILHYRECTVNDLKKEVEKNNIPVRF

SEQ ID NO: 10260 - DNA, 825 bp, Methanobacterium thermoautotrophicum
  CDS (1)..(825)
atgcttgcaaagaggataataccatgtcttgactgtgacctccaggttccaaatggccgggtcgtgaagggagttgaattcaaacagataagatacgcaggggaccctgtagaacttgcaacaaggtactatgaggatggtgccgatgagatagtcttcctcgacataacagcatcacatgagagacgggagaccatgacccatgtgatagaggccaccacagagaacgtcttcgtacccatatgtgtcggtgggggtataaggaagccagaggactattttaagatgcttaaggcgggggcagacaagtgctccaccaatacggccgcaataaagaaccctgaactcatcaatgaggcatcagacctcgtcgggtcccaggcatgcgtagtggcaatagatgccaagaggagatacatcgaaaacccccgtgaatcagatgaaaggttcataatagaggttgatgatggatactgctggtacgagtgcagcatctatggtggaagagaattcacaggtattgacgcggtgaaatgggcaatggaatgccaggatagaggtgcaggtgaaattctcctcacatcaatggaccgtgacggtacaaagatgggctacgacattcccctcacaaggaccatgagcgagaaccttgacatacctgtgatcgcatcagggggtgtaggggaacctgaacacatctatgaggcattcacagatggtaaggcagacgctgcacttgctgcaagcatattccacttcaatgaataccctgtccctgcagtgaaggagtacctcagatcaaggggagttcccataagattgtag

SEQ ID NO: 10261 - protein, 274 aa, Methanobacterium thermoautotrophicum
MLAKRIIPCLDCDLQVPNGRVVKGVEFKQIRYAGDPVELATRYYEDGADEIVFLDITASHERRETMTHVIEATTENVFVPICVGGGIRKPEDYFKMLKAGADKCSTNTAAIKNPELINEASDLVGSQACVVAIDAKRRYIENPRESDERFIIEVDDGYCWYECSIYGGREFTGIDAVKWAMECQDRGAGEILLTSMDRDGTKMGYDIPLTRTMSENLDIPVIASGGVGEPEHIYEAFTDGKADAALAASIFHFNEYPVPAVKEYLRSRGVPIRL

SEQ ID NO: 10262 - DNA, 804 bp, Mycobacterium bovis
  CDS (1)..(804)
atgtatgccgaccgtgaccttccgggggctgggggcctcgcggtacgcgtgatcccgtgtctggatgtcgacgatgggcgggtggtcaagggagtcaacttcgagaacctccgcgacgccggtgatcccgtggaactcgccgccgtctatgacgcggagggcgcggacgagttgacctttctcgacgtgaccgcgtcgtcgtccggaagagccaccatgctggaggtggtgcgccgcaccgccgagcaggtgttcatcccgctgacggtgggcggtggggtacgcaccgtcgccgacgtcgattcgctgctacgggctggggctgacaaagtcgccgtcaacacggccgccatcgcttgcctggacttgctggcggacatggcgaggcagttcggctcgcagtgcatcgtgttgtccgtcgacgcgcgcacagttccggtgggatcagccccgacaccgtcgggttgggaggtcaccactcacggcggtcgtcgtggcaccggtatggacgccgtgcagtgggcggcccgtggcgccgacctcggtgtgggggagatcctgctcaactcgatggacgccgacggcaccaaagccggattcgacctggctttgctgcgtgcggtccgtgccgcggtcacggtgccggtaatcgccagcgggggcgccggtgctgtggagcacttcgcgccagcggttgccgcgggggccgatgcagtgttggcggccagcgtctttcacttccgggagctgacgatcggtcaggtgaaggcggccctggccgcggaaggaatcaccgtgcgatga

SEQ ID NO: 10263 - protein, 267 aa, Mycobacterium bovis
MYADRDLPGAGGLAVRVIPCLDVDDGRVVKGVNFENLRDAGDPVELAAVYDAEGADELTFLDVTASSSGRATMLEVVRRTAEQVFIPLTVGGGVRTVADVDSLLRAGADKVAVNTAAIACLDLLADMARQFGSQCIVLSVDARTVPVGSAPTPSGWEVTTHGGRRGTGMDAVQWAARGADLGVGEILLNSMDADGTKAGFDLALLRAVRAAVTVPVIASGGAGAVEHFAPAVAAGADAVLAASVFHFRELTIGQVKAALAAEGITVR

SEQ ID NO: 10264 - DNA, 798 bp, Mycobacterium paratuberculosis
  CDS (1)..(798)
atgagcccgaactccaccggcctggcggtacgcgtgatcccctgcctggacgtcgacgacgggcgggtggtcaagggcgtcaacttcgaaaaccttagggacgcaggcgatcccgtcgaacttgcggccgtctacgacgccgagggcgctgacgagctcaccttcctcgacgtgaccgcgtcgtcgtcgggccgcgccaccatgctggacgtggtgcgccgcaccgccgaacaggtcttcattccgctcaccgtcggcggcggggtgcgcacggtggccgacgtcgacgtgctgctgcgggccggagccgacaaggtctccgtcaacaccgccgcgatcgcgcgccccgagctgctcgaggagatggcgcggcagttcggctcccagtgcatcgtgttgtccgtggacgcccgcacggtgccgccgggcgcggtgcccaccccgtcgggctgggaggtcaccacccacggcgggcggcgtggcaccggcatcgatgccgtcgaatgggcttcccgcggagccgatttgggcgtgggggagatcctgctgaactcgatggacgccgacggcaccaaggccgggttcgacctggagatgctgcaggcggtgcggtccgcggtcaccgtgccggtgatcgccagcggcggcgccggggcggccgaacacttcgcgcccgcgatcgaggccggggccgacgcggtgttggcggccagcgttttccacttccgggagctgaccatcggacaggtcaaggccgccatggccgaggcgggcataccggtgaggatggtgcgatga

SEQ ID NO: 10265 - protein, 265 aa, Mycobacterium paratuberculosis
MSPNSTGLAVRVIPCLDVDDGRVVKGVNFENLRDAGDPVELAAVYDAEGADELTFLDVTASSSGRATMLDVVRRTAEQVFIPLTVGGGVRTVADVDVLLRAGADKVSVNTAAIARPELLEEMARQFGSQCIVLSVDARTVPPGAVPTPSGWEVTTHGGRRGTGIDAVEWASRGADLGVGEILLNSMDADGTKAGFDLEMLQAVRSAVTVPVIASGGAGAAEHFAPAIEAGADAVLAASVFHFRELTIGQVKAAMAEAGIPVRMVR

SEQ ID NO: 10266 - DNA, 777 bp, Nitrosomonas europaea
  CDS (1)..(777)
atgggattagccaaacgtatcatcccctgtcttgatatcaaagatgggcgcgtcgtcaaaggagtcaattttgtctcgttgcgggatgcgggagacccggtcgaaattgcccgcagctataatgaacagggcgctgacgagctcgttttcctcgatattaccgccagctcggaaaatcgcgacttaattctgcatatcgtcgaaaaagtcgccgcacaggtgttcatcccactgacagtaggcggaggcgtccgtaaggccgaagatgtacgcaggcttttgaacgcaggtgcagacaaagtcagcatcaacacctcagcggtattgaatccgatgctgatcaaggaatcagcagatcactacggctcccagtgtatcgtgatcgcaatcgatgccagacaaatacctgatgcaaatcctgaatctccacgctgggaagtatttacccatggcggacgcaaacccactggaatcgatgcaattgaatgggctcaaaaaatacaagccctgggcgccggagaaattctgctaaccagcatggatcgtgatggtacgcgttccggattcgatctcacactgacacgtgcaatctccgattcagtcgatttaccggtcattgcaagtggtggtgtcggtcatctggatcatctggtggaaggtattctggcaggccatgccgatgccgtactggcagcaagcattttccattatggcgagtacagtatcctacaagccaaacaatatctgtcatcgcacgggatagaagttcgcctgtaa

SEQ ID NO: 10267 - protein, 258 aa, Nitrosomonas europaea
MGLAKRIIPCLDIKDGRVVKGVNFVSLRDAGDPVEIARSYNEQGADELVFLDITASSENRDLILHIVEKVAAQVFIPLTVGGGVRKAEDVRRLLNAGADKVSINTSAVLNPMLIKESADHYGSQCIVIAIDARQIPDANPESPRWEVFTHGGRKPTGIDAIEWAQKIQALGAGEILLTSMDRDGTRSGFDLTLTRAISDSVDLPVIASGGVGHLDHLVEGILAGHADAVLAASIFHYGEYSILQAKQYLSSHGIEVRL

SEQ ID NO: 10268 - DNA, 765 bp, Oceanobacillus iheyensis
  CDS (1)..(765)
atgctcgctaaacgaattattccttgcctcgatgttgataacgggcgagtagttaagggaaagaaattcttagatatccaagatgttgctgatccggttgaattagcaaaacgctataatgatgaaggtgctgatgaacttgtcttctatgatattacggcttccaatgagcagcggggaatatttttagatgttgttgaaaaggtagcaaaagaaatcgctatcccttttatggtaggtggaggaatccgtacaactaaagatatccatcaagttcttcggtctggagctgataaagtatcaataaacagtgcggctgttcaacgtcctgagcttattttcgaatcagcacaaaaattcggaagccagtgtacggtcctatctattgatgcaaaagagatcgcagttggaaagtggaatgtttttatcaatggagggagaaaggatactggaattgatgctattgaatgggcgaaaaaaggtgaatcttatggtgctggtgaaatcgtggtaaatgctatggatgcagatggagaaaaaaatggctataatctccccttaacaacagctatagcaacagcagttaatataccagtaatcgctagtggcggagctggaaatatccaacatttcaaagatgtactttcacatgaaatagatgccgccctagcagcttctgtttttcactatgatgaaattaagatacctgcacttaaaacctatttgaacgaacaggaaatttcagtaaggaggaattcgaaatga

SEQ ID NO: 10269 - protein, 254 aa, Oceanobacillus iheyensis
MLAKRIIPCLDVDNGRVVKGKKFLDIQDVADPVELAKRYNDEGADELVFYDITASNEQRGIFLDVVEKVAKEIAIPFMVGGGIRTTKDIHQVLRSGADKVSINSAAVQRPELIFESAQKFGSQCTVLSIDAKEIAVGKWNVFINGGRKDTGIDAIEWAKKGESYGAGEIVVNAMDADGEKNGYNLPLTTAIATAVNIPVIASGGAGNIQHFKDVLSHEIDAALAASVFHYDEIKIPALKTYLNEQEISVRRNSK

SEQ ID NO: 10270 - DNA, 771 bp, Pasteurella multocida
  CDS (1)..(771)
atgttggcaaaacgcataattccttgcttagacgtacgtgatgggcaggtggtcaaaggtgtacaatttcgcaatcacgagattattggcgatattgtgccgctggcgcaacgctatgcggaagaaggcgcagatgaattagtgttctatgatattaccgcctcctctgacggcagaactattgataaaagctgggtggaacgtgtggcacaagtgattgatattccattctgtgtcgccggtgggattaaaagcgtggaagatgccgaaaaactattcgcctttggcgcagataaaatttccataaattcacccgcacttgctgatcccgatttaattaatcgcttagcggatcgttttggtgtgcaagccattgtggtggggatcgatagctggtttgaaaaagaaaccggcaaatattgggttaatcaatatactggcgatgaaagtcgcacacgccaaacccattggcaattactcgactgggtcaaggaagtacaacaacgtggcgcgggcgaaattgtgttaaatatgatgaaccaagacggtgttcgtcaaggttatgacatcgcccaattaaaactcgtgcgtaacctctgtcatattcccctgattgcctcaggcggtgcaggtgaaatggtgcatttccgtgatgcctttattgaagccaatgtggatggtgcgctcgctgccagcgtgttccataaacggattattgatattggggaattaaaggattatttgagaaaggaaaagattaagattagatag

SEQ ID NO: 10271 - protein, 256 aa, Pasteurella multocida
MLAKRIIPCLDVRDGQVVKGVQFRNHEIIGDIVPLAQRYAEEGADELVFYDITASSDGRTIDKSWVERVAQVIDIPFCVAGGIKSVEDAEKLFAFGADKISINSPALADPDLINRLADRFGVQAIVVGIDSWFEKETGKYWVNQYTGDESRTRQTHWQLLDWVKEVQQRGAGEIVLNMMNQDGVRQGYDIAQLKLVRNLCHIPLIASGGAGEMVHFRDAFIEANVDGALAASVFHKRIIDIGELKDYLRKEKIKIR

SEQ ID NO: 10272 - DNA, 777 bp, Photorhabdus luminescens
  CDS (1)..(777)
atgctggcaaaacgcataattccttgccttgatgttcgtgacgggcaagtggttaaaggcattcagtttcgtcatcacgaaattatcggcgatattgtgccacttgcccaacgttatgcaacagaaggtgcagatgaactggttttctacgatatcactgcctcatctgatggacgggtagtcgataaaagttggatcaccaaagttgcggaggtgattgatattcccttttgtgtcgctggtggtattaaaactgtcgaagatgcagggcaaatcctttcatttggggcagataaaatctctatcaactcccctgcactgactgatccaaccttaattactcgtttggccgatcgttatggtgttcaatgcattgtcgtagggattgacacctggtttgatgaaagtacaggtcgctatcaagtttatcagtttaccggcgacgaaaaacgcacaaaggccactcaatggcaaaccctcaattgggtaaaagaagcgcaacaccgtggtgcaggtgaaatcgtactcaatatgatgaatcaggatggtgtccgcaatggctacgatctgactcaactaaaacaggtgcgtgacgtttgtcatgttcctctcattgcctctggtggtgcaggcgcaccagaacactttcttgatgcctttaaacaggcaaatgtcgatggtgcactcgctgcatctgtattccataaacacattattaatatctgtgaattaaaacagtacctttcacaacaaggcgtggagataagaacttgctaa

SEQ ID NO: 10273 - protein, 258 aa, Photorhabdus luminescens
MLAKRIIPCLDVRDGQVVKGIQFRHHEIIGDIVPLAQRYATEGADELVFYDITASSDGRVVDKSWITKVAEVIDIPFCVAGGIKTVEDAGQILSFGADKISINSPALTDPTLITRLADRYGVQCIVVGIDTWFDESTGRYQVYQFTGDEKRTKATQWQTLNWVKEAQHRGAGEIVLNMMNQDGVRNGYDLTQLKQVRDVCHVPLIASGGAGAPEHFLDAFKQANVDGALAASVFHKHIINICELKQYLSQQGVEIRTC

SEQ ID NO: 10274 - DNA, 774 bp, Photobacterium profundum
  CDS (1)..(774)
atgttagctaaacgaatcgttccttgtttagacgttcgagacggtcaagtagtcaaaggggtacagtttcgtaatcacgaaattattggtgatattgttcctttagccaaacgctatgcagaagaaggcgctgacgagctggttttttatgatattaccgcatccagtgatgggcgcgtggttgataaaagctgggttgctcgtgttgctgaagttattgatattcctttctgtgttgccggcggcattaaatctgtcgaagacgcgagccgtatattgcaatttggtgcagataaggtctcgataaactcccctgcccttgccaaccctgcgcttatcacagaacttgctgataagtttggcgtgcaatgtatcgtggtgggtattgattcatactttgatgctgaaacaggtaaatatcaggtttaccaatttactggtgatgaatcacgtactaaagcaacccaatgggaaacccgagattgggttctggaagtacaaaaacgtggcgcaggggaaatcgtattaaacatgatgaaccaagatggcgttcgtaacggttacgatctaaagcaattgaatatggtacgtgaagtttgccatgttcctttaattgcttctggtggtgcaggtgaaatggttcactttgcagatgcttatcaaaaagccaatgtggacggtgcacttgccgcttccgtattccacaaacaaatcatcaatattggtgagcttaagcagtacttaaaagaacagaatgtggagatccgactatga

SEQ ID NO: 10275 - protein, 257 aa, Photobacterium profundum
MLAKRIVPCLDVRDGQVVKGVQFRNHEIIGDIVPLAKRYAEEGADELVFYDITASSDGRVVDKSWVARVAEVIDIPFCVAGGIKSVEDASRILQFGADKVSINSPALANPALITELADKFGVQCIVVGIDSYFDAETGKYQVYQFTGDESRTKATQWETRDWVLEVQKRGAGEIVLNMMNQDGVRNGYDLKQLNMVREVCHVPLIASGGAGEMVHFADAYQKANVDGALAASVFHKQIINIGELKQYLKEQNVEIRL

SEQ ID NO: 10276 - DNA, 774 bp, Prochlorococcus marinus
  CDS (1)..(774)
atggttgctcttcgtttaattccttgtcttgatgttgcaaatggacgggttgtaaaaggtgttaatttcgttggccttagagatgctggagaccctgtagaactggcctgtaggtatagcagagagggggctgatgaattggttttcttagatatagctgcaagtcatgaagcgagagcaacgttggtagagattgtccgtcgcactgctgaatctgtaactattccatttacagttgggggtggaattagctcaatagaaggtataactgaacttttacgtgcaggtgctgacaaaattagcttgaattcatctgcagttaaggatcctggcttggtgtctagaggggcatgccagtttggatctcagtgcatagttgttgcaatagatgctaaacgtcgtttggaagaatcatctggatgggatgtatttgtaaatggggggagaaaaaatacaggcttagatgcattgtcttgggcgagaaaagttgtggaattaggcgctggggaaatacttctaacttcaatggatggagatggaactcaaaaagggtatgacttggaattaacaaaaacaatttctcagtcagtacaagtaccagttatcgcttctggaggtgcaggctgtcttgaagatgtttttgaagcctttgaatatgggaatgcatctgctgctttattggcatctttattacatgatcaagatttaacaatagaggaaatcaagaattatttattaaaaaagaatttaataataagacctactaattattga

SEQ ID NO: 10277 - protein, 257 aa, Prochlorococcus marinus
MVALRLIPCLDVANGRVVKGVNFVGLRDAGDPVELACRYSREGADELVFLDIAASHEARATLVEIVRRTAESVTIPFTVGGGISSIEGITELLRAGADKISLNSSAVKDPGLVSRGACQFGSQCIVVAIDAKRRLEESSGWDVFVNGGRKNTGLDALSWARKVVELGAGEILLTSMDGDGTQKGYDLELTKTISQSVQVPVIASGGAGCLEDVFEAFEYGNASAALLASLLHDQDLTIEEIKNYLLKKNLIIRPTNY

SEQ ID NO: 10278 - DNA, 768 bp, Prochlorococcus marinus subsp
  CDS (1)..(768)
atggtagctcttcgtttaattccttgtttagatgtagctaatggaagggtagttaaaggtgttaattttgtaaaccttagagactctggtgaccctgtcgaattagcttgtaaatactcagaagcaggagcggatgaattagtatttttagatataagagctagtgtggaaaatagaaaaacattagttgatctggtctctagaacagcgaaatcagttaaaattccatttactgttggtggtggcataaattcgatcaactcaattaatgatcttttaagagcaggagcagataaagtaagtttaaattcttctgcagtaaaaaatccagacatcatttccaaaagctctacgaattttggaacacaatgtatagttattgctattgatgcaagaaaaaaaattactaaatataatgaatgggaagtttatgttaagggtggacgagagaatactggtttagatgtaataagttgggcaaaaaaagttgaggaattaggtgctggagaaattttattaacttcaatggatggtgatgggacacaaaatggatacgacttattattgactcaaacagttgcaaatgcagttaatattcctgtgattgcttctgggggtgcaggctcagtagaagatatttatgatgtttttaccaaaggtaaagcctctgcagcacttttagcatctttacttcatgataaaaaacttactatagatgaaataaaatcttttcttattgaaaagaaactaccaataagacctaattaa

SEQ ID NO: 10279 - protein, 255 aa, Prochlorococcus marinus subsp
MVALRLIPCLDVANGRVVKGVNFVNLRDSGDPVELACKYSEAGADELVFLDIRASVENRKTLVDLVSRTAKSVKIPFTVGGGINSINSINDLLRAGADKVSLNSSAVKNPDIISKSSTNFGTQCIVIAIDARKKITKYNEWEVYVKGGRENTGLDVISWAKKVEELGAGEILLTSMDGDGTQNGYDLLLTQTVANAVNIPVIASGGAGSVEDIYDVFTKGKASAALLASLLHDKKLTIDEIKSFLIEKKLPIRPN

SEQ ID NO: 10280 - DNA, 771 bp, Pseudomonas putida
  CDS (1)..(771)
atggcactggccaagcgcattatcccttgcctggacgtggacaacggccgggtggtcaagggcgtcaagttcgagaacatccgtgatgccggcgacccggtggaaatcgcccgtcgctacgacgagcaaggtgccgacgaaatcacctttctcgacatcaccgccagcgtcgatgggcgcgacaccacgctgcataccgtcgagcgcatggccagccaggtgttcatcccgctgacggttggtggtggcgtgcggaccgtgcaggacatccgcaacctgctcaacgccggtgccgacaaggtctcgatcaacaccgccgcggtgttcaacccagagtttgtcggtgaggcggcggaccgtttcggttcgcagtgcatcgttgtcgccatcgatgccaagaaagtgtccgggccaggtgaagcgccgcgctgggagattttcactcacggcgggcgcaagccgaccgggctggatgcagtcgagtgggcgaagaagatggaaggcctgggcgctggcgagatcctgctgaccagcatggaccaggacggcatgaagaacggcttcgacctgggcgttacccgggctatcagtgatgcgctggggattccggtgattgcctcggggggggtgggtaacctgcagcacctggcagacggcattctggaagggcatgccagcgcggtgctggcggccagcatcttccactttggcgagtacacagtgccggaggccaaggcctacatggcttcgcgcgggatcgtcgttcgctga

SEQ ID NO: 10281 - protein, 256 aa, Pseudomonas putida
MALAKRIIPCLDVDNGRVVKGVKFENIRDAGDPVEIARRYDEQGADEITFLDITASVDGRDTTLHTVERMASQVFIPLTVGGGVRTVQDIRNLLNAGADKVSINTAAVFNPEFVGEAADRFGSQCIVVAIDAKKVSGPGEAPRWEIFTHGGRKPTGLDAVEWAKKMEGLGAGEILLTSMDQDGMKNGFDLGVTRAISDALGIPVIASGGVGNLQHLADGILEGHASAVLAASIFHFGEYTVPEAKAYMASRGIVVR

SEQ ID NO: 10282 - DNA, 771 bp, Pseudomonas syringae
  CDS (1)..(771)
atggccctagccaaacgcatcattccttgcctggacgtcgacaacggtcgagtggtcaagggcgtcaagttcgagaacatccgtgatgctggcgacccggtggaaatcgcgcgtcgttacgatgagcagggtgccgacgaaatcacctttctcgacatcaccgccagcgtcgatggccgtgacaccacgctgcataccgtcgagcgcatggccagccaggtgttcattccactgaccgtgggcggcggcgtgcgcaccgtgcaggacatccgcaacctgctcaacgcaggtgctgacaaggtctcgatcaacaccgccgcagtcttcaacccggaatttgtcggtgaagccgccgcccgtttcggctcgcagtgcatcgtggttgctatcgacgccaagagggtttccggccctggcgaagccccgcgctgggaaatcttcacccacggcgggcgcaagcctaccgggctggatgcggtgctctgggcgaagaagatggaagatctgggcgctggcgaaatcctgctgaccagcatggatcaggacggtatgaaaaacggcttcgacctgggcgtcacccgcgccatcagcgatgcgctgggcatcccggtcatcgcctcgggcggtgtcggaaaccttgagcatctggctgcgggcgtgatcgaaggccatgccagtgcagtgctggcggcgagtattttccacttcggcgaatacaccgttcctgaggccaaggcgtacatggccagtcgcgggattgtggtgcgttaa

SEQ ID NO: 10283 - protein, 256 aa, Pseudomonas syringae
MALAKRIIPCLDVDNGRVVKGVKFENIRDAGDPVEIARRYDEQGADEITFLDITASVDGRDTTLHTVERMASQVFIPLTVGGGVRTVQDIRNLLNAGADKVSINTAAVFNPEFVGEAAARFGSQCIVVAIDAKRVSGPGEAPRWEIFTHGGRKPTGLDAVLWAKKMEDLGAGEILLTSMDQDGMKNGFDLGVTRAISDALGIPVIASGGVGNLEHLAAGVIEGHASAVLAASIFHFGEYTVPEAKAYMASRGIVVR

SEQ ID NO: 10284 - DNA, 762 bp, Pyrobaculum aerophilum
  CDS (1)..(762)
atggacgtggccttgaggataatcccgtgtctcgacatagacggaaaagccggcgtagtggtcaagggggttaatttccaggggattagagaggtgggggatccggtggaaatggccgtgagatatgaagaggagggtgccgacgagatagcaattctagacatcaccgcggcgccggaggggcgcgccacgtttatagactctgtgaaaagagttgcggaggccgtgtccatacctgtgttagtgggaggcggcgtgaggagcctcgaggacgcaacgacgttgtttagggcaggcgccgacaaggtgtctgtgaacacagctgccgtgcgcaacccccagctagtggctctgttggcgagagagttcggcagtcaatcaaccgtggtggcaatagacgcaaagtggaacggggagtattacgaggtatacgtcaagggagggagggaggcgacgggccttgacgcagtgaagtgggcgaaggaagttgaggagctaggcgcgggggagatactcctcacgtcaattgaccgagacgggacgggcttgggatatgacgtggagcttattaggcgggtggccgactctgtgagaattcccgtaatcgcgtccgggggcgcgggtcgggtggagcatttttacgaggcagcagccgcgggcgccgacgcagttctcgccgcgtctcttttccacttccgcgttttgtcaattgcgcaagtaaagcgctatttaaaagagaggggggttgaggttaggatatga

SEQ ID NO: 10285 - protein, 253 aa, Pyrobaculum aerophilum
MDVALRIIPCLDIDGKAGVVVKGVNFQGIREVGDPVEMAVRYEEEGADEIAILDITAAPEGRATFIDSVKRVAEAVSIPVLVGGGVRSLEDATTLFRAGADKVSVNTAAVRNPQLVALLAREFGSQSTVVAIDAKWNGEYYEVYVKGGREATGLDAVKWAKEVEELGAGEILLTSIDRDGTGLGYDVELIRRVADSVRIPVIASGGAGRVEHFYEAAAAGADAVLAASLFHFRVLSIAQVKRYLKERGVEVRI

SEQ ID NO: 10286 - DNA, 756 bp, Pyrococcus furiosus
  CDS (1)..(756)
atgttggcaagaagaattatagcagctcttgacataaaagatggtagggttgttaaaggaataaaattcaagaacattagagatgctggagatccaatagaactagctaaaaggtatgagagcgaaggaattgacgagatagtctttctagatattactgcctcctacgaaaaaaggaaaatccttctcgacttggtagaaagagtagcagaggaaatctacgttccttttacggtgggaggaggtataagaacagttgaagaggcaagagaaataattagacgaggggccgacaagatatttatcaatacagccgccgtggaaaatccctccttaattaaagagatcgctgacctcataggctcagcaaacttagttgttgctatagatgccaagtggaacggaaaattctgggaagtttatacacacgggggaagaaagcccaggggaatggacgctgttgagtgggccaaaagagtagaagaactgggagcaggtgaaattctcctcacgagcatggacaccgatggaacaaagcagggatttgacattccactaacaaaagcagttgttgatgccgtaaatattcccgttatagcctctggaggggctggaaaaccagaacactttttagaagtatttaggataggttctgatgctgcattagcggcatcaattttccactatggtgaatatacggtaagggaactgaagatgtttcttgccaaaaatggaattccagttagacttgattag

SEQ ID NO: 10287 - protein, 251 aa, Pyrococcus furiosus
MLARRIIAALDIKDGRVVKGIKFKNIRDAGDPIELAKRYESEGIDEIVFLDITASYEKRKILLDLVERVAEEIYVPFTVGGGIRTVEEAREIIRRGADKIFINTAAVENPSLIKEIADLIGSANLVVAIDAKWNGKFWEVYTHGGRKPRGMDAVEWAKRVEELGAGEILLTSMDTDGTKQGFDIPLTKAVVDAVNIPVIASGGAGKPEHFLEVFRIGSDAALAASIFHYGEYTVRELKMFLAKNGIPVRLD

SEQ ID NO: 10288 - DNA, 771 bp, Ralstonia solanacearum
  CDS (1)..(771)
atgctagccaaacgaatcatcccctgcctggacgtgaccaacggccgggtggtcaagggcgtcaatttcgtcgaattgcgcgacgcgggcgaccccgtcgagatcgcgcgccgttacgacgagcagggcgccgatgaaatcacctttctcgacatcaccgcgacgtccgacgggcgcgacctgatcctgcacatcatcgaagcggtggcgtcgcaggtgttcattccgctgaccgtcggcggcggcgtgcgcgcgctcgaagatgtgcgccggctgctgaacgcgggtgccgacaagatcagcatgaactcgtccgcggtggcgaatccgcagctggtgtcggacgccagcgctcgccacggcgcgcagtgcatcgtggtggccatcgatgccaagaaggtgtcggccgacggcgagccgccgcgctgggaagtcttcacgcacggcgggcgcaaggcgaccggcctcgatgccgtggcctgggcccgcgagatggcgcggcgcggcgctggcgagatcctgctgaccagcatggaccgcgacggcaccaagagtggcttcgatctggaactgacgcgcgcggtgtcggatgccgtgccggtgccggtcattgcctcgggcggggtcggcaacctgcagcatctggccgacggcatcaagctggggcatgccgacgcggtgctcgccgcgagcatcttccactacggcgaacacacggtcggcgaggccaagcggttcatggcgcaacaagatattccggtgcggatgtga

SEQ ID NO: 10289 - protein, 256 aa, Ralstonia solanacearum
MLAKRIIPCLDVTNGRVVKGVNFVELRDAGDPVEIARRYDEQGADEITFLDITATSDGRDLILHIIEAVASQVFIPLTVGGGVRALEDVRRLLNAGADKISMNSSAVANPQLVSDASARHGAQCIVVAIDAKKVSADGEPPRWEVFTHGGRKATGLDAVAWAREMARRGAGEILLTSMDRDGTKSGFDLELTRAVSDAVPVPVIASGGVGNLQHLADGIKLGHADAVLAASIFHYGEHTVGEAKRFMAQQDIPVRM

SEQ ID NO: 10290 - DNA, 792 bp, Rhizobium loti
  CDS (1)..(792)
atgctgaaagcccgtgtcatcccgtgcctcgacgtcaaggacggccgcgtcgtcaagggcgtcaacttcgtcgacctcatcgacgccggcgacccggtcgaagcggccaaggcctatgacgccgccggcgccgacgaactctgctttctcgacatcaccgcctcgtccgacaaccgtgaaaccatcttcgatgtcatcgcccgcaccgccgaacagtgcttcatgccgctgaccgtcggcggcggcgtgcgccaggtcgccgacatcaggaagctgcttctggccggcgccgacaaggtgtcgatcaacacggcggcggtgaagaatccggatttcgtcgccgaagccgccgacaagttcggcaatcaatgcatcgtcgtcgccatcgacgccaagaaggtctccggcgccggcgaggccgaccgctgggagatcttcacccatggcggacgcgagaagaccggcatcgacgccgtcgaattcgcccgcaaaatggtcgatcgcggcgccggcgagatcctgctgacatcgatggaccgcgacggcaccaaggccggctacgatatcgcgctgacgcgtgcgatcgccgatgcggtgcgcgcgccgatcatcgcttcgggcggcgtcggcacgctggatcacctggtcgaaggcattcgcgacggccacgccggcgcggtgctggctgcctccatcttccattttggcacctacaccatcgcgcaggccaaggcgcatatggccgccgcgggcctgccgatgcggctggactcctcgggcgatcggccctag

SEQ ID NO: 10291 - protein, 263 aa, Rhizobium loti
MLKARVIPCLDVKDGRVVKGVNFVDLIDAGDPVEAAKAYDAAGADELCFLDITASSDNRETIFDVIARTAEQCFMPLTVGGGVRQVADIRKLLLAGADKVSINTAAVKNPDFVAEAADKFGNQCIVVAIDAKKVSGAGEADRWEIFTHGGREKTGIDAVEFARKMVDRGAGEILLTSMDRDGTKAGYDIALTRAIADAVRAPIIASGGVGTLDHLVEGIRDGHAGAVLAASIFHFGTYTIAQAKAHMAAAGLPMRLDSSGDRP

SEQ ID NO: 10292 - DNA, 777 bp, Rhizobium meliloti
  CDS (1)..(777)
atgacccttaaagcccgtgtaatcccctgtctcgatgtgaaggacggccgcgtcgtaaagggcgtgaacttcgtcgatctgatcgacgccggggacccggtggaggcggcacgcgcctatgacgcggccggggccgacgagctctgcttcctcgacatcaccgcctcctccgacaatcgcgaaacgatcttcgacgtcgtcgcccgcaccgcggagcaatgcttcatgccgctcaccgtcggcggcggcgtgcgccaggtagcggacatccgcaagctcctgcttgccggcgccgacaaggtgtcgatcaacacggcggcggtgaaaaatccggaattcgtcgcggaagccgccgacaagttcggcgaccagtgcatcgtcgtcgcgatcgacgccaagaaagtctcggcgcaaggtgaggcggaccgttgggagatattcacccatggcgggcggcaaccgacaggcatcgacgcgatcgaatttgcgcggaaggtcgtcgatctcggcgccggcgaaatccttctcacctccatggaccgcgacggtacgaagagcggctacgacatcagcctgacacgggcgatcgccgatgcggtacgcgctcccgtcatcgcctccggcggcgtcggcacgctcgaccacatggtcgagggcatccgcgacggccatgcgactgccgtgctcgccgcctcgattttccacttcggcacctacagcatcggcgaggcgaagcgccacatggccaagcacggcatcgccatgcggcttgattga

SEQ ID NO: 10293 - protein, 258 aa, Rhizobium meliloti
MTLKARVIPCLDVKDGRVVKGVNFVDLIDAGDPVEAARAYDAAGADELCFLDITASSDNRETIFDVVARTAEQCFMPLTVGGGVRQVADIRKLLLAGADKVSINTAAVKNPEFVAEAADKFGDQCIVVAIDAKKVSAQGEADRWEIFTHGGRQPTGIDAIEFARKVVDLGAGEILLTSMDRDGTKSGYDISLTRAIADAVRAPVIASGGVGTLDHMVEGIRDGHATAVLAASIFHFGTYSIGEAKRHMAKHGIAMRLD

SEQ ID NO: 10294 - DNA, 789 bp, Rhodopirellula baltica
  CDS (1)..(789)
atgctttccgctcgcgtcattccctgcctcgatgtccatggcggacgcgtcgtcaaaggcaccaactttgtgaacttgcgagatgccggtgacccagtcgaagtggctcggcgatacgaagccgaaggggccgatgaattggtgttcttggacatcaccgccagccacgaagaacgagcgatcttgttggatgtcgttcgccgtaccgcagaacaggttttcatgccgctgaccgtgggcggtggcgtgcgaacggtcgaggatgttcgagcgttgttgtcggccggttgcgacaaggtgtccatcaactcgtcagccgtgaccaaccccgacttcatccgccaagccgccgatcgattcgggcgtcagtgcatcgtggtgaacatcgatcccaaacgagtccaaaaagacggcgaagaattctgggaggtgcacatcaacggcggtcgcaaaccgaccgggctgcaagcggtccagtgggccaaacgagtcgaggaactgggggccggcgagattgtgctgaccagtatggacgccgacggtacttgcgacggatatgacattccgatcacccgagcggtcagtgaagcggtgcggatcccagtggtcgccagtggaggagctggaaatccggaccacttggtcgaggccattcgcgatgggaaggcggacgcggttctggcggccagcattttccactttggcacccacccaatcggaccgaccaaacagcacatggccgaggctggaattcgggttcggatgcccgcagagcctttcgccacatga

SEQ ID NO: 10295 - protein, 262 aa, Rhodopirellula baltica
MLSARVIPCLDVHGGRVVKGTNFVNLRDAGDPVEVARRYEAEGADELVFLDITASHEERAILLDVVRRTAEQVFMPLTVGGGVRTVEDVRALLSAGCDKVSINSSAVTNPDFIRQAADRFGRQCIVVNIDPKRVQKDGEEFWEVHINGGRKPTGLQAVQWAKRVEELGAGEIVLTSMDADGTCDGYDIPITRAVSEAVRIPVVASGGAGNPDHLVEAIRDGKADAVLAASIFHFGTHPIGPTKQHMAEAGIRVRMPAEPFAT

SEQ ID NO: 10296 - DNA, 759 bp, Rhodobacter capsulatus
  CDS (1)..(759)
atgctcaagacgcgcatcattccctgcctcgacgtggccgatggccgcgtggtcaaaggcgtgaacttcgtcaatctgatcgacgcgggcgacccggtcgaggccgccaaggcctatgacgcggcgggcgcggacgagctgtgtttccttgacatccatgccacgcatgaaaaccgcggcacgatgttcgatctggtgacccgcaccgccgagcaatgcttcatgccgctgaccgtggggggcggcgtgcgcacgcaggaggatgtccgtgcgctgcttctggcgggggccgacaaggtcagcttcaattcggccgccgtcgccaatcccgatgtggtgcgaagccgccgatcgcttcggtcgcaatgcatcgtcgtcgccatcgatgcgaagacggtcgaaccggggcggtgggagatcttcacccatggcgggcgcaaatcgaccggcatcgacgcggtcgaatttgcccggcatgtcgaggcgaagggggcgggggaaatcctgctcacctcgatggaccgcgacggcaccaaggccgggttcaaccttcccctcacccgcgccattgccgatgcggtgaagatcccggtgatcgccagcggtggcgtcggcacgctcgatcacctcgtcgagggcgtgaccgagggccatgcctcggcggtccttgccgcctcgatcttccatttcggcacctacacgatcggcgaagcgaaagcccacatggcccccgccggcattccgatgaggcttgcatga

SEQ ID NO: 10297 - protein, 252 aa, Rhodobacter capsulatus
MLKTRIIPCLDVADGRVVKGVNFVNLIDAGDPVEAAKAYDAAGADELCFLDIHATHENRGTMFDLVTRTAEQCFMPLTVGGGVRTQEDVRALLLAGADKVSFNSAAVANPDVVRSRRSLRSQCIVVAIDAKTVEPGRWEIFTHGGRKSTGIDAVEFARHVEAKGAGEILLTSMDRDGTKAGFNLPLTRAIADAVKIPVIASGGVGTLDHLVEGVTEGHASAVLAASIFHFGTYTIGEAKAHMAPAGIPMRLA

SEQ ID NO: 10298 - DNA, 768 bp, Rhodopseudomonas palustris
  CDS (1)..(768)
atgttcaaggtccgcgtcatcccctgcctcgacgtcaaagacggccgagtcgtcaaaggcgtcaacttcgtcgacctgcgcgacgccggcgatccggtcgaggcggcgatcgcctatgacgccgctggcgcggacgaactctgcttcctcgacatcaccgccacccacgagaaccgcggcatcatgctcgacgtggtgcggcgcacggccgaagcctgcttcatgccggtgacggttggcggcggcgttcgcaccgtcgacgacatcaagaccctgctccgctccggcgccgacaaggtctcgattaattcggccgcggttgcgcggcgcgaattcgtcaaggaagcggccgagaagttcggcgaccagtgcatcgtggtggcgatcgacgccaagcgtgtgccgggccgcgaccgctgggagatcttcacccatggtggccgaaagggcaccgggatcgacgcgatcgaattcgcccaggaagtggtgtcgctcggcgccggcgaaatcctgctgacctcaatggaccgcgacggcaccaagtcgggcttcgacattccgctgacccgggcgatcgccgacagcgtcggcgtcccggtgatcgcgtcgggcggcgtcggcaatctcgatcacctggtcgacggcatccgcgaaggccacgccaccgcggtgctggcggcctcgatcttccatttcggtgagtacaccattcgtcaggccaaggatcatatggtccaggccgggctgccgatgcggctcgatccctag

SEQ ID NO: 10299 - protein, 255 aa, Rhodopseudomonas palustris
MFKVRVIPCLDVKDGRVVKGVNFVDLRDAGDPVEAAIAYDAAGADELCFLDITATHENRGIMLDVVRRTAEACFMPVTVGGGVRTVDDIKTLLRSGADKVSINSAAVARREFVKEAAEKFGDQCIVVAIDAKRVPGRDRWEIFTHGGRKGTGIDAIEFAQEVVSLGAGEILLTSMDRDGTKSGFDIPLTRAIADSVGVPVIASGGVGNLDHLVDGIREGHATAVLAASIFHFGEYTIRQAKDHMVQAGLPMRLDP

SEQ ID NO: 10300 - DNA, 774 bp, Shewanella oneidensis
  CDS (1)..(774)
atgctggccaaacgaatagtcccctgtttagatgtgaaagatggctgcgtggtcaaaggcgtacagtttcgcaaccatgaaattgttggcgacatagtgccactcgcagcgcgttacgccgcagaaggcgctgatgagctggtgttttacgatatcaccgccagtgcccacgaccgtgtagtcgataagtcttgggtgagccgagtggctgagcaaatagatatccccttttgcgtggcgggtggaattaaaaccattacccaagcccgcgagctactcgcctttggcgcagataaaatttcggttaactcacccgccctgagcgatccgagtttaatctcacgcctgcaggatgaatttggccgtcaatgtatcgtgattggcatagactctttttatgatgcggcaagcgacagttataaagtaaagcaatttaccggcgatgaagccgccaccaaagaaactgcttggtacacccaagattgggtcgaagaagtacaaaaacgcggctgcggtgaaatcgtgctcaatgtgatgaaccaagacggcgtgcgcggtggctatgatatcaaacagttaagcctagtacgccaattgtgcgatgtgccattaatcgcctcgggcggcgctggcacgatggcgcattttcgcgatgtgtttatcgatgcgaaggtggatgcagcactggcggccagcgtgttccataaagccattatcaatatcggcgagttaaaacagtatttagccgccgaaggtattgctattagacgctag

SEQ ID NO: 10301 - protein, 257 aa, Shewanella oneidensis
MLAKRIVPCLDVKDGCVVKGVQFRNHEIVGDIVPLAARYAAEGADELVFYDITASAHDRVVDKSWVSRVAEQIDIPFCVAGGIKTITQARELLAFGADKISVNSPALSDPSLISRLQDEFGRQCIVIGIDSFYDAASDSYKVKQFTGDEAATKETAWYTQDWVEEVQKRGCGEIVLNVMNQDGVRGGYDIKQLSLVRQLCDVPLIASGGAGTMAHFRDVFIDAKVDAALAASVFHKAIINIGELKQYLAAEGIAIRR

SEQ ID NO: 10302 - DNA, 759 bp, Staphylococcus aureus
  CDS (1)..(759)
atgattaaaaaacgtatcattccatgtttagatgtcaaagatggtcgtgtcgttaaagggattcaatttaaaggattaagggatattgggaatcctgttgatttagcaatgtattacaatgaagcgggtgctgatgaattagtatttttagacatctctaagacggaagagggtcatagcttaatgctagaagtgattgaacagacagcgtcacgcttgtttatccctcttactgtagggggtgggattcaaagtctcgatgatattacccaattgctaaatcatggtgcagataaagtatcattaaattcaagtgctttaaaaaatccacagctcattaaacaagcgagtgataaattcggtagacaatgcatctgcatagcaattgatagctattatgatcctgaaagaaaagcacattattgttgtacgactggtggtaaaaaaatgacaaatattaaagtatatgactgggtacagcaagtagaacagttaggtgcaggtgagctcctcgttacaagtatgggacatgatggtatgaaacaaggctttgatattgaacacctagcaaatattaagtctcttgtaaatattccaatcattgcttctggtggtggtggcaatgcacaacactttgtagaattatttgatcagacggatgtttctgcaggtttagctgcaagtatattacatgatcgagaaacgacggttcaatctattaaagaagtgatacggcaaggaggtatagcagtaagatga

SEQ ID NO: 10303 - protein, 252 aa, Staphylococcus aureus
MIKKRIIPCLDVKDGRVVKGIQFKGLRDIGNPVDLAMYYNEAGADELVFLDISKTEEGHSLMLEVIEQTASRLFIPLTVGGGIQSLDDITQLLNHGADKVSLNSSALKNPQLIKQASDKFGRQCICIAIDSYYDPERKAHYCCTTGGKKMTNIKVYDWVQQVEQLGAGELLVTSMGHDGMKQGFDIEHLANIKSLVNIPIIASGGGGNAQHFVELFDQTDVSAGLAASILHDRETTVQSIKEVIRQGGIAVR

SEQ ID NO: 10304 - DNA, 756 bp, Streptomyces avermitilis
  CDS (1)..(756)
atgaccctggccgtacgagtcatcccctgcctggacgtggacaacggccgggtggtcaagggtgtcaacttccagaacctgcgcgacgcgggcgaccccgtcgagatggcgaaggtgtacgacgccgagggcgccgacgagctgacgttcctggacatcaccgcgtcctccggcaaccgcgagaccacgtacgacgtcgtgcgccgcacggccgagcaggtgttcatcccgctgacggtgggcgggggcgtgcggacgcccgacgacgtggacaagctgctgcgggcgggcgcggacaaggtgggcgtgaacacggccgccatcgcccggcccgagctgatccgtgagatcgccgagcggttcggccggcaggtcctggtcctgtcggtggacgcgcgccggaccgagagcggcagcttcgaggtcaccacccacggcggccgcaagggcaccggcatcgacgccgtggagtgggcgcaccgggccgccgagctgggcgcgggagagatcctgctcaactcgatggacgcggacggcaccaaggacggctacgacctggagatgatcgcggcggtgcgggcgcacgtgaccgtgcccgtcatcgcctccggcggcgccggcaagctcgaccacttcccgccggccatcgcggcgggcgccgacgcggtgctggccgcgtccgtcttccacttcggtgatctgcggatcggcgaggtgaaggagacgctgcgggcggcggggcatcccgtgcggtga

SEQ ID NO: 10305 - protein, 251 aa, Streptomyces avermitilis
MTLAVRVIPCLDVDNGRVVKGVNFQNLRDAGDPVEMAKVYDAEGADELTFLDITASSGNRETTYDVVRRTAEQVFIPLTVGGGVRTPDDVDKLLRAGADKVGVNTAAIARPELIREIAERFGRQVLVLSVDARRTESGSFEVTTHGGRKGTGIDAVEWAHRAAELGAGEILLNSMDADGTKDGYDLEMIAAVRAHVTVPVIASGGAGKLDHFPPAIAAGADAVLAASVFHFGDLRIGEVKETLRAAGHPVR

SEQ ID NO: 10306 - DNA, 756 bp, Streptococcus mutans
  CDS (1)..(756)
atgttaaaaaaacggattattccttgcctagatgtcaaggatggacgcgtcgttaagggtgttaattttgttaatctgactgatgttggtgatcctgttgatgctgcgcgtgcttattatgaagcgggttgtgatgaactggtctttttagatattacagcaacctcggacaatcgagaaacgacagtggatatggtaaggcatgtagcggaccaagtctttattccctttactgttggcggtggtattcgttcagttgatgatatgaataaaatgctcaaggctggtgccgataaggtcgctgttaattcatcggctatcgccaatccccagttaatcaaggattgtgctgagaaatttggcagccaatgtgtggtcgttgccattgatgcgcgcaaagaagcagatgattcttggcatgtttacgttgcaggtggccgaaaagatacaggcattgatctcttggcttgggttaaagaagccgtccagctgggtgctggcgaaattctcctgacaagcatggataaggatggcaccaagtctggttttgacttggacatgttgaatgccgttgcccagttggctgatattcccatcattgcctcaggtggtgccggaaatatggagcatatggtggaaatttttgaaaagaccccagcaacaggtgccttagcagcatccattttccattatggcgaggtttctatcgcagatactaaaaaagccatgaaagagcatggaatcgaggtgagataa

SEQ ID NO: 10307 - protein, 251 aa, Streptococcus mutans
MLKKRIIPCLDVKDGRVVKGVNFVNLTDVGDPVDAARAYYEAGCDELVFLDITATSDNRETTVDMVRHVADQVFIPFTVGGGIRSVDDMNKMLKAGADKVAVNSSAIANPQLIKDCAEKFGSQCVVVAIDARKEADDSWHVYVAGGRKDTGIDLLAWVKEAVQLGAGEILLTSMDKDGTKSGFDLDMLNAVAQLADIPIIASGGAGNMEHMVEIFEKTPATGALAASIFHYGEVSIADTKKAMKEHGIEVR

SEQ ID NO: 10308 - DNA, 750 bp, Sulfolobus tokodaii
  CDS (1)..(750)
atgacagctaaaagaataattgcttgtttagatgtaaaaaacggtagagtagtcaagggtgtaaatttccttaacttaaaagacaagggagaccccgtagaattagcatctagatacgaagaagaaggagcggacgaaatagtatttttggatattacagctactatagaaggaagaaaagcattattagaagtagtaaaaaatacggctagcgtattatctataccactgacggtaggaggtggaataagaacaatagaagatgtttcaagaattctaggtaatggcgctgataaagtaagtataaatacagcagcagttgaaaacaaaaagataataactgaggcctctgaacaatttggtgctcaagcaattgttgtagcaattgatgtgaaaagggttaataattcgttcatagtttttactagatctggtacctataataccggtatagacgcaattcaatgggcaaaagaagtagaaaaattgggtgctggggaaattttgcttacaagtattgataaagatggtacaagagaaggatatgatatcgagcttacaaaagaggtaaataattctgtaaatattccagttattgctagtggtggtgcagggaaaatggaacatttttatgaggttttaaaagttgcggatgccgcgttggctgcaggtgtttttcatgatggcgttattaagatccctgaacttaaaaggtttttgttagagaagggtatagaggtgagagtatga

SEQ ID NO: 10309 - protein, 249 aa, Sulfolobus tokodaii
MTAKRIIACLDVKNGRVVKGVNFLNLKDKGDPVELASRYEEEGADEIVFLDITATIEGRKALLEVVKNTASVLSIPLTVGGGIRTIEDVSRILGNGADKVSINTAAVENKKIITEASEQFGAQAIVVAIDVKRVNNSFIVFTRSGTYNTGIDAIQWAKEVEKLGAGEILLTSIDKDGTREGYDIELTKEVNNSVNIPVIASGGAGKMEHFYEVLKVADAALAAGVFHDGVIKIPELKRFLLEKGIEVRV

SEQ ID NO: 10310 - DNA, 846 bp, Synechococcus elongatus
  CDS (1)..(846)
atgatgcttgcaaaacgaattttgccctgtctggatgtgaaggcgggtcgagttgtgaagggggtgaactttgtcaacctacgggatgccggagatcccgtagagctggctcaggcctacaatgcagcgggtgccgatgagcttgtatttttggatattacggccacccatgaagagcgcaacatcctcattgatgtggtctatcgcaccgcggatcaggtgtttattcccctcacggtggggggtggcattcagtccctgacgatgatcaaggatctattgcgggccggggcagataaagtcagcctgaattcggcagccgtgcggcaacccgatctcgtcaatcaggccagcgatcgctttggtgcccaatgtattgttgttgccattgatgctcgacgcgaacccgattgtgctcctgaccaaccccgttggcaagtctatgtgcgcggcggccgggaagccaccggtctcgatgccgtggcctgggcagtggaaatggctaaacggggtgcgggcgaactgctggtgaccagtatggatgccgatggaacccaggcaggctacgaccttgaattgacgcgggcgatcgccgagcgagtggagattcctgtgattgcctctgggggagcaggcacctgtgagcatattcgcgctgcccttgtggaagggaaagcagaggcggcacttttagcctcgctgctgcactacggccaactgacgatcgcccagatcaagggctatctacatcagcaccaagtgcccgtgcgccaagcagaacccctccctcaacccgccagggaggggctaggggattcagctagaagggccatgtccagtggctaa

SEQ ID NO: 10311 - protein, 281 aa, Synechococcus elongatus
MMLAKRILPCLDVKAGRVVKGVNFVNLRDAGDPVELAQAYNAAGADELVFLDITATHEERNILIDVVYRTADQVFIPLTVGGGIQSLTMIKDLLRAGADKVSLNSAAVRQPDLVNQASDRFGAQCIVVAIDARREPDCAPDQPRWQVYVRGGREATGLDAVAWAVEMAKRGAGELLVTSMDADGTQAGYDLELTRAIAERVEIPVIASGGAGTCEHIRAALVEGKAEAALLASLLHYGQLTIAQIKGYLHQHQVPVRQAEPLPQPAREGLGDSARRAMSSG

SEQ ID NO: 10312 - DNA, 765 bp, Thermoanaerobacter ethanolicus
  CDS (1)..(765)
atggtcacaaaaagaataattccctgcctggacgttcacaacggcagggtggtaaagggagtcaattttgtgaatataagagatgccggagatccggttgagattgcgtcctattatgacaaagccggcgctgacgaacttacttttcttgacataactgcttcggcggaactgagaaacatcatgattgatgtggtaagaagggttgcagagcaggtttttattcccttcactgtggggggtggaataagaaccgttgaggatttcagggagattttaaaagccggtgcggacaaagtatccattaattccgctgcggtaaaaaggcctgagctgatatcggaagccgcatcccgttttggaagtcagtgcgtggtggttgcgattgatgcgaaaaggcgcgacgacaattccggttgggatgtgtatattaacggaggaagaatcaataccggaaaagatgccgtggaatgggctgtggaggttgaaaaactcggtgccggggagattcttcttacgagcatggactgtgacggtacgaaaaaaggatatgacattgagcttaccagaaaggtgtcggaaagtgtaaggatgatccctgttattgcatcgggcggtgccggtaccatggagcatttccgtgaagcattagttgagggaaaggccgacgctgtgctggctgcatctctgtttcactacagagagatagaaataatggaactaaaaaaatatttgaaggagaacggaatagaaataagaatgtag

SEQ ID NO: 10313 - protein, 254 aa, Thermoanaerobacter ethanolicus
MVTKRIIPCLDVHNGRVVKGVNFVNIRDAGDPVEIASYYDKAGADELTFLDITASAELRNIMIDVVRRVAEQVFIPFTVGGGIRTVEDFREILKAGADKVSINSAAVKRPELISEAASRFGSQCVVVAIDAKRRDDNSGWDVYINGGRINTGKDAVEWAVEVEKLGAGEILLTSMDCDGTKKGYDIELTRKVSESVRMIPVIASGGAGTMEHFREALVEGKADAVLAASLFHYREIEIMELKKYLKENGIEIRM

SEQ ID NO: 10314 - DNA, 762 bp, Thermoanaerobacter tengcongensis
  CDS (1)..(762)
atgcttgcaaagagaataataccatgtctggatgttaaagatggaagagtagtaaaaggaataaattttgtaaatttaaaggatgctggagaccctgttgaaatagctgaaaggtacaatgaattaggagccgatgagcttgtatttctggatattacagcttcctatgaaaaaagaaaaattatgatagatgttgtaaagagaacatcagaaaaggtgtttatccctttgactgtagggggaggaatttctgatattgatgacataagagaagttttaaaagcaggagctgataaggtttctataaatacacaggcggtaaaacagccaacacttattcgtcaggcggctttgaggtttgggagccagtgtgttgttgtggcaattgacgctaaaaagagaccagatggcacaggctacaatgtgtatataaatggagggagaataaacacaggacttgatgctgttgagtgggctaaaaaggtgaaagatttgggtgcaggagaaatacttttaacaagtatggataaagacgggacaaaggatggatatgatattgaacttacaaggcttataagtgaagctgtgagtattccagttatagcatcaggaggagcagggaaacccgagcattttaaagaggtgtttacacaaggaaaagctgatgcagctttggctgcttctgtatttcactatggagagcttgatataaaagagttgaaaagatatttaaaggatgagggtataccggtaagattgtag

SEQ ID NO: 10315 - protein, 253 aa, Thermoanaerobacter tengcongensis
MLAKRIIPCLDVKDGRVVKGINFVNLKDAGDPVEIAERYNELGADELVFLDITASYEKRKIMIDVVKRTSEKVFIPLTVGGGISDIDDIREVLKAGADKVSINTQAVKQPTLIRQAALRFGSQCVVVAIDAKKRPDGTGYNVYINGGRINTGLDAVEWAKKVKDLGAGEILLTSMDKDGTKDGYDIELTRLISEAVSIPVIASGGAGKPEHFKEVFTQGKADAALAASVFHYGELDIKELKRYLKDEGIPVRL

SEQ ID NO: 10316 - DNA, 774 bp, Vibrio vulnificus
  CDS (1)..(774)
atgctggcaaagcgaataattccatgtcttgatgttcgtgatggacaagtggtgaagggcgttcagtttcgtaaccatgaaatcattggtgatatcgttcctcttgctaaacgctatgcggaagaaggcgctgacgagcttgtattctatgacattaccgcttcaagtgatggtcgtgtcgtcgataaaagttgggtttctcgcgttgcagaagtgattgatattccgttctgtgtcgctggtggcattaagtcagcagaagacgcagcgcgcattcttgagtttggcgcagacaaagtctctatcaactcgccagcgctggctaacccgcagctgattactgaccttgccgataagtttggtgtgcaatgtatcgtcgttggtatcgattcatactacgacaaagagaccggtaagtatcaggtttatcagtttactggtgacgaagaacgcaccaaagcgacccaatgggaaacacgtgattgggtgcaagaagtacaaaaacgcggcgctggtgaaattgtattgaacatgatgaaccaagacggcgtacgtaacggttacgatatcgaacaactgaatatggtacgcgaagtgtgtaaggtgccattgattgcctctggtggtgccggtgccatggagcacttcgcggaagcgtaccaaaaagccaatgtggacggtgcgctggcagcatcggtgtttcacaaacaagtcatcaatattggtgaattaaagcagtatttaaagcaacaaggcattgaggtacgactatga

SEQ ID NO: 10317 - protein, 257 aa, Vibrio vulnificus
MLAKRIIPCLDVRDGQVVKGVQFRNHEIIGDIVPLAKRYAEEGADELVFYDITASSDGRVVDKSWVSRVAEVIDIPFCVAGGIKSAEDAARILEFGADKVSINSPALANPQLITDLADKFGVQCIVVGIDSYYDKETGKYQVYQFTGDEERTKATQWETRDWVQEVQKRGAGEIVLNMMNQDGVRNGYDIEQLNMVREVCKVPLIASGGAGAMEHFAEAYQKANVDGALAASVFHKQVINIGELKQYLKQQGIEVRL

SEQ ID NO: 10318 - DNA, 765 bp, Wolinella succinogenes
  CDS (1)..(765)
atgaatccactcgccaaacgcatcattccctgtcttgatatcaaagagggtcgagtcgtgaaaggagtcaatttccttggattgagggatgcgggagacccagttgaagtggctaggcgatacaatgaagagggggcagacgagatcgccttcctcgacatcactgccactcacgagaggcgtgacacgatgtgtgatattgtaagggcggttgccaaagaggtctttatcccattgaccgttggaggaggcatccgcaaacttgaagatatgtacacacttcttaacgcgggttgcgacaaagtgagcattaactcctcggccatcaagaatccttcgcttattgacgaaggggcgaagcgttttgggagccaatgcattgttgtagccattgatgccaagtctagggcggataagagtggctggaatgtctatattaatggcggaagaatcgacacaggaatcgatcttcttgaatggactaaagaggtctatgagcgaggcgcaggagagattctcctcactagcatggatgccgatggaacaaaggcaggctatgactgtgaacagctccagacactctccaagctagtcgatatccccctgattgctagcggcggagcaggcacaatggagcatatcaaagaggcgtttttgagtggagccgatgccgcccttgctgcgaccatttttcactacaaagagattgatatcatggatctcaagcgctatcttcgctccgagggaatcgaggtgagactctaa

SEQ ID NO: 10319 - protein, 254 aa, Wolinella succinogenes
MNPLAKRIIPCLDIKEGRVVKGVNFLGLRDAGDPVEVARRYNEEGADEIAFLDITATHERRDTMCDIVRAVAKEVFIPLTVGGGIRKLEDMYTLLNAGCDKVSINSSAIKNPSLIDEGAKRFGSQCIVVAIDAKSRADKSGWNVYINGGRIDTGIDLLEWTKEVYERGAGEILLTSMDADGTKAGYDCEQLQTLSKLVDIPLIASGGAGTMEHIKEAFLSGADAALAATIFHYKEIDIMDLKRYLRSEGIEVRL

SEQ ID NO: 10320 - DNA, 777 bp, Xanthomonas campestris
  CDS (1)..(777)
atgctgagccgtcgcatcattccctgcctggacgtgcgcgatggccgcgtggtcaagggcgtcaagttccgcgaccacatcgacatgggcgacatcgtcgagttggcgatgcgctaccgcgaccagggcgcggacgagttggtgttctacgacattggcgccagcccggaagggcgttcggtggactatgcgtgggtcgagcgcgttgcgcgcctgatcgacatcccgttctgcgtggccggcggcatccgcgatgtagaaaccgcgcgtgcggtgctgcatgccggcgccgacaagatctccatcaactcgccggcattggggcggccgcagctgatctccgagctggccgacgcctttggcgtgcaatgcgtggtggtcggcatcgactcgatccgcgaagaggacgggcagtggcgcgtccgccgctacaccggcgacccaagcaagacccaggcgctgccgatgcgcacgctggactgggtggccgaggcgcagcgactgggtgcgggcgagatcgtgctcaattgcatggataacgacggggtccggcatggctacgatattgcgcagctgcgccaggtgcgcgcgttgtgccgggtaccgctgattgcctccggcggcgctggcgagatgcagcacttcgccgacgtgttcgaccaggccgacgccgatggtgcgctggcggccagtgtcttccatagcggcgcaattccgattccggaactcaagcgcttcctgcgtgcgcaacagatcgaggtacgtgatgggcagtga

SEQ ID NO: 10321 - protein, 258 aa, Xanthomonas campestris
MLSRRIIPCLDVRDGRVVKGVKFRDHIDMGDIVELAMRYRDQGADELVFYDIGASPEGRSVDYAWVERVARLIDIPFCVAGGIRDVETARAVLHAGADKISINSPALGRPQLISELADAFGVQCVVVGIDSIREEDGQWRVRRYTGDPSKTQALPMRTLDWVAEAQRLGAGEIVLNCMDNDGVRHGYDIAQLRQVRALCRVPLIASGGAGEMQHFADVFDQADADGALAASVFHSGAIPIPELKRFLRAQQIEVRDGQ

SEQ ID NO: 10322 - DNA, 22 bp, Artificial sequence
  Primer sequence
atgctggcaaaacgcataatcc

SEQ ID NO: 10323 - DNA, 23 bp, Artificial sequence
  Primer sequence
ttaacatatcctgatctccacgc

SEQ ID NO: 10324 - DNA, 1575 bp, Escherichia coli K12
  CDS (244)..(1575)
ggatcctgacatgcctctcccgagcaaaagaaatctaagctgtgtaacaagtaaacgactaatttgaccggtttcaaaagcgaaagacgcataatctgtcatctaataaacggtaaacattctttttatattcacggcattactgataaaaaagtcgctctcgcataaaatttacacttgcaccctgcgaaaaaacagaataaaaatacactaatttcgaataatcatgcaaagaggtgtgccatggtaaaggaacgtaaaaccgagttggtcgagggattccgccattcggttccctatatcaatacccaccggggaaaaacgtttgtcatcatgctcggcggtgaagccattgagcatgagaatttctccagtatcgttaatgatatcgggttgttgcacagcctcggcatccgtctggtggtggtctatggcgcacgtccgcagatcgacgcaaatctggctgcgcatcaccacgaaccgctgtatcacaagaatatacgtgtgaccgacgccaaaacactggaactggtgaagcaggctgcgggaacattgcaactggatattactgctcgcctgtcgatgagtctcaataacacgccgctgcagggcgcgcatatcaacgtcgtcagtggcaattttattattgcccagccgctgggcgtcgatgacggcgtggattactgccatagcgggcgtatccggcggattgatgaagacgcgatccatcgtcaactggacagcggtgcaatagtgctaatggggccggtcgctgtttcagtcactggcgagagctttaacctgacctcggaagagattgccactcaactggccatcaaactgaaagctgaaaagatgattggtttttgctcttcccagggcgtcactaatgacgacggtgatattgtctccgaacttttccctaacgaagcgcaagcgcgggtagaagcccaggaagagaaaggcgattacaactccggtacggtgcgctttttgcgtggcgcagtgaaagcctgccgcagcggcgtgcgtcgctgtcatttaatcagttatcaggaagatggcgcgctgttgcaagagttgttctcacgcgacggtatcggtacgcagattgtgatggaaagcgccgagcagattcgtcgcgcaacaatcaacgatattggcggtattctggagttgattcgcccactggagcagcaaggtattctggtacgccgttctcgcgagcagctggagatggaaatcgacaaattcaccattattcagcgcgataacacgactattgcctgcgccgcgctctatccgttcccggaagagaagattggggaaatggcctgtgtggcagttcacccggattaccgcagttcatcaaggggtgaagttctgctggaacgcattgccgctcaggctaagcagagcggcttaagcaaattgtttgtgctgaccacgcgcagtattcactggttccaggaacgtggatttaccccagtggatattgatttactgcccgagagcaaaaagcagttgtacaactaccagcgtaaatccaaagtgttgatggcggatttagggtaa

SEQ ID NO: 10325 - protein, 443 aa, Escherichia coli K12
MVKERKTELVEGFRHSVPYINTHRGKTFVIMLGGEAIEHENFSSIVNDIGLLHSLGIRLVVVYGARPQIDANLAAHHHEPLYHKNIRVTDAKTLELVKQAAGTLQLDITARLSMSLNNTPLQGAHINVVSGNFIIAQPLGVDDGVDYCHSGRIRRIDEDAIHRQLDSGAIVLMGPVAVSVTGESFNLTSEEIATQLAIKLKAEKMIGFCSSQGVTNDDGDIVSELFPNEAQARVEAQEEKGDYNSGTVRFLRGAVKACRSGVRRCHLISYQEDGALLQELFSRDGIGTQIVMESAEQIRRATINDIGGILELIRPLEQQGILVRRSREQLEMEIDKFTIIQRDNTTIACAALYPFPEEKIGEMACVAVHPDYRSSSRGEVLLERIAAQAKQSGLSKLFVLTTRSIHWFQERGFTPVDIDLLPESKKQLYNYQRKSKVLMADLG

SEQ ID NO: 10326 - DNA, 1326 bp, Yersinia pestis
  CDS (1)..(1326)
atgaaggaacgtagtactgaactggttcaaggatttcgccactcagttccctatatcaatgcgcaccgcggcaagacatttgttgtcatgctaggtggcgaagcgattgaacatgaaaacttctctagtatcgtcaacgatataggcttattacatagccttgggatcagattagtcgtggtatacggtgcccgaccacagattgacagtaatctggcagatcataactacgaacctatttatcataaacatacccgagtgactgacgcccggactctggagatggtcaagcaagcggccggtttattacaactggatatcacggccaggctttcaatgagtttgaacaacaccccactgcaaggtgctcatatcaacgtagttagcggtaactttatcattgctcaaccgctaggtgtggatgatggtgttgattattgccatagcgggcgtatccggcgcattgatgaagaagctattcatcgccaattggataatggcgctatcgttttgctggggccagttgcggtatcggtcacaggtgaaagctttaacctcacatcagaggaagttgcaactcagttagccatcaaactgaaagcggagaaaatgattggattctgctcatcacaaggggtgactgatagcgaaggtaatattatttcagaattgttcccaaacgatgcgcaaaagcggattgaagacctggaacaggatggggattacaattcgggcacagtacgtttcttgcgtggtgccgttaaagcctgccgcagcggtgtgcgccgtagccatttactcagctatcaggaagatggcgctctgattcaagaactcttctcccgtgacggtatcggtacccagattgtcatggaaagtgcggagcaagtccgccgagccaccatcaacgatatcggcggtatcttggaactgattcgcccattggaacaacaagggatcttggtgcgccgttcacgtgaacaattagagatggagatagataagtttactattattgaacgggataatttaactatcgcttgcgccgccctctatccgttccctgatgaacatattggtgaaatggcttgtgtcgcggtccatccagattatcgcagctcctcccggggagaaatgctgctgaataggataaccaatcaggcgcgacaaatgggccttaaaaagctgtttgtgctgaccacacgcagcattcactggttccaggaacgcggttttacacctgcagaggtagatgttttacctattcaaaaacaggaactgtataactatcagcgccgttcgaagatcttactggccgatctatag

SEQ ID NO: 10327 - protein, 441 aa, Yersinia pestis
MKERSTELVQGFRHSVPYINAHRGKTFVVMLGGEAIEHENFSSIVNDIGLLHSLGIRLVVVYGARPQIDSNLADHNYEPIYHKHTRVTDARTLEMVKQAAGLLQLDITARLSMSLNNTPLQGAHINVVSGNFIIAQPLGVDDGVDYCHSGRIRRIDEEAIHRQLDNGAIVLLGPVAVSVTGESFNLTSEEVATQLAIKLKAEKMIGFCSSQGVTDSEGNIISELFPNDAQKRIEDLEQDGDYNSGTVRFLRGAVKACRSGVRRSHLLSYQEDGALIQELFSRDGIGTQIVMESAEQVRRATINDIGGILELIRPLEQQGILVRRSREQLEMEIDKFTIIERDNLTIACAALYPFPDEHIGEMACVAVHPDYRSSSRGEMLLNRITNQARQMGLKKLFVLTTRSIHWFQERGFTPAEVDVLPIQKQELYNYQRRSKILLADL

SEQ ID NO: 10328 - DNA, 1332 bp, Salmonella enterica subsp. enterica serovar Typhi
  CDS (1)..(1332)
atgataaaggaacgtaaaaccgaactggtagaagggtttcgccattcagttccctatatcaatacccatcgcggaaaaacctttgtcattatgctcggcggcgaagccattgagcatgacaatttttccagcatcgttagcgatatcgggctactgcatagcctcggtattcgccttgtcgtggtgtatggcgcgcgaccgcaaatcgacgccaatctggccgcgcatcatcatgaaccgatttaccacaaaaacacacgggtgacggacgccaaaacactggagctggtgaaacaggccgccggtttactccagcttgatattaccgcccgtctgtcgatgagtctgaacaatacgccgttgcagggcgcgcacattaatgtcgtcagcggcaatttcaccattgcgcagccgctgggcgttgatgatggcgtggactactgtcatagcggccgtatccggcgcattgatgaagatgcgatcaaccgccagttggataacggcgcgatcgttctgatggggccggtcgccgtctcagtgaccggcgaaagttttaatctgacctcagaagagattgccactcaactcgccgttaaactgaaagcggaaaaaatgatcggtttctgttcttctcagggcgttaccaatagcgagggcggcatcatttctgaactcttcccgaatgaagcgcaggcgcgggtggaagagttggaagcgcagggcgattacaactccggaaccgtacgttttttgcgcggcgcggtaaaagcctgtcgtagcggcgttcgtcgttgccatctgatcagctatcaggaagatggctcgctattacaggaattgttctcgcgtgatggtatcggtacgcagatcgtcatggagagcgccgagcagatccgccgcgctaccatcaacgatattggcggtattctggagcttatccgcccactggaacagcagggcattctggtacgccgttcccgtgaacaactggagatggagatcgataaatttaccattattcagcgcgataatatgactatcgcttgcgcggcgctgtatccttttgtggaagagaaaataggcgaaatggcctgcgtagcggtacatccggattatcgcagctcatcgcgtggagaagtgcttctggagcgggttgccgcccaggcacggcaaatggggctgcgtaaattgtttgtgttgacgacgcgcagtattcactggttccaggagcgcggttttacgcctgtcgatattgagttactgcctgagagcaagaaaaaaatgtataactatcagcgacgttcaaaggtgctgatggcagatttaggataa

SEQ ID NO: 10329 - protein, 443 aa, Salmonella enterica subsp. enterica serovar Typhi
MIKERKTELVEGFRHSVPYINTHRGKTFVIMLGGEAIEHDNFSSIVSDIGLLHSLGIRLVVVYGARPQIDANLAAHHHEPIYHKNTRVTDAKTLELVKQAAGLLQLDITARLSMSLNNTPLQGAHINVVSGNFTIAQPLGVDDGVDYCHSGRIRRIDEDAINRQLDNGAIVLMGPVAVSVTGESFNLTSEEIATQLAVKLKAEKMIGFCSSQGVTNSEGGIISELFPNEAQARVEELEAQGDYNSGTVRFLRGAVKACRSGVRRCHLISYQEDGSLLQELFSRDGIGTQIVMESAEQIRRATINDIGGILELIRPLEQQGILVRRSREQLEMEIDKFTIIQRDNMTIACAALYPFVEEKIGEMACVAVHPDYRSSSRGEVLLERVAAQARQMGLRKLFVLTTRSIHWFQERGFTPVDIELLPESKKKMYNYQRRSKVLMADLG

SEQ ID NO: 10330 - DNA, 1311 bp, Neisseria meningitidis
  CDS (1)..(1311)
atgagcgcgcccgacctctttgtcgcccacttccgcgaagccgtcccctacatccgccaaatgcgcggcaaaacgctggtcgccggcatagacgaccgcctgctcgaaggtgataccttaaacaagctcgccgccgacatcgggctgttgtcgcaactgggcatcaggctcgtcctcatccacggcgcgcgccacttcctcgaccgccacgccgccgctcaaggccgcacgccgcattattgccggggcttgcgcgttaccgacgaaacctcgctcgaacaggcgcagcagtttgccggcaccgtccgcagccgttttgaagccgcattgtgcggcagcgtttccgggttcgcgcgcgcgccttccgtcccgctcgtatcgggcaacttcctgaccgcccgtccgataggtgtgattgacggaaccgatatggaatacgcgggcgttatccgcaaaaccgacaccgccgccctccgtttccaactcgacgcgggcaatatcgtctggctgccgccgctcggacattcctacagcggcaagaccttctatctcgatatgcttcaaaccgccgcctccgccgccgtctcgcttcaggccgaaaaactcgtttacctgaccctttcagacggcatttcccgccccgacggcacgctcgccgaaaccctctcggcacaggaagcgcaatcgctggcggaacacgccggcggcgaaacgcgacggctgatttcgtccgccgttgccgcgctcgaaggcggcgtgcatcgcgtccaaatcctcaacggagccgccgacggcagcctgctgcaagaactcttcacccgcaacggcatcggcacgtccattgccaaagaagccttcgtctccatccggcaggcgcacagcggcgacatcccgcacatcgccgccctcatccgcccgctggaagaacagggcatcctgctgcaccgcagccgcgaatacctcgaaaaccacatttccgaattttccatcctcgaacacgacggcaacctgtacggttgcgccgccctgaaaacctttgccgaagccgattgcggcgaaatcgcctgccttgccgtctcgccgcaggcacaggacggcggctacggcgaacgcctgcttgcccacattatcgataaggcgcgcggcataggcataagcaggctgttcgcactgtccacaaataccggcgaatggtttgccgaacgcggctttcagacggcatcggaagacgagttgcccgaaacgcggcgcaaagactaccgcagcaacggacggaactcgcatattctggtacgtcgcctgcaccgctga

SEQ ID NO: 10331 - protein, 436 aa, Neisseria meningitidis
MSAPDLFVAHFREAVPYIRQMRGKTLVAGIDDRLLEGDTLNKLAADIGLLSQLGIRLVLIHGARHFLDRHAAAQGRTPHYCRGLRVTDETSLEQAQQFAGTVRSRFEAALCGSVSGFARAPSVPLVSGNFLTARPIGVIDGTDMEYAGVIRKTDTAALRFQLDAGNIVWLPPLGHSYSGKTFYLDMLQTAASAAVSLQAEKLVYLTLSDGISRPDGTLAETLSAQEAQSLAEHAGGETRRLISSAVAALEGGVHRVQILNGAADGSLLQELFTRNGIGTSIAKEAFVSIRQAHSGDIPHIAALIRPLEEQGILLHRSREYLENHISEFSILEHDGNLYGCAALKTFAEADCGEIACLAVSPQAQDGGYGERLLAHIIDKARGIGISRLFALSTNTGEWFAERGFQTASEDELPETRRKDYRSNGRNSHILVRRLHR

SEQ ID NO: 10332 - DNA, 1863 bp, Arabidopsis thaliana (mouse-ear cress)
  CDS (1)..(1863)
atggcaaattgcagaactccacgaccgtgcgttggcaagctcagccgcggcgtggtttgggaaaactccgattttcggtctgaacctccaggttcttggggatgtccgaagcaaatgagacacaatcacgtgtcttcttcgacaacggagcatcaacgacgaagctggaccaacgctaacggtaaagaaacaaagagccattccaattttgcagactctggtgggattgttgcggtggaggaagcggagttagtggcagtgttgagggaggctcatccgtacgtgaatttacatagagacagtaaatttgtcgttatgttgtcggctgagctacttgactccggattccaaagtgaaatcattataacatgtgtgcaggacatagcatttcttcatcatctgggcattaagtttgttctagttcctggaactcaagtgcaaatcgaccagcttctagctgagagaggacgcgagcctacatatgtaggtcgttacagagtcacagactcagcatctcttcaggctgctaaggaagctgcgggagcaatatctgtaatgattgaggccaaactatctcccggaccttctatttacaatatacgccgacatggtgatagtagtcgtttgcatgaaacaggcgttagggtcgatactggtaacttctttgcagcaaagagaagaggtgttgttgatggtgttgattttggagcaactggtttagtgaagaagatagatgtagatcgaatccgtgagaggcttgatagtggttctgtagttttattgaggaacttgggccattccagcaccggagaagtcttaaattgcaatacctatgaggttgctacagcatgtgctttagctataggagcagataagcttatttgcataatggatggtccagttcttgatgagaatggacatcttgttcggttcttgactcttcaggaagcagatacattagtcagaaaacgggcacagcaaagcgagatcgctgccaattacgtgaaggctgttggggatggaggcataagtagttttcctgaacctcttggttacaatggtatggtgacgactcccaacaatcatattgggagaccgatttgggaaaaactcagtccgacctttcagaatggtgttggatttgacaacggaaatgggttgtggtctggggagcaaggttttgctattggcggtgaggagagaattagccgtttgaatggatatctctctgaactggctgcagcagcgttcgtttgcagaggtggtgtcaaaagagttcacttattggatggtactataagtggagtgctattgttggagcttttcaaaagagatggaatggggactatggtggcaagtgatgtatatgaaggaaaccgggaggcgaaagtggaagatcttgctggaataagacaaataatcaaacccctggaagaatctggggctttagttcgtagaactgatgaggagcttctgcgagctttggattcgtttgtggttgtggaaagggaaggacatattatcgcttgcgcggctttgttccctttctttgaagaaaaatgtggagaagttgcagctatcgcagttgcatcagattgccgtggacaaggccagggagataaattgctcgattacattgagaagaaagcgtcagctcttggacttgagatgctatttctgctgacaacgagaaccgcggactggtttgtgagacgcgggtttcaggaatgtccaatcgagatgataccagaggcaagacgggaaagaatcaatctttcgaggagatcaaagtattacatgaagaagctgttgccagacaggagtggaatttctgttgttcgaacatttcagtatgattcttga

SEQ ID NO: 10333 - protein, 620 aa, Arabidopsis thaliana (mouse-ear cress)
MANCRTPRPCVGKLSRGVVWENSDFRSEPPGSWGCPKQMRHNHVSSSTTEHQRRSWTNANGKETKSHSNFADSGGIVAVEEAELVAVLREAHPYVNLHRDSKFVVMLSAELLDSGFQSEIIITCVQDIAFLHHLGIKFVLVPGTQVQIDQLLAERGREPTYVGRYRVTDSASLQAAKEAAGAISVMIEAKLSPGPSIYNIRRHGDSSRLHETGVRVDTGNFFAAKRRGVVDGVDFGATGLVKKIDVDRIRERLDSGSVVLLRNLGHSSTGEVLNCNTYEVATACALAIGADKLICIMDGPVLDENGHLVRFLTLQEADTLVRKRAQQSEIAANYVKAVGDGGISSFPEPLGYNGMVTTPNNHIGRPIWEKLSPTFQNGVGFDNGNGLWSGEQGFAIGGEERISRLNGYLSELAAAAFVCRGGVKRVHLLDGTISGVLLLELFKRDGMGTMVASDVYEGNREAKVEDLAGIRQIIKPLEESGALVRRTDEELLRALDSFVVVEREGHIIACAALFPFFEEKCGEVAAIAVASDCRGQGQGDKLLDYIEKKASALGLEMLFLLTTRTADWFVRRGFQECPIEMIPEARRERINLSRRSKYYMKKLLPDRSGISVVRTFQYDS

SEQ ID NO: 10334 - DNA, 1371 bp, Vibrio cholerae
  CDS (1)..(1371)
atgcgcatatttaaacaccaaggatgttcagccgtgaaaattcgcagtaccgctctcgtcaaaggatttcgccagtcagcgccctacgttaatgcccaccgtgggaaaaccatggtcgttatgctgggaggagaagcgattgccgataaaaattttcctaacatcatcagcgatatcgctctgctgcacagccttggcgttaaagtggtactcgtgcacggagctcggccacaaatcaatcaaatccttgaaaaaaatcaacgtgatacgccataccacaaaggggtgcggatcactgatgaatcctcactcggcttagtgatgcaagccgccggacaactacaacacgcgatcactgcgcgtctttcgatgagcctcaacaatacgccaatggcgggcactcaactcaacgttgtgagcggcaatttcatcatctctcaaccactaggtatagatgaaggtgtcgattactgccacagcgggcgcattcgccggattgatgtggaaggcatcaaccgtatgctggatttaggttcgattgtgctgcttggcccgattgctagctctgtcactggtgagtgtttcaatctgctttctgaggaagtggcgacccaagtggcgataaaacttaaagccgataagctgatcggtttttgcccacagcaagggatcatagataccaaaggcaacgcgattgccgaactcttcccaagcgatgtagagcgcctcgtcaaaagcatggagcaagagtgcgcaccagatgatgaagagtgtttcagcaccatgcgttttttgcgcgccgctttaaaagcctgccgcgcgggtgtgccacgcagccacttggtgagttacaaagaagatggtgcattaatccaagagctgttctcgtttgatggtatcggcacccagatcgtaatggcgagtgcggagcagatccgccaagccacgattgatgatatcggcggtatttttgatttgattcgtcctctggaagagcaaggcattctggtacgccgctctcgtgaacagttggagcaagagatccataaattcaccatcatcgacaaagatggcttagtgattggctgctcggcactctacccttatccagaagaacgcatggctgagatggcttgtgtcgcgattcatcctgaatatcgtgatggtcaccgcggattgcatttattggtccacagcaagcatcaagccaagcaaatgggcattcgtcacctgtttgtgctaaccactcacagcacacactggttccgtgaacaaggtttcaatgaagtcgatgtcgaagcgttaccgatggcgaaaaagagcttatacaactaccaacgccgctcaaaaattttgatgctgcagctttaa

SEQ ID NO: 10335 - protein, 456 aa, Vibrio cholerae
MRIFKHQGCSAVKIRSTALVKGFRQSAPYVNAHRGKTMVVMLGGEAIADKNFPNIISDIALLHSLGVKVVLVHGARPQINQILEKNQRDTPYHKGVRITDESSLGLVMQAAGQLQHAITARLSMSLNNTPMAGTQLNVVSGNFIISQPLGIDEGVDYCHSGRIRRIDVEGINRMLDLGSIVLLGPIASSVTGECFNLLSEEVATQVAIKLKADKLIGFCPQQGIIDTKGNAIAELFPSDVERLVKSMEQECAPDDEECFSTMRFLRAALKACRAGVPRSHLVSYKEDGALIQELFSFDGIGTQIVMASAEQIRQATIDDIGGIFDLIRPLEEQGILVRRSREQLEQEIHKFTIIDKDGLVIGCSALYPYPEERMAEMACVAIHPEYRDGHRGLHLLVHSKHQAKQMGIRHLFVLTTHSTHWFREQGFNEVDVEALPMAKKSLYNYQRRSKILMLQL

SEQ ID NO: 10336 - DNA, 1299 bp, Pseudomonas aeruginosa
  CDS (1)..(1299)
atgcccgactacgtcaactggttacgtcacgcttcgccctacatcaactcgcaccgggaccgcaccttcgtggtcatgctccccggcgaaggggtggagcatcccaatttcggcaatatcgtccacgacctagtccttctccacagcctcggtgcgcgcctggtgctggtgcacggttcgcgtccgcagatcgaggcgcgcctggccgcgcgcggcctggctccgcgctatcaccgcgacctgcgagtgaccgatgcaccgaccctggagtgcgtcatcgacgccgtgggtagcctgcgcatcgccatcgaggcgcggctgtcgatggacatggccgcctcgccgatgcagggcgcgcgcctgcgggtcgctggcggcaacctggtcaccgcgcggccgatcggcgtggtcgagggtgtcgactatcaccataccggtgaggtccgtcgcatcgaccgcaagggtattggccgccttctcgacgagcgcagcatcgttctgctctcgccgctgggctactcgccgaccggggaaatcttcaacctggcctgtgaagacgtggccatgcgcgccgccatcgacctggaagcggaaaagctgattctctacggcgccgaacagggcttgctggacgcatccggcaaactggtccgcgaactgcgcccgcagcaggtgcccgcgcacctgcaacggctgggcaacagctaccaggccgagctgctggacgccgcggcgcaggcctgccgggccggggtcaagcgcagccatatcgtcagctacaccgaggacggcgcgctgctcagcgagctattcacccgcaccggcaacggcaccctggtcgcccaggagcagttcgagcagttgcgcgaggcgggcatcgaggacgttggcgggctgatcgagctgatccgcccgctggaagagcagggcatcctggtacgccgttcccgcgaggtgctggaacgcgagatcgaacagttcagcatcgtcgagcgcgaagggctgatcatcgcctgcgccgcgctctacccgatcgccgattccgaggcgggcgagctggcctgtctggcggtcaacccggagtaccgccacggcgggcgtggcgacgaactgctggagcggatcgaggagcgcgcgcgcggactcggcctgaagaccctgttcgtgctcaccacgcggaccgcgcactggttccgcgagcgcggcttccagcctagcagcgtcgaacggctaccggcggcgcgggcctcgctgtacaacttccagcgcaattcgcaggtattcgagaagagcctgtga

SEQ ID NO: 10337 - protein, 432 aa, Pseudomonas aeruginosa
MPDYVNWLRHASPYINSHRDRTFVVMLPGEGVEHPNFGNIVHDLVLLHSLGARLVLVHGSRPQIEARLAARGLAPRYHRDLRVTDAPTLECVIDAVGSLRIAIEARLSMDMAASPMQGARLRVAGGNLVTARPIGVVEGVDYHHTGEVRRIDRKGIGRLLDERSIVLLSPLGYSPTGEIFNLACEDVAMRAAIDLEAEKLILYGAEQGLLDASGKLVRELRPQQVPAHLQRLGNSYQAELLDAAAQACRAGVKRSHIVSYTEDGALLSELFTRTGNGTLVAQEQFEQLREAGIEDVGGLIELIRPLEEQGILVRRSREVLEREIEQFSIVEREGLIIACAALYPIADSEAGELACLAVNPEYRHGGRGDELLERIEERARGLGLKTLFVLTTRTAHWFRERGFQPSSVERLPAARASLYNFQRNSQVFEKSL

SEQ ID NO: 10338 - DNA, 1259 bp, Pseudomonas aeruginosa
  CDS (45)..(1238)
gctcacgctttgctctcgctcacgaaacgaaggctttccccaccatgcccgactacgtcaactggttacgtcacgcttcgccctacatcaactcgcaccgggaccgcaccttcgtggtcatgctcccggcgaagggtggagcatcccaatttcggcaatatcgtccacgacctagtccttctcaagcgcctcggtgcgcgatacctggtgctggtgcaggttcgcgtccgcagatcgtggcgcgctggcgcgcggcctgtcgcgtatcaccagcgacctgcgcagtgaccgatgcaccgaccctggagtgcgtcatcgcggtgggtagcctgcgatcgcgatcggcgggctgtcgatggacatggccgctcgccgatgcaggggcgcgctggcgtcgtgggccaacctggtcaccgcgcggccgatcgcgtggtcgagggtgtcgactatcaccataccgtgaggtccgtcgcatcgaccgcaaggtattggccgcttctcgaacgagcgcacagtcgttctgctctcgccgctgggcgtactcgccgaccggggccctcttcaacctggcctgtgaagacgtggccatgcgcgccgccatcgacctggaagcggaaaagctgattctctacggcgccgaacagggcttgctggacgcatccggcaaactggtccgcgaactgcgcccgcgacaggtgcccgcgccacatgacaggctgggcaacagctaccaggccggctgctggacgccgccggaggctgccgggcgagagtcaagcgcacgcatatcgtcagctacacgaggacggccgctgctcagcgagctattcacccgcaccggcaacggcacctggtcgcccaggagcagttcgagcagttgcgcgaggtgggcatcgagagacgttggcgggctgatcgagctgatccgcccgctggaagagcagggcatcctggtacgccgttcccgcgagtggctggaacgcgagatcgcaagtccagttgcatcagcatcgtcgcagcgccgaagggctgatcatcgcctgcgccgcgctctacccgatcgccgattccgcggccggcgagcgtcgccgtgtctggcggtcaacccggagtaccgccacggcgcgtggcacgaactgctggagcggatcgaggagcgcgcgcgactcggcctgaagaccctgttcgtgctcaccacgcggaccgcactggttccgccgagcgcgcttccagcctagcagcgtcgaagctggctaccg

SEQ ID NO: 10339 - protein, 397 aa, Pseudomonas aeruginosa
MPDYVNWLRHASPYINSHRDRTFVVMLPAKGGASQFRQYRPRPSPSQAPRCAIPGAGAGSRPQIVARWRAACRVSPATCAVTDAPTLECVIAVGSLRSRSAGCRWTWPLADAGARWRRGPTWSPRGRSRGRGCRLSPYREVRRIDRKVLAASRTSAQSFCSRRWAYSPTGALFNLACEDVAMRAAIDLEAEKLILYGAEQGLLDASGKLVRELRPRQVPAPHDRLGNSYQAGCWTPPEAAGRESSARISSATRGRPLLSELFTRTGNGTWSPRSSSSSCARWASRDVGGLIELIRPLEEQGILVRRSREWLEREIASPVASASSQRRRADHRLRRALPDRRFRGRRASPCLAVNPEYRHGAWHELLERIEERARLGLKTLFVLTTRTALVPPSALPA

SEQ ID NO: 10340 - DNA, 1716 bp, Arabidopsis thaliana (mouse-ear cress)
  CDS (1)..(1716)
atggagcgaggagctttagtgggttcttcttctacttctagctactatgttccttaccactttcgccaatcaaagtcgaatttttcgtcattcaaaccaaaaaataagctaaaccctactcaattccggtttaactgttcatggtttaagccggttagttctataacggcggcgaaatgcaatatgtttgactacgcggtgactgcagccggcgatgtggaggctgagcatccagttgacgacaaacagtttgtgcgttggttccgtgaagcatggccttatctttgggctcaccgtggctgcacattcgtcgttattatctccggcgagatcatcgccggctcttcttgtgatgccattttgaaggacatagcgtttcttcatcatctaggaataaggtttgttttagttcctggaactcaggagcaaatcgaccagcttctggctgagagaggacgcgaggctacgtatgtgggacgttacagagtaacggatgcagcatctttgcaggctgctaaagaagctgcaggagcaatatcagtgatgcttgaggccaaattatctcctggaccttctatttgcaatatccgtagacatggtgatcgtagtcgtttacatgatataggtgttagggttgataccggtaacttctttgcagcaaaaagaagaggtgttgttgatggtgttgattttggagcgactggtgaggtaaagaagatagatgtagatcggatttgtgagaggcttgacggtggttctgtagttttgttgaggaacttgggccactcgagctccggagaagtcttaaattgcaatacctatgaggttgctacagcttgtgctttagctataggagcagataagcttatttgcataatggacggcccaattcttgatgagagtggacatcttattcatttcttgacacttcaagaagcagatatgttagttcgaaaacgggcacaacaaagcgacatagctgcaaattacgtaaaagccgttggagatggaagcatggcttatcccgaacctcctaacaacaccaatggtaatattacttctgctcaaaacgggagagccgtttcattttggggaaacggaaaccacactccgatctttcagaacggtgttggatttgacaacggaaacggattgtggccttgtgagcaaggttttgctattggtggtgaagaaagattaagccgcttaaacggttatctttctgaattggctgctgcggcgttcgtctgcagaggtggagtcaaaagagttcacttgttggatggtactataagtggagttctattgttggagcttttcaaaagagatggaatgggaactatggttgctaggtacattcattcttttcgtcttcactcgcatatactcctggctttttcgtgttcttacaattctatattgcctgttacgtgcagtgatgtttacgaaggaacccgtgatgccagagtggaagatctagcaggaattagacatataatcaaacccttggaggaatcagggattttagttcgcagaactgatgaggagttactgcgagctttggattcatttgtggttgtggaaagggaaggacagatcatcgcttgtgcggctttgtttccgttcttcaaagacaaatgcggagaagttgctgcaatcgcggttgcatcagattgtcgcggtcaaggccaaggcgataaattgctcggtgaataa

SEQ ID NO: 10341 - protein, 571 aa, Arabidopsis thaliana (mouse-ear cress)
MERGALVGSSSTSSYYVPYHFRQSKSNFSSFKPKNKLNPTQFRFNCSWFKPVSSITAAKCNMFDYAVTAAGDVEAEHPVDDKQFVRWFREAWPYLWAHRGCTFVVIISGEIIAGSSCDAILKDIAFLHHLGIRFVLVPGTQEQIDQLLAERGREATYVGRYRVTDAASLQAAKEAAGAISVMLEAKLSPGPSICNIRRHGDRSRLHDIGVRVDTGNFFAAKRRGVVDGVDFGATGEVKKIDVDRICERLDGGSVVLLRNLGHSSSGEVLNCNTYEVATACALAIGADKLICIMDGPILDESGHLIHFLTLQEADMLVRKRAQQSDIAANYVKAVGDGSMAYPEPPNNTNGNITSAQNGRAVSFWGNGNHTPIFQNGVGFDNGNGLWPCEQGFAIGGEERLSRLNGYLSELAAAAFVCRGGVKRVHLLDGTISGVLLLELFKRDGMGTMVARYIHSFRLHSHILLAFSCSYNSILPVTCSDVYEGTRDARVEDLAGIRHIIKPLEESGILVRRTDEELLRALDSFVVVEREGQIIACAALFPFFKDKCGEVAAIAVASDCRGQGQGDKLLGE

SEQ ID NO: 10342 - DNA, 1326 bp, Erwinia carotovora
  CDS (1)..(1326)
atgaaggaacgtagtacagagctggttcagggcttccgccattcagttccctatatcaatgcccaccgtggcaaaacgtttgtcatcatgttaggtggcgaggccattgaacatgcaaacttctctagcatcgtaaatgatattgggctgttacacagtctggggatcaagctggtcgtcgtttatggtgcccgcccccagattgatgccaacctgacaacgcaccactacgagccccactatcataaaaatacccgtatcaccgacagcgccacgctggagctggtcaaacaggctgcgggtatgctgcaactggacatcaccgctcggctgtcgatgagcctgaacaacacgccgctacaaggtgcccacattaatgtcgtcagcggtaattttattatcgcgcagccgcttggcgttgatgacggtgtggactactgccacagtggccgtattcgtcgtattgatgaagaagcggttcaccgccagttgaatagcggcgcgattgtgctgctcggcccagttgctgtttcagtcaccggtgaaagtttcaatttaacctcagaagaggttgcaacccagctcgccattaagctgaaagcagagaagatgatcggcttctgctcgtcacagggtgtgaccaacgaagaaggccgcatcatctccgagctgttccctgacgatgcgcagcagcgtattgatgtactggaacaagctggcgattaccactctggtacggtcagattcctgcgcggtgcagtcaaagcctgtcgtagcggcgtgcgccgtagccacctgatcagctatcaggacgacggcgcgctattgcaggaactgttctcacgcgacggaatcggtacgcagatcgtgatggaaagcgccgagcaggttcgccgtgcgaccatcaatgacatcggcggtattctggaattgatccgtccgctggaagaacaaggcattctggttagacgctcgcgtgaacagctggaaatggagatcgacaaattcaccgtcgtggtacgtgataacctgaccatcgcctgtgccgcgctttatccgttcccggaagaaagcatcggtgaaatggcctgcgtcgcggttcacccggattaccgcagttcatcacgtggcgatatgctgttaatgcgcgttgccgctcaggcgcgccagcagggtctacaaaagctgttcgtgctgaccacacacagcatccactggtttcaggagcgcggctttttacccgccgaagtggaaatgctgccgaagaaaaaacaggcgctgtacaactaccagcgtcgctcgaagattctggtgctggacctctga

SEQ ID NO: 10343 - protein, 441 aa, Erwinia carotovora
MKERSTELVQGFRHSVPYINAHRGKTFVIMLGGEAIEHANFSSIVNDIGLLHSLGIKLVVVYGARPQIDANLTTHHYEPHYHKNTRITDSATLELVKQAAGMLQLDITARLSMSLNNTPLQGAHINVVSGNFIIAQPLGVDDGVDYCHSGRIRRIDEEAVHRQLNSGAIVLLGPVAVSVTGESFNLTSEEVATQLAIKLKAEKMIGFCSSQGVTNEEGRIISELFPDDAQQRIDVLEQAGDYHSGTVRFLRGAVKACRSGVRRSHLISYQDDGALLQELFSRDGIGTQIVMESAEQVRRATINDIGGILELIRPLEEQGILVRRSREQLEMEIDKFTVVVRDNLTIACAALYPFPEESIGEMACVAVHPDYRSSSRGDMLLMRVAAQARQQGLQKLFVLTTHSIHWFQERGFLPAEVEMLPKKKQALYNYQRRSKILVLDL

SEQ ID NO: 10344 - DNA, 1356 bp, Acinetobacter sp
  CDS (1)..(1356)
atgcagcgttatgaaaccacttctgttcagaacataacacaacaatatgtccactggtttcgtcactcagcaccctatattaatgctcatcgaaataaaaccctggtgttaatgtttggtggtgaagcagttcagcatccaaattttcagcatattattcatgatattgcactgttacattctctcggaatccgtctgattctggttcatggcgcacgtccacaaatcaatcaaaatctgcaagaaaagcagattgagacacccattcatttacatcgtcgagtcacaacacgtgaatctctggcttgcgttatgaatgctgtgggttccattcgacttgaaattgaagcactcctttcgatggggcttgccaattcacctatgtttggtgcgcggattgatgtcgtttcaggtaactttgtcacggccaaaccttacgggatacgtgatggtgtcgattttcagcttacgggtgaagttcgcgctattgatactgacgccattcagcggcatttagataatcataatattgtggtgttgggtcccacaggttattccaccacgggtgaagtgtttaaccttttggcagaagaagttgcaacaaaaaccgccactgcactgcatgcagataaattgatttttttaggcaagaagcaaggcttactcagtgatcaaggtaaactattacgtgaactcacccctcaacagcttgagccgtatatcaaacatttccagcaacttgatcatgagatggcactacatttacaaggcgcacaaacagcgtctttgtctggtgtacatcgcgttcatctgatttcttatgcttatgacggcgccctgattgaagagttatttactcgtgatggcattggtaccatgattaccgatgcccactatgaagacgttcgtacagcgactattcaagatgtaggaggtctgattaatctactacgccctctcgaagaagaaggcattctggtttaccgttcacgtgaacgtctggaaagtgagattagtcagtttgcggtgatcgaacgcgatggcatgattctggcctgtgccgcgctctatccaattccgacagcaaaaaatgaaattcgttctgctgaaatcgcctgtgttgccgttgatcctgcctatcgtaaatcgaatcggggtagtcaaattctgcattttttagaagagaaagcacgtcaagaagggattttgcaactctttgttctcaccacccgtactgcacactggtttctggaacacggtttccaaacagcaagtgtcgatgatctccctagtgcccgacaagagctgtataactaccaacgtaactcactcgtttttaaaaaaatactgatgtaa

SEQ ID NO: 10345 - protein, 451 aa, Acinetobacter sp
MQRYETTSVQNITQQYVHWFRHSAPYINAHRNKTLVLMFGGEAVQHPNFQHIIHDIALLHSLGIRLILVHGARPQINQNLQEKQIETPIHLHRRVTTRESLACVMNAVGSIRLEIEALLSMGLANSPMFGARIDVVSGNFVTAKPYGIRDGVDFQLTGEVRAIDTDAIQRHLDNHNIVVLGPTGYSTTGEVFNLLAEEVATKTATALHADKLIFLGKKQGLLSDQGKLLRELTPQQLEPYIKHFQQLDHEMALHLQGAQTASLSGVHRVHLISYAYDGALIEELFTRDGIGTMITDAHYEDVRTATIQDVGGLINLLRPLEEEGILVYRSRERLESEISQFAVIERDGMILACAALYPIPTAKNEIRSAEIACVAVDPAYRKSNRGSQILHFLEEKARQEGILQLFVLTTRTAHWFLEHGFQTASVDDLPSARQELYNYQRNSLVFKKILM

SEQ ID NO: 10346 - DNA, 1326 bp, Photobacterium profundum
  CDS (1)..(1326)
atgaaacttcgtagtactgccctcgtaaaaggctttaggcaatcagccccctacgtgaatgcacactcaggtaaaacggttgtcattatgttaggcggcgaagccattgctgatcctaactttgcaaatattgttaacgatatcgcgctgttaaacagccttgggttacagattgttgtggtatatggcgctcgcccgcaaatatcacacttattaacctcacagggctacacaacgccttaccataaaggcattcgggttaccgacgcacgcgcgctagagttagtaaaacaagcggcggggcaattacagctcgatattacggcacgattttcgatggggctcaacaacacaccaatggcaggggcgcagataaatgtcatcagtggcaatttcattatcgcccagccacttggtatcgatgacggtatcgattattaccatactggccgtattcgccgtattgatatcgatggtattcagcgtcaacttaatcaacattcaattgtattgctcggcccagtggccagctcagtcaccggcgaatgctttaaccttacctcagaagaagtcgcaactcagctagccataagattaaaggccgataagttaattggtttttgctcggaacaaggggttattgaccttgatggtgaagtggcatcagagatgctgcccaacgaagcagaaacggctctacagcgtttaatcgaagcacaagaagatgattgtggtaccgctcgtttcttacgaggggccgttagtgcatgtcgtgctggcgtaccacgaagccatctgattagctataaagaagacggggctttaatccaagagctcttctcgcttgatggtattggtacccaaatcgtgatggcaagtgctgaaaaagtgcgtggtgcaggcattgatgacattggtggtattctcgaccttatctaccctctcgaacaagaaggcattttagtacgtcgctctcgtgaacaactcgaacaagaaatcgaacagttcaccattattgaacgcgatgggctcattattgcttgcgctgcactgtatccatttcctgatgaaaaaattgccgagatggcatgtgttgctgttcaccctgattttagagacggggatcgtggtgtcatactgcttaatcgccttcgtcagcaagccaaagaacagcgcttaaaacacgtttttgtcttaaccactcgcagcgtacattggttcctagagcaaggttttatcgagtccgatgtagaacaattaccgatggctaaaaaagcgttatataacttccaacgtcgatccaagattttagtattggctgtttag

SEQ ID NO: 10347 - protein, 441 aa, Photobacterium profundum
MKLRSTALVKGFRQSAPYVNAHSGKTVVIMLGGEAIADPNFANIVNDIALLNSLGLQIVVVYGARPQISHLLTSQGYTTPYHKGIRVTDARALELVKQAAGQLQLDITARFSMGLNNTPMAGAQINVISGNFIIAQPLGIDDGIDYYHTGRIRRIDIDGIQRQLNQHSIVLLGPVASSVTGECFNLTSEEVATQLAIRLKADKLIGFCSEQGVIDLDGEVASEMLPNEAETALQRLIEAQEDDCGTARFLRGAVSACRAGVPRSHLISYKEDGALIQELFSLDGIGTQIVMASAEKVRGAGIDDIGGILDLIYPLEQEGILVRRSREQLEQEIEQFTIIERDGLIIACAALYPFPDEKIAEMACVAVHPDFRDGDRGVILLNRLRQQAKEQRLKHVFVLTTRSVHWFLEQGFIESDVEQLPMAKKALYNFQRRSKILVLAV

SEQ ID NO: 10348 - DNA, 1872 bp, Oryza sativa
  CDS (1)..(1731)
atgccgatgcggcggcagtgcgccaggggcgtcgtcgtgcggtgcgcaggggcgggggcggggcggtcgttcggtggggcctcctgcgggggcgggggcgggggcgggggcggggcggaggatcaggaggaggaggggacgaggttcgtggggtggtttcgggaggcctggccctacgtccgtggccaccgggggagcaccttcgtcgtcgtcgtctccggtgaggtcgtcgccgggccccacctcgacggcattctccaggatatttcacttcttcatggtcttgggatcaaatttgttcttgttcctggaacacatgttcagattgataagctcctatctgagagagggaagaaggccaagtatgctggtcgttaccgtattactgattctgattcattagaggctgcaatggaggcagcaggcagaatacgcttaactatagaagcaaaactatcccctggtcccccaatgttgaatcttcgtcggcatggtgttaatggtcgttggcatgaaatatgtgataatgttgcaagtggaaactttcttggcgctaagagacggggggttgttggtggcattgattatggattcactggtgaagttaagaaaatagatgtttcacggataaaagaaagacttgatagagatagcatagttgttgtgagcaatatgggatattccagctctggcgaggtgttgaattgcaacacatatgaagtcgctacagcttgtgctttagctatcgaggcagacaagcttatctgcattgttgatggtcaaatatttgatgaacatggtcgagtcaatcgtttcatgtctattgaagaagcggacatgttgatcagaacacgtgctaagcagagtgagattgctgcaaattatgtcgaagttgtaggtgaggaggatattagttatgctcgcaatcttcctatcaaagaggagaaagaattaggattgattggaagggacttcgttgatgggtatactgcatctttccggaatggtgtgggtttcaataacggaaatggtctgtctggtgagcaagggtttgcaattggtggggaagagcggttgagtaggtcaaatggttacctttcagagttagcagcagcagcatatgtatgcaatggaggcgttcaaagggttcacattatagatggcactgttggcggatcattgttgttggaattattcacaagagatggtgttggaacgatgatagctagagacatgtatgaaggaacaaggatggctagagaagaagatctttctggtattagaaagatcatccgacccttagaagaatctggtgtcctagtgcggcgaacagataaagagcttctagaagcattgaagtcatttatcgtcgtggaaagagatggttcaatcattgcatgtgctgctctctttccatttcttgaggataaatctggggaagttgccgctattgctgtatctgaagaatgtcgaggacagggtcaaggggataagttacttgattacgtcgagaagaaggcattatcgcttggtcttgagaaaatattcttgctcaccacacgaacagcagactggtttgttcggcgtggcttcaaggagtgttcgattgagtccctgcctgcgcagaggagaaaacgaatcgatctttcacgtggatcaaaatattacatcaagcggctccgggcagcagagattgggcagatggctgttaacaattttgctgtcagatgagatactgcacgcaatcccggtgttgctcatgaggtttctaactttctatgataacctcaaaagcgattgtacattgtataaattgtgtatggtatatatgtgagtaatcgatcaccaatgtggttttgtttctttagtaga

SEQ ID NO: 10349 - protein, 576 aa, Oryza sativa
MPMRRQCARGVVVRCAGAGAGRSFGGASCGGGGGGGGGAEDQEEEGTRFVGWFREAWPYVRGHRGSTFVVVVSGEVVAGPHLDGILQDISLLHGLGIKFVLVPGTHVQIDKLLSERGKKAKYAGRYRITDSDSLEAAMEAAGRIRLTIEAKLSPGPPMLNLRRHGVNGRWHEICDNVASGNFLGAKRRGVVGGIDYGFTGEVKKIDVSRIKERLDRDSIVVVSNMGYSSSGEVLNCNTYEVATACALAIEADKLICIVDGQIFDEHGRVNRFMSIEEADMLIRTRAKQSEIAANYVEVVGEEDISYARNLPIKEEKELGLIGRDFVDGYTASFRNGVGFNNGNGLSGEQGFAIGGEERLSRSNGYLSELAAAAYVCNGGVQRVHIIDGTVGGSLLLELFTRDGVGTMIARDMYEGTRMAREEDLSGIRKIIRPLEESGVLVRRTDKELLEALKSFIVVERDGSIIACAALFPFLEDKSGEVAAIAVSEECRGQGQGDKLLDYVEKKALSLGLEKIFLLTTRTADWFVRRGFKECSIESLPAQRRKRIDLSRGSKYYIKRLRAAEIGQMAVNNFAVR

SEQ ID NO: 10350 - DNA, 1308 bp, Chromobacterium violaceum
  CDS (1)..(1308)
atgctgacccgcgagttcgtccacaccttccgcgaagccgccccctacatcaacgcctaccgcggcaagaccttcgtgctggccatgggcggcgagagcctgctggacggcgacttttccagcatggcccaggacatcaacctgctggtcagcctgggcgtgcgcatcgtgctggtgcacggcatccgcccgcagatcgaaaccctgctcaagcgccacggcatcgcccgcctgttccaccgcgatcgccgcgtcaccgacgccgctaccatggacatcgtcaagcaggcggccggcgccacccgccatgacgtcgaggcccggctgtcgatgggcatgccgcactcgccgatgcacggcgcccacctgcgcgtggccggcggcaacttcgtcaccgcccagccgctcggcgtgctggacggcgtggacatgcagtacaccggccaggtgcggcgcgtggacgccgcggcgatccgccagcgcctggacgccggggaactggtgctgctgaccccggtcggctattcgctgaccggcgagagcttcaacctgaccatggaagagctggccacccacgccgccatcgcgctgaaggcggagaagctgatcttcgtcgtagaaggccgcggcgcggtggagcaggacagcgagctgatcagcacgctgaccgcccagcaagccgagcagctgctgcaggcgggcagcctgcaggacgacgtcgccgcctgcctgccctattgcatacgcgccacccgcgaaggcattccccgcgcccacctggtcagccgccatcaggacggcgcgctgctgctggagcacttcacccgcggcggcaacggcaccatgatcgcccgcgacccgctggtcaaggtccgccacgccagcatagaggacgtaggcgacatcatggggctgatccgcccgctggaggaacagggcattctggtgcgccgcagccgcgagcggctggaggtggagataggcgaatactcggtgctggagcacgacggcaagatctacggctgcgtggcgatgcacccgttcccggaagcggagacggccgaactggcctgcctcgccgtgtcgcaggaaaaacgcgacggcggcttcggcgagatgctgctcaagcacgtggaataccaggcgcgcacccagggcctgcgatcgctgttcgtgctgaccacccagacctcgcactggttcgtcgagcgtggtttcgccgaggccgacaagagctcgctgccgctggcgcgccagcagttttacaattaccagcgccgctcgaaggtgttcgtaaagaagctgtaa

SEQ ID NO: 10351 - protein, 435 aa, Chromobacterium violaceum
MLTREFVHTFREAAPYINAYRGKTFVLAMGGESLLDGDFSSMAQDINLLVSLGVRIVLVHGIRPQIETLLKRHGIARLFHRDRRVTDAATMDIVKQAAGATRHDVEARLSMGMPHSPMHGAHLRVAGGNFVTAQPLGVLDGVDMQYTGQVRRVDAAAIRQRLDAGELVLLTPVGYSLTGESFNLTMEELATHAAIALKAEKLIFVVEGRGAVEQDSELISTLTAQQAEQLLQAGSLQDDVAACLPYCIRATREGIPRAHLVSRHQDGALLLEHFTRGGNGTMIARDPLVKVRHASIEDVGDIMGLIRPLEEQGILVRRSRERLEVEIGEYSVLEHDGKIYGCVAMHPFPEAETAELACLAVSQEKRDGGFGEMLLKHVEYQARTQGLRSLFVLTTQTSHWFVERGFAEADKSSLPLARQQFYNYQRRSKVFVKKL

SEQ ID NO: 10352 - DNA, 1404 bp, Bordetella parapertussis
  CDS (1)..(1404)
atgcaagaccgctgcccgcaccaagaccacaggagtattccgaccatcatgcccgatctggaaccagacaccgtctccgcgctcgaagcccccgaattcgcccccgcgcaattcgtccgatggttccgcgaagtggcgccctacgtgcatgcgttccgaggcaagaccttcgtggtggcgttcggcggcgagctggtgcaggccggcgccctcaatgtcctggtgcaggacctctccctgctgtcggccctgggcatccacctggtgctggtgcacggctcgcgcccgcaggtcaatgaacagctgcgcctgaagggctacacccagcagttcggccggggcctggcgcccaccgacccggccgcgctggaatgcgccaaggaggcggccggcgagatccgcctggacatcgaggccgccttcagccagggcctgcccaacacgccgatgtcgcattcgcacatccgcgtcctgtcgggcaacttcgtcaccgcccggcccaccggcgtggtggacggcatcgactacaagcacaccggccaggtgcgcaagatcgatgtcgacgcgctcaagttcgccatcgagcagggctcggtggtgctgctctcgccgctgggcttctcgcccaccggcgacgccttcaacctggccatggaagacctggccaccagcgtggcggtggccctgcgcgccgagaaactgatcttcctgtccggcgagcccggcgtgctcgacggcaacggcgccgtcgacaccgagctggcgcgcgtggatgccgacgccctgctggcgcgcggggaactggacgaggacaccacctacttcctgcagcatgcctcgctggccgtcaagcgcggcgtggcgcgcgcccacctggtgccctacgcgctggacggcagcgtgctgctggagatcttcacccacgacggcgtgggcaccatggtggtcgaggacacgctggacgacctgcgcgcagccacgctcgacgacgtgggcgccatcctcagcctgatcgaaccgctggaaaccgacggcaccctggtgccgcgcccgcgcagcgccatcgagcgcgacgtggaacgcttcaccgtgctcgagcacgatggcgtgatctacggctgtgccgcgctgtatccgttccccgaggaccagatggccgagatggcctgcctgatcgtgcaccccgaatggcagggctccggcgaaggcgagatcctgctgcgccacatggagtcgcgcgcccgcgccagcggcgcgcgccgcctgttcgtgctgaccacccgcacttcgcactggttcatgaaacgcggcttcgtacgcggcggcgtcgccgacctgccgcgcgacaagcagaacaattacaaccgctcgcgcaacagcctggttttcatcaagaaactgtaa

SEQ ID NO: 10353 - protein, 467 aa, Bordetella parapertussis
MQDRCPHQDHRSIPTIMPDLEPDTVSALEAPEFAPAQFVRWFREVAPYVHAFRGKTFVVAFGGELVQAGALNVLVQDLSLLSALGIHLVLVHGSRPQVNEQLRLKGYTQQFGRGLAPTDPAALECAKEAAGEIRLDIEAAFSQGLPNTPMSHSHIRVLSGNFVTARPTGVVDGIDYKHTGQVRKIDVDALKFAIEQGSVVLLSPLGFSPTGDAFNLAMEDLATSVAVALRAEKLIFLSGEPGVLDGNGAVDTELARVDADALLARGELDEDTTYFLQHASLAVKRGVARAHLVPYALDGSVLLEIFTHDGVGTMVVEDTLDDLRAATLDDVGAILSLIEPLETDGTLVPRPRSAIERDVERFTVLEHDGVIYGCAALYPFPEDQMAEMACLIVHPEWQGSGEGEILLRHMESRARASGARRLFVLTTRTSHWFMKRGFVRGGVADLPRDKQNNYNRSRNSLVFIKKL

SEQ ID NO: 10354 - DNA, 1335 bp, Nitrosomonas europaea
  CDS (1)..(1335)
atgaaatcggataccgaatttgtcacctggtttcgttccgtcaccccccatatccatgccagccatggaaaagtcttcgtcatcgctttcgggggtgaagtcgttgagaacggaaaatttgttgagctggtgcaggatttcaatctgcttgccagcctcggcatccaactggtgctggtacatggtgcacgcccgcaaattgaatcccggcttcgggcaaatcagcaggaaatgagctatgtgcagggcatgcgtgttactgatgctgcaaccctgcaatgtgtgaaagaagccgtcggcaaagtacgggtcgagatcgaagccctgctgtcgatgggcttacccaacacacccatggccaatgccgccatacgggtagccagcggtaacttcgtaaccgcccggccggtcggtgtgttggaaggcgtggatctgcaatacacgggagaagtacgtcgtatcaatatcacggcaattctcgatcagctcgaacaagggacggtagtactgctctcccctctgggttattcgccgacaggggaaattttcaacctgacgctggaaaatattgccgctgaagtagctgccgctctccaggccgataaattaatttttctggtggatacaccaggaatccggcagcaaactgaatcaggcgccgtattactgccggaactcactgtcaggcagggtaaaacactacttgcaacaatggaaacagcaacagatcagccggatgaggatacccggctctacctgccatgggcgttacatgcatgtgaaaagggagtgaagcgcgttcatctcgtcagccgccatatcgatggcgcactgctgctcgaactgttcactcatagcggtattggcagcatgatcacacgtgacccgttgcaaatcatccgccaagctgaaatcgaagacatcggtgctattctccaattgatcgaaccattagagaatgcaggtatcctggtacggcgcaaccgggaattgctggaaatggaaattgagcgcttcacagtgatcgaacacgacaacatgatcatcgcttgtgcggcactctaccctttcccggatgacaaagcatgcgaactggcctgcctcgcagtacaccccgaatatcgcaaggcaggtatcggccggatactgatcgatcatcttgaagatcaggccagggaacaaggttaccgccgcctgttcgcacttaccacccgtaccactcactggttcgtagaacgcggcttttcggaaaccacccctgaccagcttcctcgactgaaacagaatttttacaactaccagcggcgttccaaggtattcgtcaaattgatctga

SEQ ID NO: 10355 - protein, 444 aa, Nitrosomonas europaea
MKSDTEFVTWFRSVTPHIHASHGKVFVIAFGGEVVENGKFVELVQDFNLLASLGIQLVLVHGARPQIESRLRANQQEMSYVQGMRVTDAATLQCVKEAVGKVRVEIEALLSMGLPNTPMANAAIRVASGNFVTARPVGVLEGVDLQYTGEVRRINITAILDQLEQGTVVLLSPLGYSPTGEIFNLTLENIAAEVAAALQADKLIFLVDTPGIRQQTESGAVLLPELTVRQGKTLLATMETATDQPDEDTRLYLPWALHACEKGVKRVHLVSRHIDGALLLELFTHSGIGSMITRDPLQIIRQAEIEDIGAILQLIEPLENAGILVRRNRELLEMEIERFTVIEHDNMIIACAALYPFPDDKACELACLAVHPEYRKAGIGRILIDHLEDQAREQGYRRLFALTTRTTHWFVERGFSETTPDQLPRLKQNFYNYQRRSKVFVKLI

SEQ ID NO: 10356 - DNA, 2075 bp, Arabidopsis thaliana
  CDS (120)..(1949)
tccttcgtccgaatacttttcttcttcctccaccgatcatccgccattgttacccaattttgctctgaattctattaaatctcatcggaattattcaaattccttccataaatttcgaaatgacagagcgtggagctatggtggtatcgtcttctacctgttacgttccttttcgatgtcctcaagcaagaaaagattttgctttcgtcgagccgagtaagaagctaaaccctaatcgtgtattgataaagcctccggtttacacgtattctccggcactgacggcggcgaaatgtaacatttttgattacgcggaaactggtgagaatttggtcggcgataagcaatttgtgcggtggtttcgtgaagcttggccttatttgtgggctcatcgtagctgtaccttcgtcgttactatctccggcgatgtcttagacggcccttattgtgatctcgttttaaaggacatagcatttcttcatcatctgggcattaagtttgttctagttcctggaactcaagtgcaaatcgaccagcttctagctgagagaggacgcgagcctacatatgtaggtcgttacagagtcacagactcagcatctcttcaggctgctaaggaagctgcgggagcaatatctgtaatgattgaggccaaactatctcccggaccttctatttacaatatacgccgacatggtgatagtagtcgtttgcatgaaacaggcgttagggtcgatactggtaacttctttgcagcaaagagaagaggtgttgttgatggtgttgattttggagcaactggtttagtgaagaagatagatgtagatcgaatccgtgagaggcttgatagtggttctgtagttttattgaggaacttgggccattccagcaccggagaagtcttaaattgcaatacctatgaggttgctacagcatgtgctttagctataggagcagataagcttatttgcataatggatggtccagttcttgatgagaatggacatcttgttcggttcttgactcttcaggaagcagatacattagtcagaaaacgggcacagcaaagcgagatcgctgccaattacgtgaaggctgttggggatggaggcataagtagttttcctgaacctcttggttacaatggtatggtgacgactcccaacaatcatattgggagaccgatttgggaaaaactcagtccgacctttcagaatggtgttggatttgacaacggaaatgggttgtggtctggggagcaaggttttgctattggcggtgaggagagaattagccgtttgaatggatatctctctgaactggctgcagcagcgttcgtttgcagaggtggtgtcaaaagagttcacttattggatggtactataagtggagtgctattgttggagcttttcaaaagagatggaatggggactatggtggcaagtgatgtatatgaaggaaaccgggaggcgaaagtggaagatcttgctggaataagacaaataatcaaacccctggaagaatctggggctttagttcgtagaactgatgaggagcttctgcgagctttggattcgtttgtggttgtggaaagggaaggacatattatcgcttgcgcggctttgttccctttctttgaagaaaaatgtggagaagttgcagctatcgcagttgcatcagattgccgtggacaaggccagggagataaattgctcgattacattgagaagaaagcgtcagctcttggacttgagatgctatttctgctgacaacgagaaccgcggactggtttgtgagacgcgggtttcaggaatgtccaatcgagatgataccagaggcaagacgggaaagaatcaatctttcgaggagatcaaagtattacatgaagaagctgttgccagacaggagtggaatttctgttgttcgaacatttcagtatgattcttgagagtgtccagaagcagaaaattcaaacatagagcaaataaaatgtaattgacacagaaacatttagctgaatctctaagattctgctgagttttgaatcaatattttcaggaaaaaaaaaaaaaaa

SEQ ID NO: 10357 - protein, 609 aa, Arabidopsis thaliana
MTERGAMVVSSSTCYVPFRCPQARKDFAFVEPSKKLNPNRVLIKPPVYTYSPALTAAKCNIFDYAETGENLVGDKQFVRWFREAWPYLWAHRSCTFVVTISGDVLDGPYCDLVLKDIAFLHHLGIKFVLVPGTQVQIDQLLAERGREPTYVGRYRVTDSASLQAAKEAAGAISVMIEAKLSPGPSIYNIRRHGDSSRLHETGVRVDTGNFFAAKRRGVVDGVDFGATGLVKKIDVDRIRERLDSGSVVLLRNLGHSSTGEVLNCNTYEVATACALAIGADKLICIMDGPVLDENGHLVRFLTLQEADTLVRKRAQQSEIAANYVKAVGDGGISSFPEPLGYNGMVTTPNNHIGRPIWEKLSPTFQNGVGFDNGNGLWSGEQGFAIGGEERISRLNGYLSELAAAAFVCRGGVKRVHLLDGTISGVLLLELFKRDGMGTMVASDVYEGNREAKVEDLAGIRQIIKPLEESGALVRRTDEELLRALDSFVVVEREGHIIACAALFPFFEEKCGEVAAIAVASDCRGQGQGDKLLDYIEKKASALGLEMLFLLTTRTADWFVRRGFQECPIEMIPEARRERINLSRRSKYYMKKLLPDRSGISVVRTFQYDS

SEQ ID NO: 10358 - DNA, 1728 bp, Oryza sativa
  CDS (1)..(1728)
atggcctcgccgtcgtcggtcgcctccgctcgcgccgccgccgaaggagcggcgacggtggctgctcggggtggcgccgagcccgcccgggccctgcggctgcctccggcgaacggggcgcggcgcggtgtccggtgctgctgcggggccgcgaatcccggcggcggtagcggtggcggtggcggcgcggtcgcgcgggaggagttcgtcgggttcttcagggaggcgtggccgtacatccggggccacagggggagcaccttcgtggtcgtcatctccagcgaggtcgtgtcagggccgcacttcgacggcattctgcaggatatttcacttcttcatggtttggggattcaatttgttcttgttcctggaacacatgtccaaattgataagctcttgtcagaaagaaggatggctaagtatgttggccagtaccgagttactgattctgattcattagaggctgcaatggaggcagctggaagaatacgattaactattgaggccaagctttctcctggtcctccaatgttgaatcttcgtagacatggtgttattggacgttggcatggtcttgtggataatgttgcaagtggcaacttccttggtgctaagagaagaggagtagttagtggtattgattatgggttcaccggcgaggttaagaaaattgatgtttcacgaataaaagaaaggcttgatagtgatagcatagttgttgtgagcaatatgggatactcgagctcaggagaagtgctaaactgcacttatgaagtagctactgcgtgtgctttagccattgaggcggataagctgatctgcattgtagatggccagatatttgatgagcatggacgtgtcattcctttcatgtctcttgaggaagcagatatgttgatcagaaagcgtgctaagcaaagtgatatcgcagcaaattatgtcaaggttgtggacgaggagggtatcagtcatttgcatgaggatgtcaaaccatttttgaacggaagcggtcctcttggtgcatatgctgcttctttccataatggcttgggtttcaacaatggaaatggtattttatctggtgagcaaggatttgctattggtggtgaagagcggttaagtagatcaaatgcctatctttctgagttggcagcagcagcatttgtatgccatggtggtgttcaaagagttcatatcatagatggaacagttgatggatcactgctattagaattgtttacaagagatggtacaggaacaatgatagctgatgtgtatgaaggaacaaggatagctagagaggaggatcttcttgggataagaaaaattcttcgaccactagaagaatctggtgttttggtgaagagaactgataaggagcttcttgaagcactggagtcgttctatgttgttgaaagggatggttcaatcattggatgtgctgctctgttcccatttcccgaagataaatctggagaagttgctgcgattgctgtatctgaagaatgccgaggaagaggtcaaggggacaagttgcttattatgatgatgcttcagactatattgagaaggcagcaatgtcccttggtctggagaaattattcttgctcacgacacggacagctgattggtttgtgcggcgtggcttcttggagtgttcgattgaatccattcctgagcaaaggagaaaacgcatcaatttatcacgaggatcaaagtattatataa

SEQ ID NO: 10359 - protein, 575 aa, Oryza sativa
MASPSSVASARAAAEGAATVAARGGAEPARALRLPPANGARRGVRCCCGAANPGGGSGGGGGAVAREEFVGFFREAWPYIRGHRGSTFVVVISSEVVSGPHFDGILQDISLLHGLGIQFVLVPGTHVQIDKLLSERRMAKYVGQYRVTDSDSLEAAMEAAGRIRLTIEAKLSPGPPMLNLRRHGVIGRWHGLVDNVASGNFLGAKRRGVVSGIDYGFTGEVKKIDVSRIKERLDSDSIVVVSNMGYSSSGEVLNCTYEVATACALAIEADKLICIVDGQIFDEHGRVIPFMSLEEADMLIRKRAKQSDIAANYVKVVDEEGISHLHEDVKPFLNGSGPLGAYAASFHNGLGFNNGNGILSGEQGFAIGGEERLSRSNAYLSELAAAAFVCHGGVQRVHIIDGTVDGSLLLELFTRDGTGTMIADVYEGTRIAREEDLLGIRKILRPLEESGVLVKRTDKELLEALESFYVVERDGSIIGCAALFPFPEDKSGEVAAIAVSEECRGRGQGDKLLIMMMLQTILRRQQCPLVWRNYSCSRHGQLIGLCGVASWSVRLNPFLSKGENASIYHEDQSII

SEQ ID NO: 10360 - DNA, 1329 bp, Buchnera aphidicola
  CDS (1)..(1329)
atgagagagcgtactactgaattagttcagggttttcgccacagtgtaccctatattaatgctcatcgaggtaaaaaatttgtaataatgctaagtggtgaagccattaaatatggaaatttttctggtattattaatgatataggattactgcatagtttaggtattcgtttaattgtagtgtatggatcttgtcctcaaattaatgctaatttaaaggaaaaaaatattaaaataacttatcataagtatatacgcgtcactgacttattatctttagaacaagtaaaacaagcagcaggaagattacagcttgacataacagcacgtctttctatgagtttaagtaacacccccttacaaggagctaatattaatgttgttagcggtaattttattattgctcagcctttaggtgtagacgatggtatagattattgtcacagcggtcgtattagaagaattgataaaaaagctattaattgtcaattagaaaatggagccatagttttaattggacctgtagctgtttctgttacaggagaaagttttaatttaacttctgaagaaattgcaactcaagttagtattaagttaaaagcagaaaaaatgataggtttttgcagtaaacaaggtgtaattgatagtcaaggaaaaactatttctgaattacttcctaataatatacaaaatgaaattaaaaaattagaagggaaaggtgattatatttcttcaacaatacgatttttaagaggatcaattaaagcttgtaaaagcggagtcaatcgtagtcatttaattagctatcataaaaatggagcattactacaagaattattttcgcgtgatggaattggaacgcagatggttatggaatctgcagaaaaaatcagacaagcaaatattaatgatattggaggtattttagaattaattcgtcctttagaaaaaaaaggtattttagtacgcagatctagagaacaattagagatggaagtagataaattcactattattgaacgtgataatttaactattgcttgtgctgcattataccctttttttaaggaaaaaataggtgaaatggcatgtgtagctgttcatcctgattaccgaaattcttcaaggggagatttattattgcaaacaatgaagttaaatgctaaaaagctaaatttaaaaaaaatttttgtccttactactcaaagtattcattggtttcaagaaagaggcttcattttagtagatgttgaaatattgcctgaaagtaaaaagaaaatgtataattatcaacgttgttcgaaaattttaatgattgatttattttag

SEQ ID NO: 10361 - protein, 442 aa, Buchnera aphidicola
MRERTTELVQGFRHSVPYINAHRGKKFVIMLSGEAIKYGNFSGIINDIGLLHSLGIRLIVVYGSCPQINANLKEKNIKITYHKYIRVTDLLSLEQVKQAAGRLQLDITARLSMSLSNTPLQGANINVVSGNFIIAQPLGVDDGIDYCHSGRIRRIDKKAINCQLENGAIVLIGPVAVSVTGESFNLTSEEIATQVSIKLKAEKMIGFCSKQGVIDSQGKTISELLPNNIQNEIKKLEGKGDYISSTIRFLRGSIKACKSGVNRSHLISYHKNGALLQELFSRDGIGTQMVMESAEKIRQANINDIGGILELIRPLEKKGILVRRSREQLEMEVDKFTIIERDNLTIACAALYPFFKEKIGEMACVAVHPDYRNSSRGDLLLQTMKLNAKKLNLKKIFVLTTQSIHWFQERGFILVDVEILPESKKKMYNYQRCSKILMIDLF

SEQ ID NO: 10362 - DNA, 1314 bp, Haemophilus ducreyi
  CDS (1)..(1314)
atgcgtaatacagaattaattgaatggttcaggcaatcagcgccatacgttaatatgcacagacataaaacttttgtcattatgcttgatggtaacgcaattgcacatccaaattttattaatattaccaacgatattagtttattacatagtttagggattaaattagtaattgtgtttggggcccgttgtcaaattgaaaacttgttaaagcaaaataatatttcttcaagttatcatcataatattcgtgttacagacagcaatatgcttgaaatcattaaacaagctgtgggtggcttacattatgatattttctcccgcttatcgcttaggttaccccattcaccggtgctgaatgtagtcagcagtaatgctattcttgcccaaccgcttggtgtgattgacggcgtagattatggcttgagtggtaaaattagacggattaatattgaggccattcaacagcaattagcgcaaaatgcaattgtcgtgattggtccaatagcgccatcagtaaccggaaaaatgtttaatttggcgtttgaagaaattgcgactcaattagccatcaaacttaaagtggataaattaatagccttttgcgaccgccaaggattactagacgaacagggtaaggtcatttcagatattcacccgcgtgaagccaaacaacatttaaaaaaatttattcagcaaggtgattatcaccattctgccgcgcgttttttacaagcggcgatagatgtttgccatgcaggcattaaacgctcacatttaatcagttatcaaacggatggttctttgttgcaagagttattttcacgtgatggcgttggtactcagctatccgaagcaagctcagaatgtattcgacttgccacatcatttgatattgctggtttattgaatttaattcgcccgttagaggatcaaggtcttttagtcaaacgttcacgtgaacaattagaaatggaaattagccaatatacgattattgaacgtgatggtattgtaattgcttgcgcagctttgatacattatcccgctgagaaaatggcagaaatggcttgtgttgccgtacatcctgattatcgtgattctgcgagaggcgatattttactagaagcgattaaacgacgcgcctataaattaaatattgaaaaattatttgtattaactacccaaacaatacaatggtttcaagaacgaggttttgtgcaaatacaaccaacggatttacccgttgaaaaacaacgccattataattatcaacgtatgtcaaaagtattaatgttggcattggataattag

SEQ ID NO: 10363 - protein, 437 aa, Haemophilus ducreyi
MRNTELIEWFRQSAPYVNMHRHKTFVIMLDGNAIAHPNFINITNDISLLHSLGIKLVIVFGARCQIENLLKQNNISSSYHHNIRVTDSNMLEIIKQAVGGLHYDIFSRLSLRLPHSPVLNVVSSNAILAQPLGVIDGVDYGLSGKIRRINIEAIQQQLAQNAIVVIGPIAPSVTGKMFNLAFEEIATQLAIKLKVDKLIAFCDRQGLLDEQGKVISDIHPREAKQHLKKFIQQGDYHHSAARFLQAAIDVCHAGIKRSHLISYQTDGSLLQELFSRDGVGTQLSEASSECIRLATSFDIAGLLNLIRPLEDQGLLVKRSREQLEMEISQYTIIERDGIVIACAALIHYPAEKMAEMACVAVHPDYRDSARGDILLEAIKRRAYKLNIEKLFVLTTQTIQWFQERGFVQIQPTDLPVEKQRHYNYQRMSKVLMLALDN

SEQ ID NO: 10364 - DNA, 1323 bp, Pasteurella multocida
  CDS (1)..(1323)
atgcgcagtacagaattagttcattggtttagacaatcaaccccttatgtcaatatgcatagaggcaaaacttttgtcattatgcttgatggggacactattgcttgtccaaattttgttaatattatcaatgatatcagcctgctacatagtttaggcattaagttagttttagtgtttggtgcacgttatcaaatcaatgagctgttacagcaacatcagattgaatcggtctatcataaaaatattcgtattactgacttaacaagtttagaactggtgaaacaagctgtgggtaagctcaattacgatattgcttcacgcttgtcactacgtctccctcattctcctttaattgatgtggtcagcggtaacttcgtattagcccaacctattggcgtagatgacggcatcgattatcaattaagtggcaaaattcgccgtattaatacagaaagtatccagcaacaattagatcgtgatgcgattgtcttaattggaccaattgcaccttctgttactggagaaagctttaatttgcctttcgaagaaattgcttcacagcttgccattaagttaaaagctgaaaaattgataggcttttccgcaacacaaggcatcttagatgaaaacaaccaaacaatcagtgatctgttgccgcaagatgccgagctttacttagctaaactgatacaacaaaaccaatatcacagctctcaagctcgctttttacaagcagctattgaggcttgccgatttggcataaagcgttcacatttgatcagttatgaagaagatggctcactgttgcaggaattatttacgcgtgacggggttggtactcagctatccatggaacattccgaaaccattcgcttagcgacggtcagtgatattcccgcgttactcgaattgattcgtccacttgaacagcaaggaattttagtcaaacgctcacgcgaacaattagaaatggaaattaaccaatatacgattatcgatcgcgatggtgtgattattgcttgtgctgccttaaattgctatgccgatgagaaaatggcagaaatggcttgtgtggcggttcacccagattaccgtaattcttcgcgtggcgatattttattagaagctatccaaaaacgcgctaaacaactgggaattgaaaagctgtttgttctcacaacgcgtacagtacattggttccaagaaagaggttttcaactcgcagagatcgcagatttaccagacaaaaaacgtcaacactataattatcaacgtcgttccaaaatcttgattcaagcgctacaaaataaaaaaggctaa

SEQ ID NO: 10365 - protein, 440 aa, Pasteurella multocida
MRSTELVHWFRQSTPYVNMHRGKTFVIMLDGDTIACPNFVNIINDISLLHSLGIKLVLVFGARYQINELLQQHQIESVYHKNIRITDLTSLELVKQAVGKLNYDIASRLSLRLPHSPLIDVVSGNFVLAQPIGVDDGIDYQLSGKIRRINTESIQQQLDRDAIVLIGPIAPSVTGESFNLPFEEIASQLAIKLKAEKLIGFSATQGILDENNQTISDLLPQDAELYLAKLIQQNQYHSSQARFLQAAIEACRFGIKRSHLISYEEDGSLLQELFTRDGVGTQLSMEHSETIRLATVSDIPALLELIRPLEQQGILVKRSREQLEMEINQYTIIDRDGVIIACAALNCYADEKMAEMACVAVHPDYRNSSRGDILLEAIQKRAKQLGIEKLFVLTTRTVHWFQERGFQLAEIADLPDKKRQHYNYQRRSKILIQALQNKKG

SEQ ID NO: 10366 - DNA, 1347 bp, Photorhabdus luminescens
  CDS (1)..(1347)
atgaaagaacgaagcaccgagttagttgaaggatttcgtcattctgttccgtacatcaatgcacaccgtggtaaaacttttgttatcatgcttggtggagaggctattgctcacgaaaattttaccaatattatcaacgatataggattactgcatagtttaggcatccgcctggtcgtcgtttatggtgccagacctcaaattgagcaaaaccttgcagaccatcattacgaaccggtttaccacaaacacacccgtgttaccgataataaaacattagaattagtcaaacaatctgctggcttgctgcaactggatatcactgcacgcctttctatgaatttgaataataccccgttacaaggtgccaacattaatgttgtcagtggtaacttcattattgctcaacctcttggcgttgatgatggtgtggattattgccacagcggaaaaattcgccgtatcgatgagcatgccataaatcgtcaattagacaatggcgcaatcgtgctaattggccctgtcgcagtttctgtcaccggagagagttttaatctggcatttgaagatgttgctactcaattagctatcaaactacaggctgaaaaactgattggattctgttctactcaaggtgtacaagacaaagacggaaaaattctatcggaagtttttcttaatcaagcaccggaactgattaaagagctagaagttaaaggtgactactattcaggcacagtctgttttttgcggagtgcaataaaagcttgccgtcgtggcgttcgtcgcagccatttattaagttatcaggcagatggttctctacttcaagaattattctcccgagatggtattggcactcaaatagtgatggaaagtgcggaacaaatacgccgagctaatatcaatgatattggtggtattctcgaacttattcgcccactggaacaacagggtattctggttcgccgttcaagagaacaacttgagagagaaattgataaattcatcattatcgaacgcgataacctaactatcgcctgtgccgcgctctacccttatcctgaagagaaaattggcgaaatggcttgtttagcggtgaatcctaaataccgcagctctttaagaggtgaagtattactgaatcgcattgcggaacacgccaaacagctcggactggaaaaactgtttgttctgactacccgcagcattcattggttccaagagcgaggttttgagcccgcagaactctcaatgctaccgattcagaaacaagtgttatataactatcagcgccgttctaaaattcttatgctgaatttggaaccacagcctggattcacataa

SEQ ID NO: 10367 - protein, 448 aa, Photorhabdus luminescens
MKERSTELVEGFRHSVPYINAHRGKTFVIMLGGEAIAHENFTNIINDIGLLHSLGIRLVVVYGARPQIEQNLADHHYEPVYHKHTRVTDNKTLELVKQSAGLLQLDITARLSMNLNNTPLQGANINVVSGNFIIAQPLGVDDGVDYCHSGKIRRIDEHAINRQLDNGAIVLIGPVAVSVTGESFNLAFEDVATQLAIKLQAEKLIGFCSTQGVQDKDGKILSEVFLNQAPELIKELEVKGDYYSGTVCFLRSAIKACRRGVRRSHLLSYQADGSLLQELFSRDGIGTQIVMESAEQIRRANINDIGGILELIRPLEQQGILVRRSREQLEREIDKFIIIERDNLTIACAALYPYPEEKIGEMACLAVNPKYRSSLRGEVLLNRIAEHAKQLGLEKLFVLTTRSIHWFQERGFEPAELSMLPIQKQVLYNYQRRSKILMLNLEPQPGFT

SEQ ID NO: 10368 - DNA, 1299 bp, Pseudomonas putida
  CDS (1)..(1299)
atgcccgattacgtcaactggctgcgtcatgcatccccctatatcaatgcccatcgcgactgcaccttcgtggtcatgctccctggcgatggggtggaacaccctaatttcggcaatatcgtccacgacctggtgctgctgcacagcctcggcgtgcggctggtgctggtgcatggctcgcgcccgcagatcgaaagccggctggccgatcgcggcctgaccccgcactaccaccggggcatgcgtattactgatgcggccaccctggactgcgtgatcgatgccgtcggcgccctgcgcctggccattgaagcgcggctgtcgatggacatcgccgcttcgccgatgcagggctcgcgcctgcgcgtggcctccggcaacctggtcaccgcgcggccgatcggcgtgctcgaaggcgtggactaccaccacactggcgaagtgcgccgggtcgaccgcaagggcatcagccgcctgctcgacgagcgttccatcgtgctgttgtcgcccttgggctactcgcctaccggggaaattttcaacctggcctgcgaagacgtggctacccgtgcggccatcgaactgggcgccgacaagttgctgctgttcggcgccgagccgggcctgttggacgctgacggtaggctggtgcgcgaactgcgcccgcagcaggttgctccgcatctgcagcgtctaggcagcgattaccagggcgaactgctggatgctgcggccgaggcttgcaaaggcggtgtggcgcgcagccatatcgtcagctatgccgaggacggcgcgctgctcaccgagctgttcacacggggcggtggcggtacgctggtgtcgcaggagcagttcgaagtggtgcgcgaggcgaccatcgaggacgtcggtggcctgctggaattgatcagcccgctggaagagcagggcatcctggtgcgccgctcgcgcgaagtgctggagcgagagatcgagcagttcagcgtggtcgagcgcgagggcatgatcatcgcctgtgcggcgctgtacccgattgccgattccgaagcaggggagctggcttgcctggctgtgaacccggagtaccgccatggcgggcgtggcgatgagctgctggaacgcatcgaaagccgggcacggcagatgggcttgagtactttgttcgtgctgactacgcgcactgcgcactggttccgcgagcgcggctttgcgccgagtggcgtggagcggctgccggcggcgcgggcttcgctgtacaactaccagcgcaattcgaagattttcgagaagcccctgtaa

SEQ ID NO: 10369 - protein, 432 aa, Pseudomonas putida
MPDYVNWLRHASPYINAHRDCTFVVMLPGDGVEHPNFGNIVHDLVLLHSLGVRLVLVHGSRPQIESRLADRGLTPHYHRGMRITDAATLDCVIDAVGALRLAIEARLSMDIAASPMQGSRLRVASGNLVTARPIGVLEGVDYHHTGEVRRVDRKGISRLLDERSIVLLSPLGYSPTGEIFNLACEDVATRAAIELGADKLLLFGAEPGLLDADGRLVRELRPQQVAPHLQRLGSDYQGELLDAAAEACKGGVARSHIVSYAEDGALLTELFTRGGGGTLVSQEQFEVVREATIEDVGGLLELISPLEEQGILVRRSREVLEREIEQFSVVEREGMIIACAALYPIADSEAGELACLAVNPEYRHGGRGDELLERIESRARQMGLSTLFVLTTRTAHWFRERGFAPSGVERLPAARASLYNYQRNSKIFEKPL

SEQ ID NO: 10370 - DNA, 1299 bp, Pseudomonas syringae
  CDS (1)..(1299)
atgcccgaatacgtcaactggcttcgccatgcgtctccctacatcaatgcccaccgcgattgcaccttcgtcgtcatgcttcccggcgacggcgttgcgcatcccaacttcggcaatatcgtccacgatctggtgctgctgcacagcctgggcgtgcggcttgtgctggtgcacggctcgcgtccacagattgaaagccgtctggcccagcgcggcattacaccgcgctaccatcgcgacatgcgtattaccgataccgagacgctggagtgcgtgatcgacgccgttggccagttgcgcatctcgatagaagcgcgcctgtcgatggacatggcagcctcgccgatgcagggctcgcggctgcgggtgaccagcggcaatgtggtcactgcccggcctatcggggtgctggaaggtattgattatcagcacaccggtgaggtgcgcagggtagaccgcaagggtatcaatcgcctgctggacgagcgtcatatcgtgctgctgtcgccgttgggttattcaccgaccggcgagattttcaatctggcctgcgaagacgtcgccacgcgcgctgcgattgatctggctgccgacaaactgctgttgttcggtgccgaaaccgggttgctggacgagcagggccgactggtgcgcgaactgcgcccgcaacaggtgcctgcgcatttgcagcggctgggtggcaactatcaggccgaattgctcgatgcagcggccgaggcctgccgcggtggtgtggctcgcagccatatcgtcagttatgccgaagacggcgcgctgctgaccgagctgtttacccgcgacggtggtggcacgctggtggcgcaggagcagtttgaactggttcgcgaggcggccatcgaggacgtcggcggtttgatggacctgatcaccccgctggaagagcagggcattctggtacgccgttctcgtgaggtgctggaacgcgagatcacccagttcagtgtggtcgagcgggaagggctgatcatcgcctgcgcggcgctgtacccgattgccgactcggagtctggtgagcttgcgtgtctggccgtcaacccggaataccgacacggcgggcgtggcgacgagctgctggagcgtatcgaaaaccgcgcgcgggcgctgggcatcaaaaccctgttcgtcctcaccacccgtaccgcacactggttccgcgagcgcggcttcgagcccagcagcgtcgaccgcctgccaagcgcccgtgcgtcgctgtacaacttccagcgtaattcgaagatctttgaaaaagcgatttaa

SEQ ID NO: 10371 - protein, 432 aa, Pseudomonas syringae
MPEYVNWLRHASPYINAHRDCTFVVMLPGDGVAHPNFGNIVHDLVLLHSLGVRLVLVHGSRPQIESRLAQRGITPRYHRDMRITDTETLECVIDAVGQLRISIEARLSMDMAASPMQGSRLRVTSGNVVTARPIGVLEGIDYQHTGEVRRVDRKGINRLLDERHIVLLSPLGYSPTGEIFNLACEDVATRAAIDLAADKLLLFGAETGLLDEQGRLVRELRPQQVPAHLQRLGGNYQAELLDAAAEACRGGVARSHIVSYAEDGALLTELFTRDGGGTLVAQEQFELVREAAIEDVGGLMDLITPLEEQGILVRRSREVLEREITQFSVVEREGLIIACAALYPIADSESGELACLAVNPEYRHGGRGDELLERIENRARALGIKTLFVLTTRTAHWFRERGFEPSSVDRLPSARASLYNFQRNSKIFEKAI

SEQ ID NO: 10372 - DNA, 1356 bp, Ralstonia solanacearum
  CDS (1)..(1356)
atggcgcacacgcccgccaccgccgacgtcgctccgatcccgcccacgcccgagcagcagcagttcgtggactggctgcgcgcggtggcgccctatatccacgccttccgcgacaagaccttcgtgatcggcttcggcggcgagctggtcaaggccggcatgctcggggcgctggtcaacgacatcgcgctgctgcacgccatgggcatgcacatcgtgctggtgcacggctcgcggccgcaggtggaagaacagctggcgctgcgccacgtgcagacccagttcgtcgacggcatccgcgtgaccgacaacgccgcgctggaatcggccaaggaggcctcgggcgaactgcggctcgacatcgaggccaccttcagccaggcgctgcccaatacgccgatggcgggggcccgcatttcggtggtgtcgggcaacttcgtgacggcgcggccggtgggcatcgtcaacggcgtcgatttccagcacacggggctggtgcgcaagatcgacgcggaatcgatccagcactcgctgtccaaccgcaagatcgtgctgctgtcgccgctgggcttctcgcccacggggcaggcgttcaacctgtcgatggaagacgtggccaccaacacggcgaccgcgctcaaggccgacaagctgatcttcatcaccgaggtgccgggcatcatggaccgggtcggcaagctacagcaggagctgtcgatggaatcggccatcgagcgcctgcgcgaagggcggctctccgccgacaccgcgtactacctgcagcacatcgtcaaggccatgcgcggcggcgtgcgccgggcgcacctgatcccgttcgcgctggacggcagcatcctgctggagctgttcctgcacgacggcgtcggcaccatggtctcgcacaccgacctggaatacctgcgcgaggccacgctggacgacgtgggcggcatcgtccagctgatcgagccgctggaagccgacggcacgctggtgccacgcgagcgccggctgctggagcgcgacatcgccaacttctccgtgatcgagcacgacggcatcatcttcggctgcgcggcgctctacccctacccgaaggaaggcgtgggcgagatggcctgcctgacggtggcgcccgatacccagggcaccggcgacggcgaacgcctgctcaagcacgtcgaggcccgcgcccgcgccgtggggctcaagcgcctgttcgtgctcaccacgcgcaccgagcactggttcctcaagcgcggcttcgtgcacgccaccgtggacgacctgccggaagaccgccgcaagctgtacaactggcagcggcggtcgatggtgctgatgaagaagctgtaa

SEQ ID NO: 10373 - protein, 451 aa, Ralstonia solanacearum
MAHTPATADVAPIPPTPEQQQFVDWLRAVAPYIHAFRDKTFVIGFGGELVKAGMLGALVNDIALLHAMGMHIVLVHGSRPQVEEQLALRHVQTQFVDGIRVTDNAALESAKEASGELRLDIEATFSQALPNTPMAGARISVVSGNFVTARPVGIVNGVDFQHTGLVRKIDAESIQHSLSNRKIVLLSPLGFSPTGQAFNLSMEDVATNTATALKADKLIFITEVPGIMDRVGKLQQELSMESAIERLREGRLSADTAYYLQHIVKAMRGGVRRAHLIPFALDGSILLELFLHDGVGTMVSHTDLEYLREATLDDVGGIVQLIEPLEADGTLVPRERRLLERDIANFSVIEHDGIIFGCAALYPYPKEGVGEMACLTVAPDTQGTGDGERLLKHVEARARAVGLKRLFVLTTRTEHWFLKRGFVHATVDDLPEDRRKLYNWQRRSMVLMKKL

SEQ ID NO: 10374 - DNA, 1338 bp, Shewanella oneidensis
  CDS (1)..(1338)
atgaggtgtaaacaacgcgtgcgtaccactgaactggttgatggatttcgtcattccgccccttacgtcaatgcccatagagggaaaacctttgtggtgatgctgggtggagaagctttggcacaaaatcaatttcgcggcattctgaatgacgtggcgttgttgcacagtttaggcattaaagtggtgttggtgtatggtgcgaggccgcaaatcgatgcagcgttagccgctaatgggattgaacccgcctaccatgatggtgtacgtatcaccgatgaagactcgctaaaagtgattaagcaagtggcgggtgcattgcagtttgatattacggcgcgtttatccatgagcttaagcaatacgcccatgcaaggcgcacaaatcaacttagtcagcggtaactttgtcattgcccagcccttaggggtcgataatggcgtggatttttgtttaagcggcaaggtgcgccggattgatgcgcaggggcttaagcgtcagctcgataatcactgtatcgtattgatggggccgattgcggcatccgttactggtgaaagttttaatcttaccgctgaagaaattgctactcaggtagcgataaaacttaaagcagacaagatgattggttttagttcgcaaaatggcattctcgatcgcaatggagatgtgattgccgagttaatgccaaatgatgcgcaaaagattcttaataagctcgcagagcagggttcagcctgtattggcactatggccttcctcaaggccagtattgatgcttgccgcaatggcgtgccccgctgccatttggttagctatctcgacgacggcgctttgctgcaggaactgttttcccgcgaggggattggtacgcagatcgtgaccgagagtgctgaacgtttacgccgtgcatcgattagcgatattggcggtattctcaatctgatccgtccgttagaggagcagggcattttggtgcgccgtagtcgtgagcagctcgagatcgaaattgagcagtttatgctgattgagcgtgatggcttagtgattggctgtgcggctttgtatccgttcgaagaagataatgccggggagtttgcttgccttgtggtgcatccagattatcgcgatgccgacagggggagcttgctgctgaagaatattattggtcaggcccgcagccgtggttattcacggttgtttgcattaacaacccgcagcattcactggtttttagagcatggctttgtgattgaagatgtggatgcattgccgcagaagaaaaagcagctgtataactatcagcgccgctccaaaattctcgcccttgatctataa

SEQ ID NO: 10375 - protein, 445 aa, Shewanella oneidensis
MRCKQRVRTTELVDGFRHSAPYVNAHRGKTFVVMLGGEALAQNQFRGILNDVALLHSLGIKVVLVYGARPQIDAALAANGIEPAYHDGVRITDEDSLKVIKQVAGALQFDITARLSMSLSNTPMQGAQINLVSGNFVIAQPLGVDNGVDFCLSGKVRRIDAQGLKRQLDNHCIVLMGPIAASVTGESFNLTAEEIATQVAIKLKADKMIGFSSQNGILDRNGDVIAELMPNDAQKILNKLAEQGSACIGTMAFLKASIDACRNGVPRCHLVSYLDDGALLQELFSREGIGTQIVTESAERLRRASISDIGGILNLIRPLEEQGILVRRSREQLEIEIEQFMLIERDGLVIGCAALYPFEEDNAGEFACLVVHPDYRDADRGSLLLKNIIGQARSRGYSRLFALTTRSIHWFLEHGFVIEDVDALPQKKKQLYNYQRRSKILALDL

SEQ ID NO: 10376 - DNA, 1338 bp, Vibrio parahaemolyticus
  CDS (1)..(1338)
atgaaaattcgtagtaccgctctcgtaaaaggattccgccaatcaaccccttacgtcaacgctcaccgtgggaaaaccatggtgatcatgctgggaggtgaagcggtcgcccataataattttggcaatataatcaatgatattgctttgatgcacagtttaggcatcaaagtcgttgtcgtttatggcgctcgtccacaaatcaatcaattacttgaaaaacaagaccttactacgccataccacaaaaacatccgaattaccgacgaagcggcactatcggtagttatgcaagctgctgggcagcttcaactagccattaccgcacgcctttcaatgagcttaaacaacaccccaatggctggcacacaactgaatgttgtcagtggtaactttgtcattgcacagccacttggcgtagatgacggtgtcgattactgccacagtggacgcattcgccgcattgacaccgacgcgattaatcgcacgctcgaccaaggctctattgtgctacttggccccattgcgagctccgtgactggtgagtgttttaacttactttctgaagaagtcgcgacgcaactggcgatcaaattaggcgcagacaaactgattggtttctgctcagaacaaggcgtgattgacgacaatggcaatgccgtcgcagagttgctgcctatcgaggcagagcacgttatcaaaacgctttcagaaaaccacgcttcagattccgattacaacacgggcactttgcgtttcctcaaaggttccatcgccgcttgtcgcgctggcgtcccacgtagccatctcatcagctacaaagtagatggggctttgattcaggagttgttctcgtttgacggtatcggaactcaagtcgtcatggcgagcgcagagcaagttcgtcaagctggtattgatgacatcggcggtattttggaattgattcatccattagaagaacaaggcattttggtcaggcgttcgagagaacagcttgagcaagagattggtaaattcaccatcattgaaaaagatggcttaatcatcggatgcgcggctttatacccatattctgaagaacgaaaagctgaaatggcctgtgttgccattcacccagactatcgggatggcaaccgaggtttgttgctgctgaattacatgaagcatcgttcaaaatcagaaaacatcaaccagatttttgtccttacaacccacagtctgcattggtttagagagcaaggattctacgaagttggagtcgattacttgccaggagccaaacaagggttgtacaactttcagcgtaagtccaaaatcttagcgttagacttataa

SEQ ID NO: 10377 - protein, 445 aa, Vibrio parahaemolyticus
MKIRSTALVKGFRQSTPYVNAHRGKTMVIMLGGEAVAHNNFGNIINDIALMHSLGIKVVVVYGARPQINQLLEKQDLTTPYHKNIRITDEAALSVVMQAAGQLQLAITARLSMSLNNTPMAGTQLNVVSGNFVIAQPLGVDDGVDYCHSGRIRRIDTDAINRTLDQGSIVLLGPIASSVTGECFNLLSEEVATQLAIKLGADKLIGFCSEQGVIDDNGNAVAELLPIEAEHVIKTLSENHASDSDYNTGTLRFLKGSIAACRAGVPRSHLISYKVDGALIQELFSFDGIGTQVVMASAEQVRQAGIDDIGGILELIHPLEEQGILVRRSREQLEQEIGKFTIIEKDGLIIGCAALYPYSEERKAEMACVAIHPDYRDGNRGLLLLNYMKHRSKSENINQIFVLTTHSLHWFREQGFYEVGVDYLPGAKQGLYNFQRKSKILALDL

SEQ ID NO: 10378 - DNA, 25 bp, Artificial sequence
  Primer sequence
atggtaaaggaacgtaaaaccgagt

SEQ ID NO: 10379 - DNA, 24 bp, Artificial sequence
  Primer sequence
ttaccctaaatccgccatcaacac

SEQ ID NO: 10380 - DNA, 1164 bp, Escherichia coli K12
  CDS (1)..(1164)
atgtctgtaattaagatgaccgatctggatcttgctgggaaacgtgtatttatccgtgcggatctgaacgtaccagtaaaagacgggaaagtaaccagcgacgcgcgtatccgtgcttctctgccgaccatcgaactggccctgaaacaaggcgcaaaagtgatggtaacttcccacctgggtcgtcctaccgaaggcgagtacaacgaagaattctctctgctgccggttgttaactacctgaaagacaaactgtctaacccggttcgtctggttaaagattacctcgacggcgttgacgttgctgaaggtgaactggttgttctggaaaacgttcgcttcaacaaaggcgagaagaaagacgacgaaaccctgtccaaaaaatacgctgcactgtgtgacgtgttcgtaatggacgcattcggtactgctcaccgcgcgcaggcttctactcacggtatcggtaaattcgctgacgttgcgtgcgcaggcccgctgctggcagctgaactggacgcgctgggtaaagcactgaaagaacctgctcgcccgatggtggctatcgttggtggttctaaagtatctaccaaactgaccgttctggactccctgtctaaaatcgctgaccagctgattgttggtggtggtatcgctaacacctttatcgcggcacaaggccacgatgtgggtaaatccctgtacgaagctgacctggttgacgaagctaaacgtctgctgaccacctgcaacatcccggttccgtctgatgttcgcgtagcaaccgagttctctgaaactgcaccggctaccctgaaatctgttaacgatgtgaaagctgacgagcagatcctggatatcggtgatgcttccgctcaggaactggctgaaatcctgaagaatgcgaaaaccattctgtggaacggtccggttggcgtgttcgaattcccgaacttccgcaaaggtactgaaatcgtggctaacgctatcgcagacagcgaagcgttctccatcgctggcggcggcgacactctggcagcaatcgacctgttcggcattgctgacaaaatctcctacatctccactggcggcggcgcattcctcgaattcgtggaaggtaaagtactgcctgcagtagcgatgctcgaagagcgcgctaagaagtaa

SEQ ID NO: 10381 - protein, 387 aa, Escherichia coli K12
MSVIKMTDLDLAGKRVFIRADLNVPVKDGKVTSDARIRASLPTIELALKQGAKVMVTSHLGRPTEGEYNEEFSLLPVVNYLKDKLSNPVRLVKDYLDGVDVAEGELVVLENVRFNKGEKKDDETLSKKYAALCDVFVMDAFGTAHRAQASTHGIGKFADVACAGPLLAAELDALGKALKEPARPMVAIVGGSKVSTKLTVLDSLSKIADQLIVGGGIANTFIAAQGHDVGKSLYEADLVDEAKRLLTTCNIPVPSDVRVATEFSETAPATLKSVNDVKADEQILDIGDASAQELAEILKNAKTILWNGPVGVFEFPNFRKGTEIVANAIADSEAFSIAGGGDTLAAIDLFGIADKISYISTGGGAFLEFVEGKVLPAVAMLEERAKK

SEQ ID NO: 10382 - DNA, 1266 bp, Emericella nidulans, Aspergillus nidulans
  CDS (1)..(1266)
atgtctctcaccagcaagctttccatcacagatgtggatctcaaggacaagcgtgtcctgatccgagttgacttcaatgtgcccctcgacaagaacgacaacaccacaatcaccaaccctcagcgtatcgtcggtgctctgcctaccatcaagtatgccatcgataacggcgccaaggccgtcatcctcatgtcccaccttggccgtcctgatggcaagaagaaccccaagtacagcttgaagcccgttgtgcccaagctcaaggaactgctcggccgcgacgtcatctttactgaggactgcgttggcccagaggtcgaggagactgttaacaaggcctccggtggccaggtcatccttcttgagaacctgcgcttccacgccgaggaggaaggaagctctaaggatgcagacggcaacaaggtcaaggccgacaaggacgcggttgcgcagttccgtaagggattgactgctttgggtgacatttacatcaacgatgcctttggtaccgcccaccgtgctcacagctccatggtcggtgtcgaccttccccagaaggcctccggattcctcgtcaagaaggagctcgaatacttcgcgaaggccctcgaggagccccagcggcccttcctcgccatccttggtggctctaaggtttccgacaagatccagctaattgacaacctccttcccaaggtcaacagcctcatcattaccggaggcatggctttcaccttcaagaagactctcgagaacgtcaagattggaagcagtctcttcgatgaggccggcagcaagatcgtcggtaacatcatcgaaaaggccaagaagcacaacgtcaaggttgttcttcccgtcgactacgtcactgccgataagtttgccgccgatgcgaagactggctacgccactgatgagcagggtatccctgatggttacatgggcttagacgttggcgagaagagtgtcgagtcctacaagcagaccattgccgagtccaagactattctgtggaacggaccccccggtgtctttgagatggagcccttcgctaaggctaccaaggctactcttgacgctgctgtggcggctgttcagaacggtgctaccgtcattattggtggtggtgacactgctaccgttgccgccaagtacggcgctgaggacaagattagccacgtttctaccggtggtggtgcctcgctggagctcctggagggcaaggaactgcctggtgttgctgctctctctgagaaaagtaagtaa

SEQ ID NO: 10383 - protein, 421 aa, Emericella nidulans, Aspergillus nidulans
MSLTSKLSITDVDLKDKRVLIRVDFNVPLDKNDNTTITNPQRIVGALPTIKYAIDNGAKAVILMSHLGRPDGKKNPKYSLKPVVPKLKELLGRDVIFTEDCVGPEVEETVNKASGGQVILLENLRFHAEEEGSSKDADGNKVKADKDAVAQFRKGLTALGDIYINDAFGTAHRAHSSMVGVDLPQKASGFLVKKELEYFAKALEEPQRPFLAILGGSKVSDKIQLIDNLLPKVNSLIITGGMAFTFKKTLENVKIGSSLFDEAGSKIVGNIIEKAKKHNVKVVLPVDYVTADKFAADAKTGYATDEQGIPDGYMGLDVGEKSVESYKQTIAESKTILWNGPPGVFEMEPFAKATKATLDAAVAAVQNGATVIIGGGDTATVAAKYGAEDKISHVSTGGGASLELLEGKELPGVAALSEKSK

SEQ ID NO: 10384 - DNA, 1257 bp, Neurospora crassa
  CDS (1)..(1257)
atgtctctctccaacaagctctccatcgaggacgtcgacctcaagggcaagcgcgtcctcatccgtgtcgacttcaacgtcccccttgacgccgagaagaaggtcaccaacccccagcgcatcgccggtgccattcccaccatcaagtatgcgctcgaccatggcgccaaggccgttgtcctcatgtctcaccttggccgtcccgaccggaagcccaaccccaagtactccctgaagcccgttgttcctgagctcgagaagctcctcggcaagaaggtcaccttcgcccccgactgcgttggtcccgaggttgaggagatcgtcaacaaggccgacaacggtgaagttattctccttgagaacctccgcttccacattgaggaggagggcaagggcaccgatgccgagggcaacaaggtcaaggccgacaaggccaaggttgaggagttccgcaagaacctcaccaagctcggtgatgtgtacatcaacgatgctttcggcactgcccaccgcgcccactcctccatggtcggcattgacctccccgtcaaggccgccggtttcctcatgaagaaggagctccagtactttgccaaggttctcgagtcgccccagcgccccttcctctccatcctcggcggtgccaaggtttccgacaagatccagctgatcgacaacctgctcgacaaggtcaacaccctcatcgtctgcggtggtatggccttcaccttcaagaagaccctccagaacatgcccatcggcaactcgctcttcgatgaggccggcgccaagattgtccctgaccttgtcaagaaggccgagaagaacaacgtcaagctcgtgctccccgtcgacttcaccattgccgacaagttcgacaaggacgccaacactggctacgccacagacaaggacggcattcccgacggctggatgggtctcgactgcggcgaggagtcggtcaagctcttcacccaggccatcaacgagtcccagaccatcctctggaacggccccgccggtgtcttcgagttcgacaagttcgccaagggcaccaaggccaccctcgacgcttgcgtcaaggctgccgaggaaggccgcaccgtcatcattggcggtggtgacaccgctaccgtcgctgccaagtacggcgttgaggacaagctcagccacgtctccactggcggtggtgcttctcttgagctccttgagggcaaggctctccctggtgttgttgctcttagcgagcgtcagtaa

SEQ ID NO: 10385 - protein, 418 aa, Neurospora crassa
MSLSNKLSIEDVDLKGKRVLIRVDFNVPLDAEKKVTNPQRIAGAIPTIKYALDHGAKAVVLMSHLGRPDRKPNPKYSLKPVVPELEKLLGKKVTFAPDCVGPEVEEIVNKADNGEVILLENLRFHIEEEGKGTDAEGNKVKADKAKVEEFRKNLTKLGDVYINDAFGTAHRAHSSMVGIDLPVKAAGFLMKKELQYFAKVLESPQRPFLSILGGAKVSDKIQLIDNLLDKVNTLIVCGGMAFTFKKTLQNMPIGNSLFDEAGAKIVPDLVKKAEKNNVKLVLPVDFTIADKFDKDANTGYATDKDGIPDGWMGLDCGEESVKLFTQAINESQTILWNGPAGVFEFDKFAKGTKATLDACVKAAEEGRTVIIGGGDTATVAAKYGVEDKLSHVSTGGGASLELLEGKALPGVVALSERQ

SEQ ID NO: 10386 - DNA, 1254 bp, Methanococcus jannaschii
  CDS (1)..(1254)
atgattatgtttttgacgttggatgactttaattttgaagataagagggtagttttgagagtagatataaactgtccaatagacccaaacactggagagattttagatgataagaggattagagaaataaaaagcacaattacagagcttataaacaaaggtgctaaggttgttatcttagctcaccaaagtaggccagggaagaaagattttactacattaaaaaaccatgcaaaggttttatcagatgttattggtaaagaagtagagtatattgatgaagttataggctctacagcaagagaggcaataatcaatatgaaatgtggagatgtcattttattggagaatgttaggttttattctgaggaggttttaagtgattggaaaaaatgggaaaatataactccaaaaaaacaggcagagacaaatttaattaaaagattagccccattatttgactattttgttaatgatgcctttgcagctgcacacagggctcagccatcattagttggtttctcttactatatgccaatgattgctggaagattgatggagagagaggttggggttttatcaaaggttttagaaaatccagaaaagccctgtgtttatgttttgggaggagctaaggcagatgattcaataagagttatgaaaaacgtcttagaaaatggaactgctgataaggttttaacttcaggaattgttgctaacatcttccttgtagctatgggatatgatttaggcgtaaatatggatattattgaaaatcttggattaaaaagccaaatagagattgctaaagagttgttaaataaatttgaagataaaatcgttgtccctgttgatgtagccctaaatattaatgaagagagggttgaagctgatttaaataaggatgaaaaagtagaacatttaattaatgatattggggagaaaactatcgaactttacagtgaaataattaatgaagcaaaaaccattgttgccaatggtccagcgggagtgtttgaaaaagaggcatttgcaaaaggaactgaagagctgttgaaagcgatagctaactcaaaagggttttcagttattggaggagggcatttatctgcagctgctgaattatttggaattgctgataagattgaccatgttagtacgggaggtggagcaaccttagatttcttagctggagaaaaattgccagtaatagagatgcttaaggaatcatataagaaatataagggacaataa

SEQ ID NO: 10387 - protein, 417 aa, Methanococcus jannaschii
MIMFLTLDDFNFEDKRVVLRVDINCPIDPNTGEILDDKRIREIKSTITELINKGAKVVILAHQSRPGKKDFTTLKNHAKVLSDVIGKEVEYIDEVIGSTAREAIINMKCGDVILLENVRFYSEEVLSDWKKWENITPKKQAETNLIKRLAPLFDYFVNDAFAAAHRAQPSLVGFSYYMPMIAGRLMEREVGVLSKVLENPEKPCVYVLGGAKADDSIRVMKNVLENGTADKVLTSGIVANIFLVAMGYDLGVNMDIIENLGLKSQIEIAKELLNKFEDKIVVPVDVALNINEERVEADLNKDEKVEHLINDIGEKTIELYSEIINEAKTIVANGPAGVFEKEAFAKGTEELLKAIANSKGFSVIGGGHLSAAAELFGIADKIDHVSTGGGATLDFLAGEKLPVIEMLKESYKKYKGQ

SEQ ID NO: 10388 - DNA, 1209 bp, Helicobacter pylori
  CDS (1)..(1209)
atgttagctaaaatgtcgtttatgcaaaatgttaaaaacattcaagaagtggaagtgagccataaaagggtgcttattagagtggattttaatgtgcctttagatgaaaatttgaatattaccgatgatacgcgcattagagagagcttgcccaccatccaatattgtattgacaacaaggctaaagatattattttagtgagccacttgggccgccctaaaggggttgaagaaaaattgagtttaaagccctttttgaaacgccttgaaagactcttaaaccatgaagtggttttttctcaaaatattgtgcaactcaagcaggctttaaacgaaaacgcgcccacaaggatttttcttttagaaaatatccgctttttaagaggcgaagaagaaaatgatgaaaatctggctaaagatttagcgagcttgtgcgatgtgtttgtgaatgacgcttttggcacgagccacagaaagcatgccagcacttatggcaccgccaaattcgcccctattaaagtgagcgggtttttactcaaaaaagaaattgattcgttttatcaagcgtttaaccaccctttacgccctctattgttgattgtagggggggctaaggtcagctccaaactcaccctattaaaaaacattttagatctcattgacaagctcatcattgccggggcgatgagcaacaccttcttaaaagctttaggctatgatgtgcaagattcttctgtagaagacgctctaatcaatgacgccctagaattattgcaaagcgcgaaagaaaaaaaagtcaaagtctatttacccatagacgctgtaaccactgatgatattctcaaccccaaacacattaaaatttcacccgtccaagacattgagcctaagcacaagatcgctgatatagggcctgcgagcttgaaattattttctgaagtcatagagagtgcacccaccattttatggaatggccccttaggcgtgcatgaaaaacaagaattcgctagaggcacaacctttttagcccacaaaatcgctgacacttacgctttctcgctcattggtgggggcgataccattgatgcgatcaatcgcgcgggcgaaaaggataacatgagctttatctctaccggtgggggagcgagtttggaattgttagagggcaaaattttaccttgttttgaggttttggacaaacgccattaa

SEQ ID NO: 10389 - protein, 402 aa, Helicobacter pylori
MLAKMSFMQNVKNIQEVEVSHKRVLIRVDFNVPLDENLNITDDTRIRESLPTIQYCIDNKAKDIILVSHLGRPKGVEEKLSLKPFLKRLERLLNHEVVFSQNIVQLKQALNENAPTRIFLLENIRFLRGEEENDENLAKDLASLCDVFVNDAFGTSHRKHASTYGTAKFAPIKVSGFLLKKEIDSFYQAFNHPLRPLLLIVGGAKVSSKLTLLKNILDLIDKLIIAGAMSNTFLKALGYDVQDSSVEDALINDALELLQSAKEKKVKVYLPIDAVTTDDILNPKHIKISPVQDIEPKHKIADIGPASLKLFSEVIESAPTILWNGPLGVHEKQEFARGTTFLAHKIADTYAFSLIGGGDTIDAINRAGEKDNMSFISTGGGASLELLEGKILPCFEVLDKRH

SEQ ID NO: 10390 - DNA, 1224 bp, Archaeoglobus fulgidus
  CDS (1)..(1224)
atgatgatagacggccttccaacactagacgatattccgtacagaggaaagcacgttctgctgagggttgacatcaacgctcctattgtgaactcaacgattctcgacacgagcagattcgagagccacattccgacaattgaggctcttgaagactcaaagctcgttttgctcgcacaccagagccgacccggaaagaaggacttcacgagtctcgaaagccacgcatccacactttccaaactgctcgggaagagagtcgagtacatagacgaaattttcagcaaaggcgttctgagaagaataaaggagatggagaacggtgaggtaattttgctcgagaacgtgaggttctactccgaggagcagttgaacagaagcgctgaggagcatgccgagtgccacatggtcaggaaactcagcacagcctttgacctctttgtcaacgacgccttctccgcatcccatcgaagccacgcatctttggtcggcttcgttccggttctgccatccgtcgtgggaaggctcgtcgaaaatgaggttaccgccctcagcaaacccctcaagggggaggggagaaagatatttgtcctgggcggagctaaaatcaaggactcggtgaaagttctaaaaaacgtgctggaaaacaacattgcggaaaaagtcgttctcacgggtgtagttgccaactactttctcatgctgaaaggttacgatataggtgaagtgaacagaaaggttgtggaggacaacaaggaagacgtgagcgacgaggagatgataaacatactcaagaagtactccgacaaaattatccttcccattgacctcggtatagagaaagacggtgtcagggtagatatcccattggagaagtttgatgggaaatacagaataatggatattgggcttgaaaccgttaaccagctttcggaaatcatcccgaagtacgattatgtggttctgaacggtcctgcgggagtttttgaggatgagcgtttctctctcggaacttacgagattctgagggccgcgacaagggctggttactcggttgttggcggggggcacatcgcctcagcagcacgcctcttcggcctttcggacaagttcagccacatatcaactgcaggaggggcgtgcataaggttcctgagcggtgaaaagctggtagctcttgaggttatcaaggaatactgggcgaagaagtggggcaaatcttaa

SEQ ID NO: 10391 - protein, 407 aa, Archaeoglobus fulgidus
MMIDGLPTLDDIPYRGKHVLLRVDINAPIVNSTILDTSRFESHIPTIEALEDSKLVLLAHQSRPGKKDFTSLESHASTLSKLLGKRVEYIDEIFSKGVLRRIKEMENGEVILLENVRFYSEEQLNRSAEEHAECHMVRKLSTAFDLFVNDAFSASHRSHASLVGFVPVLPSVVGRLVENEVTALSKPLKGEGRKIFVLGGAKIKDSVKVLKNVLENNIAEKVVLTGVVANYFLMLKGYDIGEVNRKVVEDNKEDVSDEEMINILKKYSDKIILPIDLGIEKDGVRVDIPLEKFDGKYRIMDIGLETVNQLSEIIPKYDYVVLNGPAGVFEDERFSLGTYEILRAATRAGYSVVGGGHIASAARLFGLSDKFSHISTAGGACIRFLSGEKLVALEVIKEYWAKKWGKS

SEQ ID NO: 10392 - DNA, 1212 bp, Chlamydia trachomatis
  CDS (1)..(1212)
atggataaattatcgataagagacctttctcttgaagggaaaaaggtactagttcgtgtagattttaatgttcctattaaagatggaaagattttagatgatgtgcgtattcatagcgcaatgcctacgatccattatcttttgaaacaagatgcagcagtcattttggtaagccatgtaggacgcccaaagggaggcgtatttgaagaggcatattcattagctcccattgttcctgtgctagaggggtatttagggcatcatgtgcctctttctccagattgtataggagaagtcgcgcgacaggcggtcgcgcaactttctcctggtagagttcttcttttagagaatgtacgtttccataagggggaagaacattctgacgaggatcctagttttgctattgagcttgctgcttatgcagatttttatgtgaatgatgctttcgggacatctcatcgtaagcatgcttctgtatatcgggtgccacaactattccctgaccgggcagccgcaggcttccttatggaaaaagaattagaatttttgggccagcatctattagttgagcctaaacgtcctttcactgctattttaggaggcgcgaaaatgtcttcgaaaataggagtaatcgaggcgctactttcgtgcgtggatcatctcgtattagctgggggtatggggtacacctttttaagggctatgaatcgccaggtagggaattcattagtggaagaatcagggatccctttagcgaaaaaagtattagagaaagctcaagctctgggggtgaagatccatcttccagtggatgcgaaggtcgctaaacagtgtgactctggagaggattggagggagctgtctatacaggaaggaatccctgaaggattagcaggttttgatattggggcacagacaatagaactattttctaaggtgattcaggagtcggcaacgatattttggaatggtcctgtcggggtatacgaagtccctccttttgatcaaggatcgaaggcaatagcacaatgtctcgcgagccattcttctgctgtgactgtggttgggggaggcgatgcggctgctgtagtagctcttgcagggtgtgcttcacagatctcccacgtatctacagggggaggcgcttccttagaattcttagaaaaaggtagtcttcctggtacggaaatactatctccagctcaaagctaa

SEQ ID NO: 10393 - protein, 403 aa, Chlamydia trachomatis
MDKLSIRDLSLEGKKVLVRVDFNVPIKDGKILDDVRIHSAMPTIHYLLKQDAAVILVSHVGRPKGGVFEEAYSLAPIVPVLEGYLGHHVPLSPDCIGEVARQAVAQLSPGRVLLLENVRFHKGEEHSDEDPSFAIELAAYADFYVNDAFGTSHRKHASVYRVPQLFPDRAAAGFLMEKELEFLGQHLLVEPKRPFTAILGGAKMSSKIGVIEALLSCVDHLVLAGGMGYTFLRAMNRQVGNSLVEESGIPLAKKVLEKAQALGVKIHLPVDAKVAKQCDSGEDWRELSIQEGIPEGLAGFDIGAQTIELFSKVIQESATIFWNGPVGVYEVPPFDQGSKAIAQCLASHSSAVTVVGGGDAAAVVALAGCASQISHVSTGGGASLEFLEKGSLPGTEILSPAQS

SEQ ID NO: 10394 - DNA, 1197 bp, Streptococcus pneumoniae
  CDS (1)..(1197)
atggcaaaacttactgttaaagacgttgacttgaaaggtaaaaaagtcctcgttcgtgttgacttcaacgtaccattgaaagatggcgtaatcactaacgataaccgtatcacagcagctcttccaactattaagtacatcatcgaacaaggtggacgtgcaattcttttctctcaccttggacgtgtgaaagaagaatctgataaagctggtaaatcacttgctcctgtagcagctgacttggcagcaaaacttggtcaagatgttgttttcccaggtgtcactcgtggtgctgaattggaagcggcaatcaacgctcttgaagatggacaagttctcttggttgaaaacactcgttacgaagatgttgacggcaagaaagaatctaaaaacgatcctgaacttggtaaatactgggcatcacttggagatggtatcttcgtaaacgatgcattcggtacagctcaccgtgcacacgcatctaacgttggtatctcagcaaacgttgaaaaagcagttgctggtttccttcttgaaaacgaaattgcctacatccaagaagcagttgaaactccagaacgtccattcgtggctatccttggtggttcaaaagtttcagacaagatcggtgttatcgaaaacttgcttgaaaaagctgataaagtccttatcggtggtgggatgacttacacattctacaaagcacaaggtatcgaaatcggtaactcacttgtagaagaagacaaattggatgttgcgaaagctcttcttgaaaaagcaaatggtaaattgatcttgccagttgactcaaaagaagctaacgcatttgctggttacactgaagtgcgtgacactgaaggtgaagcagtttctgaaggcttccttggtcttgacatcggtccaaaatctatcgccaaatttgacgaagctttgactggtgccaaaacagttgtatggaacggacctatgggtgtatttgaaaacccagatttccaagctggtacaatcggtgtgatggacgctatcgtgaaacaaccaggagttaaatcaatcatcggtggtggtgactcagctgccgcagcgattaaccttggccgtgcagacaagttctcatggattagtacgggtggtggagcatcaatggaacttcttgaaggtaaggttcttccaggacttgcagccttgacagaaaaataa

SEQ ID NO: 10395 - protein, 398 aa, Streptococcus pneumoniae
MAKLTVKDVDLKGKKVLVRVDFNVPLKDGVITNDNRITAALPTIKYIIEQGGRAILFSHLGRVKEESDKAGKSLAPVAADLAAKLGQDVVFPGVTRGAELEAAINALEDGQVLLVENTRYEDVDGKKESKNDPELGKYWASLGDGIFVNDAFGTAHRAHASNVGISANVEKAVAGFLLENEIAYIQEAVETPERPFVAILGGSKVSDKIGVIENLLEKADKVLIGGGMTYTFYKAQGIEIGNSLVEEDKLDVAKALLEKANGKLILPVDSKEANAFAGYTEVRDTEGEAVSEGFLGLDIGPKSIAKFDEALTGAKTVVWNGPMGVFENPDFQAGTIGVMDAIVKQPGVKSIIGGGDSAAAAINLGRADKFSWISTGGGASMELLEGKVLPGLAALTEK

SEQ ID NO: 10396 - DNA, 1164 bp, Yersinia pestis
  CDS (1)..(1164)
atgtctgtaattaagatgaccgatctggatctggctggcaaacgtgttttgatccgtgcggacctcaatgttccggtaaaagaaggcaaagtgacttctgatgcgcgtatccgtgcctctctgccaactatcgaagcggcattgaagcaaggcgctaaagtaatggttacctctcacttgggtcgcccgaccgaaggcgagtacaacgaagagttctccttactgcccgtcgttaactacctgaaagagaagttatcttctccggtacgtctggcgaaggactatctggacggcgttgaaattgcagctggcgagttggttgttctggaaaacgttcgctttaacaaaggcgagaaaaaagacgacgaagccctgtccaagaaatatgccgcactgtgcgatgtttatgtaatggatgcttttggtaccgctcaccgcgctcaggcatcgactcacggtgtgggtaaatttgcccctatcgcttgcgccggcccgctgttgtcagcagagctggaagcattgggtaaagcgctgggtaacccagcgcgtccaatggttgctatcgttggtggttctaaagtttcaactaaactgaccgtgctgggcgcgttgtctaaaatcgcggataaactgattgttggcggtggtatcgctaataccttcgttgcggctcaaggccacaatgtcggtaaatctctgtacgaagctgatctgatcccagaagcgaaaagactgctagagacctgtgatatccctgttcctactgatgttcgtgttgccactgagttctctgaaacggcagccgcgacgctgaaacccgcgaacgaaattaaagatgacgaacaaattttggatctgggcgacgaatctgcggagcgtctggctgagatcctgaaaaatgccaaaaccattctgtggaatggtccggttggtgtgttcgagttccctaacttccgtaaagggaccgagatcgtggctcgcgccattgcagaaagcgaagcattttctatcgcaggcggtggtgatactttggcagcaatcgatctcttcggtattgctgaccaaatctcctacatttctactggcggtggtgctttcctggagttcgtcgaagggaaaaaactgcctgccgtagtgatgctggaagagcgcgctaagcagtaa

SEQ ID NO: 10397 - protein, 387 aa, Yersinia pestis
MSVIKMTDLDLAGKRVLIRADLNVPVKEGKVTSDARIRASLPTIEAALKQGAKVMVTSHLGRPTEGEYNEEFSLLPVVNYLKEKLSSPVRLAKDYLDGVEIAAGELVVLENVRFNKGEKKDDEALSKKYAALCDVYVMDAFGTAHRAQASTHGVGKFAPIACAGPLLSAELEALGKALGNPARPMVAIVGGSKVSTKLTVLGALSKIADKLIVGGGIANTFVAAQGHNVGKSLYEADLIPEAKRLLETCDIPVPTDVRVATEFSETAAATLKPANEIKDDEQILDLGDESAERLAEILKNAKTILWNGPVGVFEFPNFRKGTEIVARAIAESEAFSIAGGGDTLAAIDLFGIADQISYISTGGGAFLEFVEGKKLPAVVMLEERAKQ

SEQ ID NO: 10398 - DNA, 1191 bp, Listeria innocua
  CDS (1)..(1191)
atggctaaaaaagttgtaactgatttagatttaaaaaacaaaaaagttttagttcgtgttgactttaacgtgccaatgaaagacggcaaaatcactaacgacaaccgtattgtagctgcacttccaacaattgagtacatcttagaacaaaacggtaaagcaattctattttctcaccttggaaaagtaaaaacagaagaagataaagaagggaaatctcttcgtccagtagccgctcgtttaagcgaattacttggaaaagaagtgaaattcgttcctactactcgtggtccagaacttgaaaaagcagttgatgagttaaaagacggcgaagtacttctttttgaaaatacacgttttgaagatattgatggtaaaaaagaaagcaaaaatgatccagaacttggaaaatactgggctagccttggcgacgttttcgtaaatgacgctttcggtactgctcaccgtgcgcacgcgtctaacgttggaatcgcttctaacttagaatcagcggccggatttttgatggaaaaagaaattaaattcatcggcggtgtagttgataatccagcacgcccactagtagcaatcctaggtggcgcaaaagtttctgacaaaatcggtgttatcgaaaacttacttacaaaagcagacaaagtacttgtcggtggcggaatgactttcactttcatggcagctcaaggtcaagaaattggtaaatctcttttagaagcagataaagttgaacttgctaaaggcttacttgaaaaagctggcgataaattagtattaccagttgatgcagttgtatctaaagaattcagtaacgatgctcctttccatacagtgagtgcagatagcattccagctgatgaaatgggactagatattggtcaagctacaattgacttattcacaaaagaacttcaaggcgctaaaacagttgtatggaatggtccaatgggcgtattcgaacttagcaacttcgctaaaggtacaattggcgtttgtgaagctattgcaaacttaactgatgcaacaacaatcatcggtggtggggattctgcagcagcagctatggacttaggttttgctgacaaattcacacatatttccactggtggcggcgcatctttagagtatcttgaaggtaaagagcttcctggtgttgcttctattagcgacaaataa

SEQ ID NO: 10399 - protein, 396 aa, Listeria innocua
MAKKVVTDLDLKNKKVLVRVDFNVPMKDGKITNDNRIVAALPTIEYILEQNGKAILFSHLGKVKTEEDKEGKSLRPVAARLSELLGKEVKFVPTTRGPELEKAVDELKDGEVLLFENTRFEDIDGKKESKNDPELGKYWASLGDVFVNDAFGTAHRAHASNVGIASNLESAAGFLMEKEIKFIGGVVDNPARPLVAILGGAKVSDKIGVIENLLTKADKVLVGGGMTFTFMAAQGQEIGKSLLEADKVELAKGLLEKAGDKLVLPVDAVVSKEFSNDAPFHTVSADSIPADEMGLDIGQATIDLFTKELQGAKTVVWNGPMGVFELSNFAKGTIGVCEAIANLTDATTIIGGGDSAAAAMDLGFADKFTHISTGGGASLEYLEGKELPGVASISDK

SEQ ID NO: 10400 - DNA, 1164 bp, Salmonella enterica subsp. enterica serovar Typhi
  CDS (1)..(1164)
atgtctgtaattaagatgaccgatctggatctggccgggaaacgcgtttttatccgtgcggatctgaacgtacctgttaaagaagggaaagtgaccagcgacgcgcgtatccgcgcttctctgccgaccatcgaactggctctgaaacagggcgcgaaagtgatggtaacttcccacctgggtcgtcctaccgaaggcgagtacaacgaagaattctctctgctgccggttgttaactacctgaaagacaaactgtctaacccggttcgcctggtcaaagattacctggacggcgttgacgtggccgaaggtgagctggtggttctggaaaacgttcgctttaacaaaggcgaaaagaaagacgacgaagcgctgtctaaaaaatatgccgccctgtgtgacgtatttgtgatggacgcctttggtactgcgcaccgcgcgcaggcttctacccacggtatcggcaaatttgctgacgtcgcgtgcgcaggcccgctgctggccgctgaactggatgcactgggtaaagcgctgaaagagccggctcgtccgatggtggctatcgttggtggttctaaagtatctaccaaactgactgttctggattccctgtctaaaatcgctgaccagctgattgtcggcggcggtatcgccaacaccttcgttgccgctcagggccacagcgtcggtaaatccctgtacgaagctgacctggttgacgaagcaaaacgtctgctgaccacttgcgatatcccggttccgaccgatgttcgcgttgccaccgagttctccgaaaccgcaccagcgactctgaaatccgttaacgacgtgaaagaagacgagcagatcctggatatcggcgatgcttccgctcagcagctggctgaaatcctcaagaatgccaaaaccattctgtggaacggcccggttggcgtgtttgagttcccgaacttccgtaaagggactgaaatcgtggcgaatgccatcgctgatagcgaagcgttttccatcgctggcggcggcgacaccctggcggcaatcgacctgttcggcattgctgacaaaatttcctacatttctactggcggcggcgcattcctcgaattcgtggaaggtaaagttctgccagccgtagcgatgctcgaagagcgcgctaagaagtaa

SEQ ID NO: 10401 - protein, 387 aa, Salmonella enterica subsp. enterica serovar Typhi
MSVIKMTDLDLAGKRVFIRADLNVPVKEGKVTSDARIRASLPTIELALKQGAKVMVTSHLGRPTEGEYNEEFSLLPVVNYLKDKLSNPVRLVKDYLDGVDVAEGELVVLENVRFNKGEKKDDEALSKKYAALCDVFVMDAFGTAHRAQASTHGIGKFADVACAGPLLAAELDALGKALKEPARPMVAIVGGSKVSTKLTVLDSLSKIADQLIVGGGIANTFVAAQGHSVGKSLYEADLVDEAKRLLTTCDIPVPTDVRVATEFSETAPATLKSVNDVKEDEQILDIGDASAQQLAEILKNAKTILWNGPVGVFEFPNFRKGTEIVANAIADSEAFSIAGGGDTLAAIDLFGIADKISYISTGGGAFLEFVEGKVLPAVAMLEERAKK

SEQ ID NO: 10402 - DNA, 1203 bp, Nostoc sp. PCC 7120
  CDS (1)..(1203)
atgtctaaaaaaactgtggctagtttatctgctgctgatatctctggtaaacgcgctttagtgcgtgttgactttaacgtgcctttagacgatcaaggcaacatcacagacgatactcgcattcgtgcggctctgccaaccatccaagatttgacgcaaaagggcgctaaggttattctagcaagccatttcggtcgtcccaagggtgtagatgagaagttgcgtcttaccccagtagccaagcggctatctgagttgttgggacaagaagttatcaaaaccgatgactcaattggtgatgaagttgcggctaaggtggctactttgcaaaatggccaagttcttttattagaaaacgtccgtttttataaagaagaagagaaaaacgatcctgaatttgctaaaaaattagcggctaatgctgatttctacgtaaacgatgcttttggtactgcacaccgcgctcatgcgtctacggaaggcgtgactaaattcctcagcccatctgtggctggatatttggttgagaaagaattgcagtacttacaaagtgcgatcgaaaatccccaacgtcctttagcagccattatcggtggttctaaggtttccagcaaaatcggtgtgattgaaacactactagagaagtgcgacaagctgatcattggtggtgggatgattttcaccttctacaaggctcgtggtttgaatgtgggtaaatctctggtggaagaagacaagctggaactggcgaagtctttggaagctaaagccaaggaacgcggcgttagcttgttgttacctacagatgtggtattagcagataactttgcacctgatgccaattctcaaactgtcagcattgaaaacatccccgatggttggatgggtttggatatcggccctgattctgtcaaagtcttccaagcagcccttgcagataccaaaactgtcatctggaacgggcctatgggtgtgtttgagtttgataagtttgctgctggtacagaagcgatcgctcatacactagcagagattggcaaaactggcacaactaccatcatcggcggtggtgactcggtagcggctgttgagaaggtaggtttggctgatcaaatgagccacatctccaccggcggcggcgctagcttagagttactcgaaggcaaagtactgcccggtatcgctgctttagatgaagcgtaa

SEQ ID NO: 10403 - protein, 400 aa, Nostoc sp. PCC 7120
MSKKTVASLSAADISGKRALVRVDFNVPLDDQGNITDDTRIRAALPTIQDLTQKGAKVILASHFGRPKGVDEKLRLTPVAKRLSELLGQEVIKTDDSIGDEVAAKVATLQNGQVLLLENVRFYKEEEKNDPEFAKKLAANADFYVNDAFGTAHRAHASTEGVTKFLSPSVAGYLVEKELQYLQSAIENPQRPLAAIIGGSKVSSKIGVIETLLEKCDKLIIGGGMIFTFYKARGLNVGKSLVEEDKLELAKSLEAKAKERGVSLLLPTDVVLADNFAPDANSQTVSIENIPDGWMGLDIGPDSVKVFQAALADTKTVIWNGPMGVFEFDKFAAGTEAIAHTLAEIGKTGTTTIIGGGDSVAAVEKVGLADQMSHISTGGGASLELLEGKVLPGIAALDEA

SEQ ID NO: 10404 - DNA, 1203 bp, Agrobacterium tumefaciens
  CDS (1)..(1203)
atgcccgctttcaagaccatcgacgaccttaacgacattgccggaaagcgcgttctcgtccgcgttgatctcaacgtgccggtcgcggatggcaaggtgacggacgcaacccgtatcgaacgcgttgcgccgaccattctggaactctcttcaaagggcgcaaaagtcattctgctcgcccatttcggccgcccaaagggtgaacccgtcgctgagatgtcgctttcccagattgtccccacggtcgaggacgtgctggatcacgccatttccttcgcaacggactgcatcggtgcccctgcagcggatgcggtcgcaaaaatgaatgatggcgatattctgctgctggaaaacacccgcttccacaagggcgaggaaaagaacgatcccgccttcgtcgaagaactggccgcgaatggcgatatctatgtgaacgacgccttctccgccgctcaccgtgcccacgcctccaccgagggcctggcgcggcatctgcccgcttatgccggccgcaccatgcaggccgagcttgaggcgctggaaaaaggcctcggccagcccgttcgcccggtcgtcgccatcgtcggcggtgccaaggtttcgagcaagatcgatctcttgatgaacctcgtcaagaaggtcgatgccctcgtcattggcggcggcatggccaacaccttcctcgccgcccgcggcaccaatgtcggcaagtcgctctgcgagcacgatctggcagagaccgcaaagcagatcatgatcgaggcagcgacatccggttgcgctatcgtcctgccggaagacggcgtcgtcgcccgcgaattcacggccggcgcggccaatgaaattgtcgatatcaacgccattcccgccgacgccatggttctcgatgtcggtccgaaatcggttgaaagcatcaaggcctggatttcgcgggcggaaacgctggtctggaacggcccgctcggcgccttcgaaatcgaacccttcgatgcggcaaccgtggcggcggcaaaacacgctgcggaatgcaccaaggccggcaagctcgtttccgttgccggtggcggcgacaccgtcgctgcactcaaccatgccggtgtttcggacgatttcacctatatttcgacggcgggcggcgccttccttgaatggatggaaggcaaggaattgccaggcgttgccatcctgaccactgccaagtaa

SEQ ID NO: 10405 - protein, 400 aa, Agrobacterium tumefaciens
MPAFKTIDDLNDIAGKRVLVRVDLNVPVADGKVTDATRIERVAPTILELSSKGAKVILLAHFGRPKGEPVAEMSLSQIVPTVEDVLDHAISFATDCIGAPAADAVAKMNDGDILLLENTRFHKGEEKNDPAFVEELAANGDIYVNDAFSAAHRAHASTEGLARHLPAYAGRTMQAELEALEKGLGQPVRPVVAIVGGAKVSSKIDLLMNLVKKVDALVIGGGMANTFLAARGTNVGKSLCEHDLAETAKQIMIEAATSGCAIVLPEDGVVAREFTAGAANEIVDINAIPADAMVLDVGPKSVESIKAWISRAETLVWNGPLGAFEIEPFDAATVAAAKHAAECTKAGKLVSVAGGGDTVAALNHAGVSDDFTYISTAGGAFLEWMEGKELPGVAILTTAK

SEQ ID NO: 10406 - DNA, 1212 bp, Corynebacterium glutamicum
  CDS (1)..(1212)
atggctgttaagaccctcaaggacttgctcgacgaaggcgtagacggacgccacgtcatcgttcgatctgacttcaatgtccccctcaacgatgaccgcgagatcaccgataagggccgaatcattgcctccctaccaacccttaaagcactgagcgaaggtggcgcaaaggtcatcgtcatggctcaccttggccgccaaggcgaggtcaacgagaagtactccctcgcacctgtcgctgaggcactctccgatgagcttggccagtacgttgcacttgccgcagacgttgttggcgaagacgcacacgagcgcgcaaacggcctgaccgagggcgacatcctgctcctggagaacgtgcgcttcgacccacgcgaaacctccaaggacgaggcagagcgcaaccgtttcgctcaggagctcgcagctcttgcagcagacaacggcgcattcgtttctgacggcttcggtgttgtccaccgcgcacagacctccgtctacgacattgcaaagttgctgccacactacgctggcggactggtagagaccgagatttccgttctggaaaagatcgcagaatcaccagaggcaccatacgtagtggttctcggtggatccaaggtctctgacaagatcggtgttattgaggcgctggctgccaaggctgacaagatcatcgtcggtggcggcatgtgctacaccttcctcgcagctcagggacacaacgttcagcagtccctcctgcaggaagaaatgaaggctacctgcaccgacctgctcgcttcggtggacaagatcgttctcccagttgacctggttgcagcatccgaatttaacaaggacgcagagaagcagatcgttgacctggactccatcccagaaggctggatgtctcttgacatcggaccagagtccgtcaagaacttcggtgaggttctcagcaccgctaagaccatcttctggaacggcccaatgggcgtgttcgagttcgcagcattctctgaaggcacccgcgcatcgcccaggccatcatcgatgcaacatgcaggcaacgacgcattctccgttgttggcggtggcgactccgcagcatccgttcgcgtgctcggcctgaacgaagacggcttctcccacatctccaccggtggtggcgcatccctcgagtaccttgaaggcaaggaactcccaggcgttgcaattctcgctcagtaa

SEQ ID NO: 10407 - protein, 403 aa, Corynebacterium glutamicum
MAVKTLKDLLDEGVDGRHVIVRSDFNVPLNDDREITDKGRIIASLPTLKALSEGGAKVIVMAHLGRQGEVNEKYSLAPVAEALSDELGQYVALAADVVGEDAHERANGLTEGDILLLENVRFDPRETSKDEAERNRFAQELAALAADNGAFVSDGFGVVHRAQTSVYDIAKLLPHYAGGLVETEISVLEKIAESPEAPYVVVLGGSKVSDKIGVIEALAAKADKIIVGGGMCYTFLAAQGHNVQQSLLQEEMKATCTDLLASVDKIVLPVDLVAASEFNKDAEKQIVDLDSIPEGWMSLDIGPESVKNFGEVLSTAKTIFWNGPMGVFEFAAFSEGTRASPRPSSMQHAGNDAFSVVGGGDSAASVRVLGLNEDGFSHISTGGGASLEYLEGKELPGVAILAQ

SEQ ID NO: 10408 - DNA, 1236 bp, Methanobacterium thermoautotrophicum
  CDS (1)..(1236)
atgatggtgatcccggtgtcctttaaatttaaaaccatggatgacattgaagtcacaggaaagacagtccttgtccgcgtggacataaattcgcctgtggaccccaatgatgggacaatactcgatgatacaaggatgaggctccatgcagagaccataagggaactctcagataggggtgccaggacagttgtgatggcccaccagagcagacccgggaagaatgacttcacaacactggagcagcatgccagggcgctctccgggatactcaggaggcccgttaagtacgttgaggatatattcggatccgctgcaagggagaacatctcaggactgggtgatggtgagataatcctccttgagaacgtccgcttctactccgaggaggtgctcaagcgagaccctgaggaacaggcggagacacaccttgttaggaagctggcgcccctcctggactacttcatcaacgacgccttcgcggcagcccacaggtcccagccctcccttgttggcttcgccctgagggtaccgtcagctgcgggtcgtgtgatggagagggaacttcgaacacttcagggtgcccttgagaatgttgaaaggccctgtgtctatgttctcggcggggtgaaggttgatgactccatcatggtcatgaagaacgtccttgaaaacggtagcgcagaccttgtactgacaacgggccttgttgccaacatattcctggcgggatgcggggttaagatcggtaaggtgaacatggacttcatcaagagcaggggatactgtgacttcatcaaggtggcgaagaaactgaagaagcgcttccctgaaaggatagttgtacccgttgatgttgcagtatgcagggacggcaagagggttgatgttcctgtgaaaaagatacccaaccatccgatacaggatatcggaatggaaaccataaagctctacgccaggaggatacgtgaggcaaggaccctctttgccaatggaccggcaggcgtatttgagaaccctgatttcagcataggaaccgaggacatactgaatgcaatatcctcttcagaaggtttctcaataatcggcgggggtcaccttgctgctgcagcagtgaagatgggctttgaggacagcataaaccatatcagcagtggaggcggtgccagcataagcctccttgcaggtgaggagcttcccgcagtcagggtgcttgaggaatccaggcacccataa

SEQ ID NO: 10409 - protein, 411 aa, Methanobacterium thermoautotrophicum
MMVIPVSFKFKTMDDIEVTGKTVLVRVDINSPVDPNDGTILDDTRMRLHAETIRELSDRGARTVVMAHQSRPGKNDFTTLEQHARALSGILRRPVKYVEDIFGSAARENISGLGDGEIILLENVRFYSEEVLKRDPEEQAETHLVRKLAPLLDYFINDAFAAAHRSQPSLVGFALRVPSAAGRVMERELRTLQGALENVERPCVYVLGGVKVDDSIMVMKNVLENGSADLVLTTGLVANIFLAGCGVKIGKVNMDFIKSRGYCDFIKVAKKLKKRFPERIVVPVDVAVCRDGKRVDVPVKKIPNHPIQDIGMETIKLYARRIREARTLFANGPAGVFENPDFSIGTEDILNAISSSEGFSIIGGGHLAAAAVKMGFEDSINHISSGGGASISLLAGEELPAVRVLEESRHP

SEQ ID NO: 10410 - DNA, 1233 bp, Aeropyrum pernix
  CDS (1)..(1233)
atggggggcaggctcgctactctggacgacgttgatgttaggggtaagaaggttatagtccgtttcgaccttaatagccctgtaggtaatggaggcgaaatactggacgactcccgtatagctgaggctgcaggaaccctaagggaactctgcgataggggtgcagcggtggtcgctctcagccaccagggcaggcctcttgaaagcgatttcgtcagcctggagagacatgcatcattactgtcaagatattcgggcgttgaagtgagatttgtgatggatgtaattgggcctgaggctctaaggacagttgcatcgctgagaccgggagaggcagtgctgcttgacaatactaggataattagcgaggactttattgaggctgagggcactgtccatgctagaggtattatggtcaccaggctctccaagctagctaacatgtatgttaacgaggctttctccgcttctcacaggagccaggcaagcattgtcggctttccctacgtcctcccctctgcgggcgggcgagtcttggagaaggagatccgctcgctaaaccgagcagtatcctcgggtgagagacccaaggtcgtcgtgctggggggcgcgaagctgaaggatgccgtcaggatagtggactacctatcctcatctggagttgcagacgaagtgctgaccacgggcctcgttggcctcctcttcctctatgcccgtggctacaggcttccgagagacgtgacaaagctcctggaaaagaaggggggtgaggaggctatagcgaaggctaggagaatcgttgaggaggggagaagggttaggacccctatagacttcgttgtggaggttggcgataagatctacataaagcctgcggacgagctgacagagggtgtgccaaaggacatagggccgtcgacggtagagtattttagagcgaagatgaggggtgccagggtaatagtgatgaggggtcctgccggggttatagaggaccccaggttcaggaggggcactgtcgagctggtcaaggccgccctgtcttcaggcgcctacactgtattcgggggcgggcatttcagggctatacttagagatctccccgaacatcttagtagtaaggtgggccacttgagcaccgggggcggggcactcttgtattatctgtcgggacggcccctccccggggttaaagccttagtagactcggcgaggatatttaatctggtttag

SEQ ID NO: 10411 - protein, 410 aa, Aeropyrum pernix
MGGRLATLDDVDVRGKKVIVRFDLNSPVGNGGEILDDSRIAEAAGTLRELCDRGAAVVALSHQGRPLESDFVSLERHASLLSRYSGVEVRFVMDVIGPEALRTVASLRPGEAVLLDNTRIISEDFIEAEGTVHARGIMVTRLSKLANMYVNEAFSASHRSQASIVGFPYVLPSAGGRVLEKEIRSLNRAVSSGERPKVVVLGGAKLKDAVRIVDYLSSSGVADEVLTTGLVGLLFLYARGYRLPRDVTKLLEKKGGEEAIAKARRIVEEGRRVRTPIDFVVEVGDKIYIKPADELTEGVPKDIGPSTVEYFRAKMRGARVIVMRGPAGVIEDPRFRRGTVELVKAALSSGAYTVFGGGHFRAILRDLPEHLSSKVGHLSTGGGALLYYLSGRPLPGVKALVDSARIFNLV

SEQ ID NO: 10412 - DNA, 1203 bp, Campylobacter jejuni
  CDS (1)..(1203)
atgagtgatattatttctataaaagacattgatttagctaagaaaaaagtttttataagatgtgattttaatgttcctcaagatgattttttaaatatcactgatgatagacgcataagatcagctattcctacgataagatattgtttggataatggttgtagtgtgattttagcctctcatttagggcgtccaaaagaaattagctctaaatattctttagaacctgtggctaagcgtcttgctagacttttagataaagaaattgttatggcaaaagatgttatcggcgaagatgcaaaaaccaaagctatgaatttaaaagcgggtgaaattttacttcttgaaaatttgcgttttgaaaaaggcgaaactaaaaatgatgaaaatttagccaaagaacttgcttctatggttcaagtttatatcaatgatgcttttggagtatgccatagagcacattctagtgtagaggcgattactaaattttttgatgaaaaacacaaaggcgcaggatttttactccaaaaagaaattgattttgcaagcaatcttatcaaacatccagcacgtccttttgtcgctgttgttggaggttcaaaggtaagtggaaaacttcaagcattgacaaatttattaccaaaggtagataaattaatcataggcggaggtatggcatttacttttttaaaagctttaggttatgatataggaaattcacttttagaagaagaacttttagaagaagctaataaaattcttaccaagggtaaaaatttaggagtgaaaatttatcttccagtagatgttgtagccgctcctgcgtgctcacaagatgtgccgatgaaatttgttccagcgcaagaaattccaaatggttggatgggtttagatataggacctgcgagtgtgagactttttaaggaggtgatttctgatgcgcaaacgatttggtggaatggacctatgggtgtttttgaaattgataaattttcaaaaggtagcattaaaatgagtcattatatcagcgaaggacatgcaacttctgttgttggaggcggtgatacggctgatgtggttgcgcgtgcaggtgatgcagatgaaatgacttttatttctactggaggtggtgcttctcttgaacttatagaaggcaaagaacttccaggtgtaaaagctttaagatctaaggaaaatgaatga

SEQ ID NO: 10413 - protein, 400 aa, Campylobacter jejuni
MSDIISIKDIDLAKKKVFIRCDFNVPQDDFLNITDDRRIRSAIPTIRYCLDNGCSVILASHLGRPKEISSKYSLEPVAKRLARLLDKEIVMAKDVIGEDAKTKAMNLKAGEILLLENLRFEKGETKNDENLAKELASMVQVYINDAFGVCHRAHSSVEAITKFFDEKHKGAGFLLQKEIDFASNLIKHPARPFVAVVGGSKVSGKLQALTNLLPKVDKLIIGGGMAFTFLKALGYDIGNSLLEEELLEEANKILTKGKNLGVKIYLPVDVVAAPACSQDVPMKFVPAQEIPNGWMGLDIGPASVRLFKEVISDAQTIWWNGPMGVFEIDKFSKGSIKMSHYISEGHATSVVGGGDTADVVARAGDADEMTFISTGGGASLELIEGKELPGVKALRSKENE

SEQ ID NO: 10414 - DNA, 1185 bp, Bacillus subtilis
  CDS (1)..(1185)
atgaataaaaaaactctcaaagacatcgacgtaaaaggcaaagttgtattctgccgcgttgactttaacgttccaatgaaagacggggaagtaacagacgatacacgtatccgtgctgcgcttccaacaatcaaacaccttgcagaccaaggcgcaaaagtccttcttgcgagccacttaggccgcccgaaaggcgaagtggttgaggagcttcgtttaactcctgtcgctgcacgtctcggcgaactgcttggcaaagaagtgaaaaaagcggatgaagcatacggcgatgctgtaaaagcacaaatttctgagatgaaggacggagacgttcttgtattggaaaacgtacgtttctatcctggtgaagagaaaaatgatcctgagcttgcaaaagcatttgctgagcttgcagatgtatatgtaaatgacgcattcggtgctgcccaccgtgctcacgcatctacagctggaattgccgagcatctgccagcagttgcaggtttcttaatggaaaaagagcttgatgtacttggaaaagcggtttccaatcctgaccgcccgttcacagcgatcatcggcggagcgaaagtaaaagacaaaatcggtgtaatcgaaagtcttcttgataaagtagacaacctgatcatcggcggaggtcttgcttatactttcgtaaaagcgcttggctatgaagtcgggaaatctcttcttgaagaggataaaatcgagcttgcgaaatcatttatggaccgcgctaaagaaaaaggcgttaacttctacatgcctgaagatgtactcgttgcagatgatttctctaacgatgcaaacgtgaaaattgtgccgatctctgaaatccctagtgatttagaagcaatcgacattggtacgaaaacacgcgaaacgtatgctgacgtcatcaaaaacagcaaacttgtcgtgtggaacggaccaatgggcgtattcgaaatcgacttgttcgctcaaggaacaaaagcggttgcggaagcattggcagaggcgaaagatacatactctgtcatcggcggaggagactctgcggcagcggttgaaaaattcggccttgctgacaaaatgagccacatctcaacaggcggcggcgcatcccttgagtttatggaaggcaaagagcttccaggggtagctgcactgaacgataaataa

SEQ ID NO: 10415 - protein, 394 aa, Bacillus subtilis
MNKKTLKDIDVKGKVVFCRVDFNVPMKDGEVTDDTRIRAALPTIKHLADQGAKVLLASHLGRPKGEVVEELRLTPVAARLGELLGKEVKKADEAYGDAVKAQISEMKDGDVLVLENVRFYPGEEKNDPELAKAFAELADVYVNDAFGAAHRAHASTAGIAEHLPAVAGFLMEKELDVLGKAVSNPDRPFTAIIGGAKVKDKIGVIESLLDKVDNLIIGGGLAYTFVKALGYEVGKSLLEEDKIELAKSFMDRAKEKGVNFYMPEDVLVADDFSNDANVKIVPISEIPSDLEAIDIGTKTRETYADVIKNSKLVVWNGPMGVFEIDLFAQGTKAVAEALAEAKDTYSVIGGGDSAAAVEKFGLADKMSHISTGGGASLEFMEGKELPGVAALNDK

SEQ ID NO: 10416 - DNA, 1269 bp, Ureaplasma urealyticum
  CDS (1)..(1269): transl_table=4
atgaatagtttaaataaaaaaagtataaaagatcttgatgtaaatggtaaaacaatagttttacatttagatttaaatgttgttgttgattatgaaaataaacgcatattaaatgatcgtaaattacgagcatcactaccaactattaattatttaattaatcataacgctaaaattgttattttaagtcatttaggtcgaattaaaaccttagcagataaacaaagtggtaaatatagtttagaaattattgttgatgaactccgtaatcgtgtatccaagaatgttaatcgtgttgtattttcacctttaaattatggagaaacggtcgtacaaatggttaatgatttagaagaaagagacattttaattttagaaaatacgcgttattgtgatattagtgatgaaggtgaatatgttgggcttgaatgagatggttcagagattttaggacagttttggggaatgctaggggatatttttattgatgatgcatatggagttgctcatcgacaattatcatcaaattatcaaacagctaaatttgctaaaaaaagtgcattaggttttttaattgttaatgaaattaaccatctagatattgctttagaagttcctaaaagtccgtatttagctttaataggtggtaaccgtgttgctgataaaattgcagcaattgaagtattatgtgaacgggctgatcaagttattattgggggaggattagtctatacatttttatatgctcaagggtataacgttggtttaaatttagtagaacgcaatatgattgatgattgcaataatatattagaaaaatacggtaaaaaaattttaatttgttttgattttttatgtaacaatgattttagtgatacaagaccgatttatcgtaaaatagatgaaggtcttgaagggttatatggtttagatattggtaaaagaagtttaaaatttattaaacatgaaatttatcgttctaaaactattttactaaatggtccctttggtgttattgaaaatattaagaattatgcacaaggtactactgaaatatgtaaatcaatggcaaaacaaacaacacgtggcgcttatacaattatatgtgatatcgatacttcgagtcatgctgaatacctaggattagataaatatattaattttatatctactggtgggggcgctagcttatcatatattgaagaaggagttcttgatggtcttgaaaccattgataatgttcctttaaatgttttaaagaaggagtaa

SEQ ID NO: 10417 - protein, 422 aa, Ureaplasma urealyticum
MNSLNKKSIKDLDVNGKTIVLHLDLNVVVDYENKRILNDRKLRASLPTINYLINHNAKIVILSHLGRIKTLADKQSGKYSLEIIVDELRNRVSKNVNRVVFSPLNYGETVVQMVNDLEERDILILENTRYCDISDEGEYVGLEWDGSEILGQFWGMLGDIFIDDAYGVAHRQLSSNYQTAKFAKKSALGFLIVNEINHLDIALEVPKSPYLALIGGNRVADKIAAIEVLCERADQVIIGGGLVYTFLYAQGYNVGLNLVERNMIDDCNNILEKYGKKILICFDFLCNNDFSDTRPIYRKIDEGLEGLYGLDIGKRSLKFIKHEIYRSKTILLNGPFGVIENIKNYAQGTTEICKSMAKQTTRGAYTIICDIDTSSHAEYLGLDKYINFISTGGGASLSYIEEGVLDGLETIDNVPLNVLKKE

SEQ ID NO: 10418 - DNA, 1161 bp, Haemophilus influenzae
  CDS (1)..(1161)
atgtcagtaatcaaaatgaccgatttagatttagccggtaaacgtgtatttatccgtgcagatcttaatgtgccagtaaaagatggcaaagtgacctcagatgcgcgtattcgtgcgaccattcctactttaaaattagccttagaaaaaggtgcgaaagtgatggtaacttctcacttaggtcgtccaactgaaggagaattcaaaccagaagattctttacaaccagttgttgattacttaaaaaacgcaggctttaatgtgcgtttagaacaagattatttaaatggtgtggatgttaaagatggcgaaatcgttgttttagaaaacgtacgcgtaaacaaaggcgaaaagaaaaatgatccagaattaggtaaaaaatatgccgcactttgcgacgtatttgtaatggatgcctttggtacagcgcaccgcgcgcaagcatcaacttatggcgttgcagaatttgcgccgatcgcttgtgcaggcccattattagccgctgagttagatgcattaggtaaagcattaaaagaacctgctcgtccaatggtggctattgttggtggttctaaagtttccactaaattagaagtattaaattctctttcaaaaatcgctgaccaaattattgtgggcggtggcattgcgaatactttcatcgcggcagctggtcacaatgtaggtaaatctttatatgaagctgatttaattccagttgcgaaagaattagccgcaaatacagatattccagttccagttgatgtgcgtgtaggtttagagttctctgaaacggcagctgcaacagaaaaagtggtaaatgaagtgaaagatgatgaatctatttttgatattggcgataaatcagcagaacaattggctgaaattatcaaaaatgcaaaaaccgttttatggaatggcccagttggcgtgtttgagttccctcacttccgtaaagggactgaaatcatttctcacgccattgcaaacagcgatgcattctctatcgctggtggcggcgataccttagcggctatcgatttatttggtattgctgataagatttcttacatttcaacgggtggtggtgcattcttagagtttgtagaaggcaaagtattacctgcagtagaaattcttgaaaaacgtgcgaaaaactaa

SEQ ID NO: 10419 - protein, 386 aa, Haemophilus influenzae
MSVIKMTDLDLAGKRVFIRADLNVPVKDGKVTSDARIRATIPTLKLALEKGAKVMVTSHLGRPTEGEFKPEDSLQPVVDYLKNAGFNVRLEQDYLNGVDVKDGEIVVLENVRVNKGEKKNDPELGKKYAALCDVFVMDAFGTAHRAQASTYGVAEFAPIACAGPLLAAELDALGKALKEPARPMVAIVGGSKVSTKLEVLNSLSKIADQIIVGGGIANTFIAAAGHNVGKSLYEADLIPVAKELAANTDIPVPVDVRVGLEFSETAAATEKVVNEVKDDESIFDIGDKSAEQLAEIIKNAKTVLWNGPVGVFEFPHFRKGTEIISHAIANSDAFSIAGGGDTLAAIDLFGIADKISYISTGGGAFLEFVEGKVLPAVEILEKRAKN

SEQ ID NO: 10420 - DNA, 1194 bp, Aquifex aeolicus
  CDS (1)..(1194)
atgcttagaaaaaagaccttaagggacgttgacgtaaaggggaagagagttctcgtaagggttgattacaacgttccactagacgaacagggaaacatagtagacgacacgcgtataagggcttcccttcccacagttgagtacctccttgacgcaaacgcaaaggtaattttgatgtcccatctaggaagacctaaaaacagggatccaaagtacagtttggcaccggtagccaaaagactttcaaggtatataaacaaggaggtaaaactcgccccggactgcgtgggagaagaagtaaagcgaattgtaaactccatgaaagagggagacgtagttctccttgaaaaccttaggttccataaagaagaaacggagtgcgatgagaactttgcgagagagcttgcgagtctgggagaagtttacgttgcggacgccttcggaacctgtcacagaaagcacgcaagcgtgtacctcgttcccaagtttttaaaacccgccgtaatgggatttttactggaaaaggaaatcacttactttgaaaaggcgatggtagcaccccagagacccgtggtcgctatcctgggaggtgctaaagtttcctccaaactcgaagtgataaagaacctaataaggagggtagacaaactatttataggcggcgctatggcctttaccttcctcaaagctatgggctacaaggttggaaattccctcgtggaggacgacctacaggacgttgcaagggatttaatagatgttgcaaaaaagctagagattaaactctaccttcccgttgactttgtgatagggcaggaagtctcggaaaacactcccacgaaagtagtaccctggcaggagataccagacgggtggatggggcttgatatcggacccgtttccgttgaactcgtaaaggaaataatttccgatgcccagacaattgtgtggaacgggcccatgggagtgtttgaaatagacaagttcaaacatggaacaatagaggtcgcgaaattactcgcccaatcttcagccctcacgatagcgggcggaggagatacggaccacgccattcacaaggcgggagtttatcacgcctttgacttcgtctccacaggaggaggagctttcctggaacttctcgcggggaaagaactgccctgtctcgttaaccttgacgacaaggaggcttaa

SEQ ID NO: 10421 - protein, 397 aa, Aquifex aeolicus
MLRKKTLRDVDVKGKRVLVRVDYNVPLDEQGNIVDDTRIRASLPTVEYLLDANAKVILMSHLGRPKNRDPKYSLAPVAKRLSRYINKEVKLAPDCVGEEVKRIVNSMKEGDVVLLENLRFHKEETECDENFARELASLGEVYVADAFGTCHRKHASVYLVPKFLKPAVMGFLLEKEITYFEKAMVAPQRPVVAILGGAKVSSKLEVIKNLIRRVDKLFIGGAMAFTFLKAMGYKVGNSLVEDDLQDVARDLIDVAKKLEIKLYLPVDFVIGQEVSENTPTKVVPWQEIPDGWMGLDIGPVSVELVKEIISDAQTIVWNGPMGVFEIDKFKHGTIEVAKLLAQSSALTIAGGGDTDHAIHKAGVYHAFDFVSTGGGAFLELLAGKELPCLVNLDDKEA

SEQ ID NO: 10422 - DNA, 1236 bp, Deinococcus radiodurans
  CDS (1)..(1236)
atgacgggtttgtgcccgctccatcaaccatcacctcttgaccatccacattccggaggaacacccatgcaaaacctcagtcaattggatgtcaagggcaagcgcgtcctggtgcgcgtggactacaacgtgccggttggggacggcgtggtacaggacgacacccgcatcacggcgagcgtgccgaccatcaagaagctgcttgacggcggcgccagcgtcgtgctgatgagccacttcggacggcccaagaatggccccgaggacaagtacagcctgaagccggtggctgaggccgtcagccgcgcactcgggcaggacgtgaagttcattcccagcctgccaggcagcgacgaaaccctccaggccgtgcaggcgctcaggcccggtgaagtcgcgctgctggaaaacgtgcgcttcgaggcgggcgaggaaaagaacgatgcggcgctgaacgacaagctggccaagctgggtgacgccttcgtcctcgacgcgtttggctcggcgcaccgggcgcactcgtcggtcagcggcgtggccggcaagctaccgcacgcggcgggcgggctgctccagagcgaagtggacgcgctcggcaagttgctgcacgcgccggagcatccctacgtggtcatcatcggcggggcgaaagtcagcgacaagatcaaggtgatcgagaacctgctgcccaaagtggaccgcatgctgatcggcggcggaatgatgttcaccttcatcaaggcgcgcggcgggcagatcggcaacagtctggtggaagacgaccagcttgacctggcgaaggggttgctggagaagtacggtgacaagctgctgcttccgaccgacgcggtggccgccgacaaattcgccgccgatgctcagagcaaagtcgtccctgccgaccagattcctgacggctggatgggcctcgatatcgggcctgacacgcagcgggcgtatgccgacgccttgcagggcgccaaaactgtcttctggaacggtccgatgggcgtgttcgagttcgaccagttcgcggcaggcaccaacgcggtggcggcggcggtggggagcctgaaagaccaggcctacaccgtggtcggcggcggcgactcggtgagcgccatcaacaagagcggcaaggccgaccagatcgaccacatctccaccggcggcggtgcgagcctggaactgctggaaggcaaggagctgcccggcgtcgtggcgatggcgtga

SEQ ID NO: 10423 - protein, 411 aa, Deinococcus radiodurans
MTGLCPLHQPSPLDHPHSGGTPMQNLSQLDVKGKRVLVRVDYNVPVGDGVVQDDTRITASVPTIKKLLDGGASVVLMSHFGRPKNGPEDKYSLKPVAEAVSRALGQDVKFIPSLPGSDETLQAVQALRPGEVALLENVRFEAGEEKNDAALNDKLAKLGDAFVLDAFGSAHRAHSSVSGVAGKLPHAAGGLLQSEVDALGKLLHAPEHPYVVIIGGAKVSDKIKVIENLLPKVDRMLIGGGMMFTFIKARGGQIGNSLVEDDQLDLAKGLLEKYGDKLLLPTDAVAADKFAADAQSKVVPADQIPDGWMGLDIGPDTQRAYADALQGAKTVFWNGPMGVFEFDQFAAGTNAVAAAVGSLKDQAYTVVGGGDSVSAINKSGKADQIDHISTGGGASLELLEGKELPGVVAMA

SEQ ID NO: 10424 - DNA, 1197 bp, Halobacterium sp. NRC-1
  CDS (1)..(1197)
atggcgatacggaccctcgacgacctggcggcggccaaccgcgcgatcggggtgcgcgtcgacatcaacagcccgctgacggccgccggcgggctggccgacgacgctcgcctgcgcgcgcacgtcgacacgctcgccgaactgctggctgcggacgcgcgcgtcgccgtgctcgcccaccagggccgaccgggcggcgacgagttcgcgcgcctcgaacgccatgccgaccgcctcgacgcgcttctcgatgcgcccgtctcctactgcgacgcgacgttctccacgggggcacgcgacgccgtcgccgacctcgcacccggcgaggcggtcgtgcttgagaacacccgcttctacagcgaggagtacatggcgttcgcccccgagcgcgcggccgacaccgcgctcgtcgatggcctcgcgccggcgctggacgcgtacgtgaacgacgcgttcgccgccgcccaccgctcacaaccctccctggtcgggttcccggaagtcctcccgtcctacgcggggcgcgtgatggaggccgaactggacgcactcagcggcgtcgccgacacgccaacgccacgcacgtacgtcgtcggtggcgcgaaagtgccggactccgtggaagtcgcggcacacgccctctcccacgggctcgccgacaacgtactcgtgaccggcgtggtggcgaacgtcttcctggcggccaccggtgtcgatctcggccgggcgtcgaccgacttcatccacgagcgcgactacgggacggagatcgcgcgcgcagccgacctgctcgcggcgcacaacgacgccctccacctgcccgtcgacgtggccgtcgagcgcgacggcgcgcggtgtgaactctccaccgacgccttgcccccggccggcgacgaagccgtctgtgacatcggcagtgacaccgtcgacgcgtacgccgacgtgctggcggactccgaaaccgtcgtggtaaacgggccggccggcgtcttcgaggacgacctgttcgccgacgggacgcgtggcgtcttcgacgcggcgtcggaagtcgagcacagcatcgtgggtggcggcgacaccgcggccgcgatccggcgcttcgacatcaccggcttcgaccacgtgagcacgggcggcggtgccgcgatcaacctcctgaccgacgccgacctgcccgcggtggcggcgctgcgatga

SEQ ID NO: 10425 - protein, 398 aa, Halobacterium sp. NRC-1
MAIRTLDDLAAANRAIGVRVDINSPLTAAGGLADDARLRAHVDTLAELLAADARVAVLAHQGRPGGDEFARLERHADRLDALLDAPVSYCDATFSTGARDAVADLAPGEAVVLENTRFYSEEYMAFAPERAADTALVDGLAPALDAYVNDAFAAAHRSQPSLVGFPEVLPSYAGRVMEAELDALSGVADTPTPRTYVVGGAKVPDSVEVAAHALSHGLADNVLVTGVVANVFLAATGVDLGRASTDFIHERDYGTEIARAADLLAAHNDALHLPVDVAVERDGARCELSTDALPPAGDEAVCDIGSDTVDAYADVLADSETVVVNGPAGVFEDDLFADGTRGVFDAASEVEHSIVGGGDTAAAIRRFDITGFDHVSTGGGAAINLLTDADLPAVAALR

SEQ ID NO: 10426 - DNA, 1173 bp, Buchnera sp
  CDS (1)..(1173)
atgactataagaaaaatgactgaactaaatataacagagaaaagaattttaataagaagtgatttaaatgtccctatagaaaatggaattatccaatctgatgctagaatactagctgcactacctaccattgaattggctcttcagaaaaaagctaaagtcattattatgtctcatttaggaagaccaaaagaaggatattatacaaaaaaatattccttatttcctatatttgaatattttaaaaaaaaatttaataatacaaaaatatatttttccaataattttttagatggtattaaactgaatccaggagaaatcgcacttttagaaaacactcgattcaataaaggtgagttaaacaatgacgaacaattatctaaaaaatattctgatctttgcgatatatttgtaatggacgcatttggaagtgcacatagaatgcaatcatctacctatgggattggaaaatttgttaaaattgcatgtgctggacttcttttaataagtgaaattgatgctttaaaaaaagcattaaaaaaaccaaaacgaccaatggttgctatagttggaggctcaaaagtatcaactaaatttaatgtattaaataaattgtctaaaattgcagatacaataatagttggaggtggtatagcaaatacatttttagctattgattacaaaataggaaaatcattatatgaaccagattttgtatttgaagctaaaaaattacgtgataaatacaatattattgtgccaattgactctcgtgttggaaaaaatttttgtaagaacgaacaggctataatcaaatcacctgataatatcaaagaagatgaagaaataatggattttggtgatgaaagtattaaaaaaattattagtattattacacaatctcaaacaattatgtggaacggaccagttggggtatttgaatttccaaactttagaaaaggtactgagatgattgcaaagacaattgcaaatagcaatgcattttctatagcaggaggaggagatacattatctgttatcgatatgtttaatataaaaaataatatctcttatatttcaaccggaggaggagcttttttagaatttatagaaggaaaaaaactacctgcaatacaaatgttagaagaaaattttaaaaataaatcaaaataa

SEQ ID NO: 10427 - protein, 390 aa, Buchnera sp
MTIRKMTELNITEKRILIRSDLNVPIENGIIQSDARILAALPTIELALQKKAKVIIMSHLGRPKEGYYTKKYSLFPIFEYFKKKFNNTKIYFSNNFLDGIKLNPGEIALLENTRFNKGELNNDEQLSKKYSDLCDIFVMDAFGSAHRMQSSTYGIGKFVKIACAGLLLISEIDALKKALKKPKRPMVAIVGGSKVSTKFNVLNKLSKIADTIIVGGGIANTFLAIDYKIGKSLYEPDFVFEAKKLRDKYNIIVPIDSRVGKNFCKNEQAIIKSPDNIKEDEEIMDFGDESIKKIISIITQSQTIMWNGPVGVFEFPNFRKGTEMIAKTIANSNAFSIAGGGDTLSVIDMFNIKNNISYISTGGGAFLEFIEGKKLPAIQMLEENFKNKSK

SEQ ID NO: 10428 - DNA, 1209 bp, Chlamydophila pneumoniae, Chlamydia pneumoniae
  CDS (1)..(1209)
atggataagctaacagtacaagatctttctccagaagaaaaaaaagtcctcgtacgtgtagatttcaatgtccccatgcaagatggcaagatactcgatgacattcgtattcgcagtgcgatgcctacaatcaactatctacttaagaaacatgctgcagtgattttaatgagtcatttagggcgacctaaaggacaggggttccaagaggaatattctctgcaacccgttgtggatgttctcgaaggatacttaggacatcatgtgcctctagctccagattgtgtgggtgaggttgcacgtcaagctgtagctcagctttctcctggtcgcgttttgcttcttgagaacttgcgtttccatataggagaagaacatccagaaaaagacccgacgttcgccgcagaactctcttcctacggggatttctatgtcaacgatgctttcggaacttcgcatagaaaacatgcttcagtctatgtagtgccgcaggctttcccaggtagagccgcagcaggcctgcttatggaaaaagaattggaatttttaggaagacatctattgacctcccctaagaggcctttcactgccatccttggaggagctaagatttcttctaaaattggagttatagaggctctactgaatcaagtagactacctcttattagctggaggtatgggatttactttcctacaagccttgggaaaatccctagggaactctcttgtggagaaatctgccttggatcttgctagaaatgtattgaaaattgctaaaagtcgtaatgttaccatagttttgcctagcgatgtgaaagcagccgaaaatctccaatctaaggaatattctgtgatttctatagatcaaggcattcctccgcatcttcaaggctttgatattggacctagaacaaccgaagaatttatccgtattataaaccaatcagcgactgtgttttggaatggtcctgtgggtgtttatgaggtccctccttttgactctggatctattgctatagcgaatgccttaggcaatcacccttcagctgttactgtcgtgggtggaggagatgcggcagctgtggttgctttggcaggctgctctacaaaagtttcccatgtttctactggaggaggggcttctttagagtttctagagcagggcttcctcccaggtacagaagttttatctccatccaaaagctaa

SEQ ID NO: 10429 - protein, 402 aa, Chlamydophila pneumoniae, Chlamydia pneumoniae
MDKLTVQDLSPEEKKVLVRVDFNVPMQDGKILDDIRIRSAMPTINYLLKKHAAVILMSHLGRPKGQGFQEEYSLQPVVDVLEGYLGHHVPLAPDCVGEVARQAVAQLSPGRVLLLENLRFHIGEEHPEKDPTFAAELSSYGDFYVNDAFGTSHRKHASVYVVPQAFPGRAAAGLLMEKELEFLGRHLLTSPKRPFTAILGGAKISSKIGVIEALLNQVDYLLLAGGMGFTFLQALGKSLGNSLVEKSALDLARNVLKIAKSRNVTIVLPSDVKAAENLQSKEYSVISIDQGIPPHLQGFDIGPRTTEEFIRIINQSATVFWNGPVGVYEVPPFDSGSIAIANALGNHPSAVTVVGGGDAAAVVALAGCSTKVSHVSTGGGASLEFLEQGFLPGTEVLSPSKS

SEQ ID NO: 10430 - DNA, 1670 bp, Arabidopsis thaliana (mouse-ear cress)
  CDS (39)..(1475)
attccctcactttcactctcactatctgttgacttcacatggcttccaccgccgcaactgcagctctttcgatcatcaaatccaccggtggcgccgccgttacacgctcctcccgcgcctcctttggacacattccctccacatctgtctccgcacgtcgccttggcttctccgccgtcgttgactctcgtttctcggtccacgtggcgtccaaggtccactccgtgcgcggaaagggcgccaggggagtgattacgatggcgaagaagagtgttggagatctgaattctgtagatttgaaggggaagaaggtgtttgttagagctgatctcaatgtacctctcgatgacaaccagaatatcactgacgacactagaatcagagccgccattcccaccatcaagtttttgattgagaatggtgctaaggtcatcctctccactcatttgggaaggccaaagggtgtcactccaaagttcagcttggctcctcttgttcccagattatcagagctccttggtattgaggtcgtgaaagctgatgattgtattggtccagaagtggaaaccttggtggcttcccttcctgaaggtggagttttgcttcttgagaacgtgaggttttacaaggaggaagagaagaacgaacctgattttgctaagaagcttgcttctctagctgacctttatgtcaacgatgcgttcgggactgctcacagagcccatgcttcaacagagggagtcactaagttcttgaagccatcagttgctggtttccttttgcaaaaggagttggactaccttgttggtgcggtttcaaacccaaagagaccatttgctgccattgtgggaggttccaaggtctcatctaagattggagttatcgaatcgcttcttgagaaatgtgacatccttctgcttggtggtggaatgatctttacattctacaaggcgcaaggtctttccgttggctcctcccttgttgaagaagacaagcttgaattggctacaacactccttgccaaggctaaggccagaggagtctctctgttgttaccaacagatgttgtgattgctgacaagttcgctcctgatgccaacagcaagattgtgccagcatcagccattcctgatgggtggatgggattggacatcggtccagactcggtgaaaacattcaacgaagctctggataccacgcagacagtcatttggaatggaccaatgggagttttcgagtttgaaaagtttgcaaaaggaactgaggcggtagcgaataaactagcagagctaagcaaaaagggagtgacaacgataataggaggaggagactcggtggcagcagtggagaaagtgggagtagcaggagtcatgagtcacatctccacaggtggtggtgccagtttggagctcttggaaggcaaagtgcttcccggtgtcgtcgctcttgatgaagcaacgccagtcactgtttaacaacatctctttattacacctgaagggacccccctaaatgagtttcttcttcttattctgttgtaaatcaaagtctttgttgtaccatcaaatccatagagaggagggactctttttgtctcaaataaaatcaaatacagtgacattcgttattttgagcaaaacatcaatcaactgctcgaaatcattttaacc

SEQ ID NO: 10431 - protein, 478 aa, Arabidopsis thaliana (mouse-ear cress)
MASTAATAALSIIKSTGGAAVTRSSRASFGHIPSTSVSARRLGFSAVVDSRFSVHVASKVHSVRGKGARGVITMAKKSVGDLNSVDLKGKKVFVRADLNVPLDDNQNITDDTRIRAAIPTIKFLIENGAKVILSTHLGRPKGVTPKFSLAPLVPRLSELLGIEVVKADDCIGPEVETLVASLPEGGVLLLENVRFYKEEEKNEPDFAKKLASLADLYVNDAFGTAHRAHASTEGVTKFLKPSVAGFLLQKELDYLVGAVSNPKRPFAAIVGGSKVSSKIGVIESLLEKCDILLLGGGMIFTFYKAQGLSVGSSLVEEDKLELATTLLAKAKARGVSLLLPTDVVIADKFAPDANSKIVPASAIPDGWMGLDIGPDSVKTFNEALDTTQTVIWNGPMGVFEFEKFAKGTEAVANKLAELSKKGVTTIIGGGDSVAAVEKVGVAGVMSHISTGGGASLELLEGKVLPGVVALDEATPVTV

SEQ ID NO: 10432 - DNA, 1194 bp, Clostridium acetobutylicum
  CDS (1)..(1194)
atgaaattcaataaaaagactattgaagatgtagatgttaaaggtaaaagagtattagttagatgcgattttaatgtacctttaaaggacggagtaataactgacgaaaacagacttaatggagcacttccaactataaaatacctttcagagcacggtggaaaagttattctttgttcacatcttggaaaagcaaagggaccagatccttcaaaaactttagctccagttgctaaaagattaagtgaattacttggacgcgaagttaaatttgctgctgatgatacagttgttggcgagaatgctaagaaggctgtagctgaacttaaagaaggagaaatagttcttcttgagaacacaagattcagaccagaagaaggaaaaaatgatgatgcattctcaaaagatttagcttcacttgcagatgtatatgtaaatgatgcatttggaactgctcacagagcacactgctcaacagttggagtaactaaattcgtagatactgctgtatgtggatatttaattcaaaaagaattaaaattcttaggatcagctgttgaaaatccagttagaccttttgttgcaattcttggaggagcaaaagtttctgataaaatcaatgttataaacaatttacttgaaaaagttgatacattaatcatcggaggcggaatggcatacacattcttaaaagctcaaggatatacaataggaacttcacttcttgaagcagacaaagttgattatgcaaaagaaatgatagaaaaagcagaagctaaaggagtaaaattacttcttcctatagataatatagttggagcagaatttaaagcagatacaaaagcagttacaactgaagatgcaaatataccagaaggatacatgggattagatattggaccaaagactcaaaagctttatgctgatgctgttaaagaagctaaaacagttgtttggaatggacctatgggagtatttgaatttgaaaacttcgctaaaggaacaaaagatgttgcaaaagctatggctgaatcagatgcaacaacagttataggtggaggagacagtgctgctgctgttaatcagttaggatttggagacaaaatgactcatatctcaactggaggcggagcttcacttgaattcttagaaggaaaagaacttccaggaatagtagctcttaatgataaataa

SEQ ID NO: 10433 - protein, 397 aa, Clostridium acetobutylicum
MKFNKKTIEDVDVKGKRVLVRCDFNVPLKDGVITDENRLNGALPTIKYLSEHGGKVILCSHLGKAKGPDPSKTLAPVAKRLSELLGREVKFAADDTVVGENAKKAVAELKEGEIVLLENTRFRPEEGKNDDAFSKDLASLADVYVNDAFGTAHRAHCSTVGVTKFVDTAVCGYLIQKELKFLGSAVENPVRPFVAILGGAKVSDKINVINNLLEKVDTLIIGGGMAYTFLKAQGYTIGTSLLEADKVDYAKEMIEKAEAKGVKLLLPIDNIVGAEFKADTKAVTTEDANIPEGYMGLDIGPKTQKLYADAVKEAKTVVWNGPMGVFEFENFAKGTKDVAKAMAESDATTVIGGGDSAAAVNQLGFGDKMTHISTGGGASLEFLEGKELPGIVALNDK

SEQ ID NO: 10434 - DNA, 1233 bp, Pyrococcus abyssi
  CDS (1)..(1233)
atgttcaggttgggggattttaattatcataacaaggtagtttttctcagggttgatcttaattcaccgatgaaagatggcaagataatcagcgatgccaggtttagagcggtgttgccaacgataaagtacctcctcgagaacggagcgagggtcgtcgttggaacgcatcaaggaaagccttacagcgaggactacgcaactacagaagaacacgctagaatactctccaatctcttaaaccagcacgttgagtacgtagaggacatctttggcaggtacgctagagagaagattcaggagcttaagccaggggaaatagcgatgctcgaaaacctaaggttctcggccgaggaagttaaaaacaagccaatagaggagtgcgaaaaaactttcttcgtcaagaagctttcaaaggttatagattacgttgttaacgatgcatttgccgcagctcatagaagtcagccctccttagttggttttgcaaggataaagccgatgataatgggttttctaatggagagggagattgaagccctaatgaaggcctactacagcaaagagagtccaagggtttacgtgcttgggggggctaaagttgacgactcgctaaaggtggcagagaacgttcttagaagaggattcgcagatgttatcctaactggtggactcgttgctaacgtcttcacgttggccaagggatttgatcttggaaggaagaacatcgaattcatgaagaagaaaggattgttggagttggtcaagcatgctgaaaagatactagacgagttttatccgtacgttagaactcccgtggactttgcgatcgactacaagggagatagggaggaaatttatctgttaagcgagaagagggagttactcaacgactaccagataatggacattggaagtagaacgatagagaagtacagagatataataatgaaggccaaagtagttgttgcgaacggccccatgggggtgttcgagagggaagaatttgccctgggaaccgttgaggtgtttaaggcgatagctgaaagcgaagcattcagcgttttaggcgggggccattccatagcgagcatccagaagtacggcatcgagggcataacccacatctcgacgggaggaggtgccatgctaaccttcttcgcaggtgaagaattgccagttcttagggcccttcagataagttacgagaagtttaaggaggtgaaggcgtga

SEQ ID NO: 10435 - protein, 410 aa, Pyrococcus abyssi
MFRLGDFNYHNKVVFLRVDLNSPMKDGKIISDARFRAVLPTIKYLLENGARVVVGTHQGKPYSEDYATTEEHARILSNLLNQHVEYVEDIFGRYAREKIQELKPGEIAMLENLRFSAEEVKNKPIEECEKTFFVKKLSKVIDYVVNDAFAAAHRSQPSLVGFARIKPMIMGFLMEREIEALMKAYYSKESPRVYVLGGAKVDDSLKVAENVLRRGFADVILTGGLVANVFTLAKGFDLGRKNIEFMKKKGLLELVKHAEKILDEFYPYVRTPVDFAIDYKGDREEIYLLSEKRELLNDYQIMDIGSRTIEKYRDIIMKAKVVVANGPMGVFEREEFALGTVEVFKAIAESEAFSVLGGGHSIASIQKYGIEGITHISTGGGAMLTFFAGEELPVLRALQISYEKFKEVKA

SEQ ID NO: 10436 - DNA, 1197 bp, Lactococcus lactis subsp. lactis
  CDS (1)..(1197)
atggcaaaattgactgtaaaagacgttgaacttaaaggcaaaaaagtcctcgtacgtgttgactttaatgttccaattaaagatggcgtaatcacaaatgataaccgtatcactgctgcgcttccaacaattaaatacatccttgaacaaggtggacgtgcagtcctcttctctcacttgggacgtgttaaagaagaagctgacaaagctggtaaatcacttgcaccagtagctaaagctctttctgaaaaacttggtcaagatgttgttttcccaggaactactcgtggcgcagaacttgaagcagcaatcaacgaacttaaagatggagaaatccttctcgttgaaaacactcgttttgaagacatcgacggtaaaaaagaatctaaaaacgacccagaacttggtaaatactgggcttcacttggtgacggaatcttcgttaatgacgcatttggtacagctcaccgtgctcatgcatcaaacgttggtatctcagcaaacgttgataaagccgttgctggtttccttcttgaaaacgaaattgcttatatccaagaagcagttgaagctccagaacgtccattcgtagcaatccttggtggttcaaaagtttcagataaaatcggtgttatcgaaaaccttctttcaaaagctgataaagttatcatcggtggtgggatggcttacacattcttgaaagctcaaggttacgaaatcggaacttcactcgttgaagatgacaaacttgatcttgctaaagaattgcttgaaaaagcagctggaaaattgattttgccacttgaccacaaagttgctaacgcatttgctggttacacagaagttaaagaaactgctgaccaaaatattcctgcaggcttcatgggacttgacgtagcaagcaaaacaattgctgactacaacacacaacttgaaggtgctaaaacagttgtttggaatggtccagttggtgtatttgaaaacacagacttccaagcaggtactgttggattgatggaagctatcgttaaacaaccaggtgttaaatcaatcatcggtggtggtgactcagcagcagcagcaatcaaccttggttatgcagataaattctcatggatttcaactggtggtggagcttcaatggaactcctcgaaggtaaagtacttccaggacttgcagctttgactgaaaaataa

SEQ ID NO: 10437 - protein, 398 aa, Lactococcus lactis subsp. lactis
MAKLTVKDVELKGKKVLVRVDFNVPIKDGVITNDNRITAALPTIKYILEQGGRAVLFSHLGRVKEEADKAGKSLAPVAKALSEKLGQDVVFPGTTRGAELEAAINELKDGEILLVENTRFEDIDGKKESKNDPELGKYWASLGDGIFVNDAFGTAHRAHASNVGISANVDKAVAGFLLENEIAYIQEAVEAPERPFVAILGGSKVSDKIGVIENLLSKADKVIIGGGMAYTFLKAQGYEIGTSLVEDDKLDLAKELLEKAAGKLILPLDHKVANAFAGYTEVKETADQNIPAGFMGLDVASKTIADYNTQLEGAKTVVWNGPVGVFENTDFQAGTVGLMEAIVKQPGVKSIIGGGDSAAAAINLGYADKFSWISTGGGASMELLEGKVLPGLAALTEK

SEQ ID NO: 10438 - DNA, 1191 bp, Staphylococcus aureus
  CDS (1)..(1191)
atggctaaaaaaattgtttctgatttagatcttaaaggtaaaacagtcctagtacgtgctgattttaacgtacctttaaaagacggtgaaattactaatgacaaccgtatcgttcaagctttacctacaattcaatacatcatcgaacaaggtggtaaaatcgtactattttcacatttaggtaaagtaaaagaagaaagtgataaagcaaaattaactttacgtccagttgctgaagacttatctaagaaattagataaagaagttgttttcgtaccagaaacacgcggcgaaaaacttgaagcagctattaaagaccttaaagaaggcgacgtattattagttgaaaatacacgttatgaagatttagacggtaaaaaagaatctaaaaatgatccagaattaggtaaatactgggcatctttaggtgatgtgtttgtaaatgatgcttttggtactgcgcatcgtgagcatgcatctaatgttggtatttctacacacttagaaactgcagctggattcttaatggataaagaaattaagtttatcggtggcgtagttaacgatccacataaaccagttgttgctattttaggtggagcaaaagtatctgacaaaattaatgtcatcaaaaacttagttaacatcgctgataaaattatcatcggcggaggtatggcttatactttcttaaaagcgcaaggtaaagaaattggtatttcattattagaagaagataaaatcgacttcgcaaaagatttattagaaaaacatggtgataaaattgtattaccagtagacactaaagttgctaaagaattttctaatgatgccaaaattactgtagtaccatctgattcaattccagcagaccaagaaggtatggatattggaccaaacactgtaaaattatttgcagatgaattagaaggtgcgcacactgttgtatggaatggacctatgggtgtattcgagttcagtaactttgcacaaggtacaattggtgtatgtaaagcaattgcaaaccttaaagatgcaattacgattatcggtggcggtgattcagctgcagcagcaatctctttaggttttgaaaatgacttcactcatatttcaactggtggcggagcgtcattagagtacctagaaggtaaagaattgcctggtatcaaagcaatcaataataaataa

SEQ ID NO: 10439 - protein, 396 aa, Staphylococcus aureus
MAKKIVSDLDLKGKTVLVRADFNVPLKDGEITNDNRIVQALPTIQYIIEQGGKIVLFSHLGKVKEESDKAKLTLRPVAEDLSKKLDKEVVFVPETRGEKLEAAIKDLKEGDVLLVENTRYEDLDGKKESKNDPELGKYWASLGDVFVNDAFGTAHREHASNVGISTHLETAAGFLMDKEIKFIGGVVNDPHKPVVAILGGAKVSDKINVIKNLVNIADKIIIGGGMAYTFLKAQGKEIGISLLEEDKIDFAKDLLEKHGDKIVLPVDTKVAKEFSNDAKITVVPSDSIPADQEGMDIGPNTVKLFADELEGAHTVVWNGPMGVFEFSNFAQGTIGVCKAIANLKDAITIIGGGDSAAAAISLGFENDFTHISTGGGASLEYLEGKELPGIKAINNK

SEQ ID NO: 10440 - DNA, 2316 bp, Mycoplasma pulmonis
  CDS (1)..(2316): transl_table=4
atgaaaaaacttataactgacttgaacttaaatgataaaaaggttttgattagactagacttaaatgttcctttaaaaggtaaaaaaataacttctttaaagagaattgaagaatctattccaacaattaaatatgttcaagagcgcggtggaaaaattatattattatctcacttaggtagagtaaaaacaaaagaagacaaagagaaaaaatcattatctattgttgtagaagctctagcttcacttttaaactcacctgtaaaatttgtagatcaaacaagaggaaaaaaattagaaagtgcaattgaaaaattaaaacctggagatgtattattaattgaaaatacaagatttgaagatctaaataataacgctgagtctaacaacgatcctgagcttggaaaatattgagcttctctaggtgatgtttttattaatgatgcttttggaactgctcatagagcacatgcttcaaatgttggtattgcaagtaacattaaagaatcagctcttggtattttggtacaaaaagaagttaatgccttatggaaattaatggaacaacaagaaaaaccatttgtggctattttaggtggatcaaaagtttcagacaaaataaatgttttagaaaaaataattgataaagttgatagattaattattggtggagctatggcttatacattcctaaaagctcaaggtattggaattggtgattctatttatgaacaagataaaattgaatttgccacagaatttctaaaaaaatacaaccacaaaattattttacctattgaccatgctcttgctaaaaaattcaaaaatgcaaaaccaattttcaacaatgaaaacccactagaaatacctcaaacatttattggtatggatgttggacctaaaacaattgaactaattcacaaatacatcaaaggtgatactaaactaggaataagccctgctaaaacaattttttgaaatggacctatgggtgtaactgaatttgaagaattccaaagtggtagtttagctgttgttgaagctatttctcaattagtaggagcttactcagttgttggtggaggagactcaattgctattattgaaaaattaaatgcacaaatgcttttctcacacatttcaacaggtggtggagctagcttagaatttattgaatcaaaagttcttccaggtattgatgcaattcaaaactatgaacaaacatatgagcaatatgactcacaagttcaaagccaagattttagccaaaactttgactcaccattggttgaagaaacattttcacaaagcacatctgaaaactttagtgattttgcaagttctactcaagaacactttgctacaagcgaaaatcaaaatactttaatcaataattacgaaaatccgggatttgattctcaagatatgtttaaaacagaagaacaaaatgattcaactagttcatttttaacttcaacaaatccattttcttctgagttttcaaatgaatttaaaacaagtgattttcaagatttaaaacaaactcaagaaacagaaactcaagaaactttaattccacatacttttgaatatacaactgatgatctaagacatactttagagcaatatgttagagaaactagttttcaaacaagagaatctactttcccaacagaagaggctagcttcgaaacattagaagaaactagttttcaaacactagaagagagcttccctactcaaagttttgaacaagtagaacaaactagtgaaaaaaatatggaagtttcaacagaaaattttgaaaatgcttcttctcaaaccaatagctttacagtttctgatattcctaaaacaacaagcacttttgaagatttagaaactccagaaactcaaaacacaactttagaagaagtagctttagaaacatcaaattttgaagctcaaaacttggaaactccaaacttgcaaacatcaaattttgagacttcaaatttagaaacatcgaattttgaaacttcaaactttgaaacgtcaacttttgaaagtttcaacacaggaaattttagtactccaagttcaacttttgaagatttagatttacaaagcgcaactttccagacaaacgacgaaagtgaaagatcaactcaagaaaattttgaaccaacagaagttattgaaagtgatttattagctatgaaaacaactgaattagaacaagaaatcacaaataacacttcaagagatatcttaagcgaagatgaagttgctgcacctcacaaaaaaagattttgattctttggtagaaaaagataa

SEQ ID NO: 10441 - protein, 771 aa, Mycoplasma pulmonis
MKKLITDLNLNDKKVLIRLDLNVPLKGKKITSLKRIEESIPTIKYVQERGGKIILLSHLGRVKTKEDKEKKSLSIVVEALASLLNSPVKFVDQTRGKKLESAIEKLKPGDVLLIENTRFEDLNNNAESNNDPELGKYWASLGDVFINDAFGTAHRAHASNVGIASNIKESALGILVQKEVNALWKLMEQQEKPFVAILGGSKVSDKINVLEKIIDKVDRLIIGGAMAYTFLKAQGIGIGDSIYEQDKIEFATEFLKKYNHKIILPIDHALAKKFKNAKPIFNNENPLEIPQTFIGMDVGPKTIELIHKYIKGDTKLGISPAKTIFWNGPMGVTEFEEFQSGSLAVVEAISQLVGAYSVVGGGDSIAIIEKLNAQMLFSHISTGGGASLEFIESKVLPGIDAIQNYEQTYEQYDSQVQSQDFSQNFDSPLVEETFSQSTSENFSDFASSTQEHFATSENQNTLINNYENPGFDSQDMFKTEEQNDSTSSFLTSTNPFSSEFSNEFKTSDFQDLKQTQETETQETLIPHTFEYTTDDLRHTLEQYVRETSFQTRESTFPTEEASFETLEETSFQTLEESFPTQSFEQVEQTSEKNMEVSTENFENASSQTNSFTVSDIPKTTSTFEDLETPETQNTTLEEVALETSNFEAQNLETPNLQTSNFETSNLETSNFETSNFETSTFESFNTGNFSTPSSTFEDLDLQSATFQTNDESERSTQENFEPTEVIESDLLAMKTTELEQEITNNTSRDILSEDEVAAPHKKRFWFFGRKR

SEQ ID NO: 10442 - DNA, 1260 bp, Treponema pallidum subsp. pallidum (syphilis spirochete)
  CDS (1)..(1260)
atgatgctgagaacttgtaaagatgtcacaatgcgaggtgagcgtgttgtcgtgcgtgttgattttaacgtaccgatgcgtgatggtatggtgcaagacgacacgcgcgtcactgcagcagttcctactctgcggtacatcatcgagcaggggccgcgacacgtagtgctcattagccatcttggagaccctacccgtgatgcggataaagcagaggggaacgctaagaaagatggttgtccctttgaccgccacgcattcattaacggcaaacaccggcttaagccggttgcggactgccttgcaaagaagttgggggtgccggtgcattttgcgccttcctgcgtcgggcagcgtgaatttattgaagggctgcccgacggttcggtagtgcttttggagaatgtgcgctttcaccccgaggaaacatctggtgatgcgaaggtgcaggagcaatttgcgcgggagcttgcccagtatggggacatttttgttaatgatgcgttcggcactgcgcaccgtgaacatgcatctacggtggtactcccgagacttatgcgtcgcagagtggccggtcttttgatagagcgggaagtgaggtacctggaacctatggtatgcaacccgaaggtgccaatggtggcggttgtcggtggtgccaaggtatcttctaagatagcagtcttggagagtctgcttcgaacatcgacggcgcttatcatcgggggagggatggcatacacctttttgaaagcgcaaggtgtgggtgtaggtacctccctagtggaggatgactttatcgacactgcacgtatgctgttgcaaaaggctcaaagcggtggtgtgtcggtggtattgccggtcgatcacgtatgtgcgtccacgttctgtgcggatgcgcagccggttgcggtggacgatgtgcatattcctatgcacttgatgggtatggatgttggtccgcgtacgcttgagcagtatcgtgcgcatttaaagggagtgagctccgtgttgtggaatggtccggtaggggtttttgagttcgatgcctttgcacacggtacacgggtgcttgcgcagttgatagcagaggcgacggatgcgggtgctacgtcggtagttggtggaggagactctattgcagcagtcagcaagtttgggcttgcaagtcgcatgagccatgtatctacggggggtggcgcatcgctgaagctctttgagggtaaagttttaccgggcatttcgtgtcttgaaacatag

SEQ ID NO: 10443 - protein, 419 aa, Treponema pallidum subsp. pallidum (syphilis spirochete)
MMLRTCKDVTMRGERVVVRVDFNVPMRDGMVQDDTRVTAAVPTLRYIIEQGPRHVVLISHLGDPTRDADKAEGNAKKDGCPFDRHAFINGKHRLKPVADCLAKKLGVPVHFAPSCVGQREFIEGLPDGSVVLLENVRFHPEETSGDAKVQEQFARELAQYGDIFVNDAFGTAHREHASTVVLPRLMRRRVAGLLIEREVRYLEPMVCNPKVPMVAVVGGAKVSSKIAVLESLLRTSTALIIGGGMAYTFLKAQGVGVGTSLVEDDFIDTARMLLQKAQSGGVSVVLPVDHVCASTFCADAQPVAVDDVHIPMHLMGMDVGPRTLEQYRAHLKGVSSVLWNGPVGVFEFDAFAHGTRVLAQLIAEATDAGATSVVGGGDSIAAVSKFGLASRMSHVSTGGGASLKLFEGKVLPGISCLET

SEQ ID NO: 10444 - DNA, 1965 bp, Thermotoga maritima
  CDS (1)..(1965)
atggaaaaaatgaccataagagatgttgatctgaaaggcaagagagtcataatgagagtggacttcaacgttccagtgaaggatggggtcgttcaggacgacacgagaataagagccgcccttccaacgataaagtacgctcttgaacagggtgcaaaggtgatactcctgtcccatcttggaaggcccaagggagaaccttcaccagagttcagcctcgcacctgtcgccaaaagactctctgagcttcttggaaaagaagtgaagtttgttcccgctgttgtcggtgatgaggtgaaaaaggccgttgaggagctcaaagagggagaggttctcctccttgaaaacaccagattccacccgggagagaccaagaacgatcctgaactcgcgaagttctgggctagcctcgccgatattcacgtgaacgatgccttcggaacggcgcacagggcacacgcttccaacgttggaatcgcacagtttattcccagcgtagcgggattcctcatggaaaaagagataaagttcctttccaaggtgacttataatccagaaaaaccgtacgttgtggttcttggaggagcaaaggtatctgacaaaatcggcgtcatcacgaacctcatggagaaagccgacagaattctcataggtggagccatgatgttcaccttcctgaaggctcttggcaaagaggttggatcgtccagggttgaagaagacaagatcgacctcgcaaaagaactcctcgaaaaagcgaaagaaaagggtgttgagatcgttcttcccgttgatgccgttatcgctcagaagatcgaacccggtgtggaaaagaaggttgtcagaatcgacgacgggatacccgaaggatggatgggcctcgacataggacccgagacaattgagctcttcaagcagaagctctccgatgcaaaaaccgttgtctggaacgggccaatgggagtcttcgaaatagacgatttcgctgaaggcacgaagcaggtcgcacttgcgatcgcagcgctcacggaaaagggagcgatcaccgttgtgggtggaggagacagcgccgcggcggtgaacaagttcggtctggaagacaaattctcccacgtttcaacgggcggaggggcttctctcgaattccttgaaggaaaagaacttcctggtattgccagcatcgcggataaaaaaaaaataactcgtaaactgatcctcgctgggaactggaagatgcataaaacgatctcggaagcgaaaaagtttgtgtcgctgctcgtgaacgaacttcacgacgtgaaagagttcgaaatagtggtctgtcctccgttcacagctctatctgaagtgggggaaatactctctggtagaaacatcaaattgggagctcaaaacgttttctacgaagaccagggagcgttcaccggggagatttctcctctcatgctgcaagagatcggcgttgaatacgtgatcgtgggacattccgagagaaggcgtattttcaaagaagacgacgagttcataaacaggaaagtgaaagcggtgcttgaaaaaggtatgactcctattctctgcgttggagaaacactcgaggaaagagagaaagggctcactttctgcgttgtggaaaaacaggtgagagaaggtttctacggtctcgacaaagaggaagcaaagagagtggtaatagcttacgagccagtctgggcaatcgggacaggaagggtggcgacaccacagcaggcacaggaagtacacgcgttcataagaaagctgctctcagagatgtacgacgaggaaacagcgggatcgataaggattctctacggtggaagcataaagccggacaatttcctcggtctcatcgttcagaaggatatagatggtggtctcgttggaggagcgagtctcaaagagtctttcatagaacttgcacgaataatgagaggtgtgatttcctga

SEQ ID NO: 10445 - protein, 654 aa, Thermotoga maritima
MEKMTIRDVDLKGKRVIMRVDFNVPVKDGVVQDDTRIRAALPTIKYALEQGAKVILLSHLGRPKGEPSPEFSLAPVAKRLSELLGKEVKFVPAVVGDEVKKAVEELKEGEVLLLENTRFHPGETKNDPELAKFWASLADIHVNDAFGTAHRAHASNVGIAQFIPSVAGFLMEKEIKFLSKVTYNPEKPYVVVLGGAKVSDKIGVITNLMEKADRILIGGAMMFTFLKALGKEVGSSRVEEDKIDLAKELLEKAKEKGVEIVLPVDAVIAQKIEPGVEKKVVRIDDGIPEGWMGLDIGPETIELFKQKLSDAKTVVWNGPMGVFEIDDFAEGTKQVALAIAALTEKGAITVVGGGDSAAAVNKFGLEDKFSHVSTGGGASLEFLEGKELPGIASIADKKKITRKLILAGNWKMHKTISEAKKFVSLLVNELHDVKEFEIVVCPPFTALSEVGEILSGRNIKLGAQNVFYEDQGAFTGEISPLMLQEIGVEYVIVGHSERRRIFKEDDEFINRKVKAVLEKGMTPILCVGETLEEREKGLTFCVVEKQVREGFYGLDKEEAKRVVIAYEPVWAIGTGRVATPQQAQEVHAFIRKLLSEMYDEETAGSIRILYGGSIKPDNFLGLIVQKDIDGGLVGGASLKESFIELARIMRGVIS

SEQ ID NO: 10446 - DNA, 1185 bp, Bacillus halodurans
  CDS (1)..(1185)
atgaacaaacaatctgttcgtgatgtggaattacaagggaaaaaagtgttttgtcgcgttgattttaacgtgccgatgaaagatggggtcgtgacagatgatacgagaattcgtgccgcgttaccaacgattcaattgttagcagaaaaaggcgcacgcatcattctcgcaagccatctcggtcgtccgaaaggagaagttgtagaggaacttagactcgatccagttgctgctagactgcaagagcttcttggaaagcctgtagcgaaagtcaatgtcgcccacggaccagaggcagagcaagcggcgaacgaactgaaagatggcgatgtgcttttacttgaaaatgttcgtttttaccctggggaagaaaaaaatgatccagagctagcaaaagcttttgcgtctttagcggatgtctatgtgaacgacgccttcggtgcagcacaccgtgcccacgcgtcaacggaaggtattgcacaccatgttacggctgttgcaggcttgctcatggaaaaggagcttgaggtgcttggcaaggcactttccaaccctgagcgcccatttacagcgatcattggtggagcaaaagtgaaagataaaattggtgtcattgaaaaccttttagataaagttgataacttaattattggcggcggacttgcgtacacattcatcaaagcgcaaggacatgagatcggcaaatctcttttagaagcagacaaaatggatttggctctttccttcatggaaaaggcgaaagaaaaaggagtcaacttctacgtaccacaagatgcgattgtagccgatgatttctcgaatgatgcgaatacgaaagcggtggacattgatcaaatcccagccgattgggaagcgctcgatatcggtccaaaaacgcgcgagacctaccgcaatgtcattcaatcctcaaagctcgtcatttggaacgggccaatgggtgtatttgagctcgatgcttttgctggtggcacgaaagctgttgctgaagcgcttgctgatgcaaacgatacgtattctgtcatcggcggtggagattcggcggccgctgtagaaaagttcggtttagctaaccagatgagccatatctcaacaggtggtggagcatctcttgagtttatggaagggaaagctttacctggcgttgtagcgttaaacgataaataa

SEQ ID NO: 10447 - protein, 394 aa, Bacillus halodurans
MNKQSVRDVELQGKKVFCRVDFNVPMKDGVVTDDTRIRAALPTIQLLAEKGARIILASHLGRPKGEVVEELRLDPVAARLQELLGKPVAKVNVAHGPEAEQAANELKDGDVLLLENVRFYPGEEKNDPELAKAFASLADVYVNDAFGAAHRAHASTEGIAHHVTAVAGLLMEKELEVLGKALSNPERPFTAIIGGAKVKDKIGVIENLLDKVDNLIIGGGLAYTFIKAQGHEIGKSLLEADKMDLALSFMEKAKEKGVNFYVPQDAIVADDFSNDANTKAVDIDQIPADWEALDIGPKTRETYRNVIQSSKLVIWNGPMGVFELDAFAGGTKAVAEALADANDTYSVIGGGDSAAAVEKFGLANQMSHISTGGGASLEFMEGKALPGVVALNDK

SEQ ID NO: 10448 - DNA, 1191 bp, Caulobacter crescentus
  CDS (1)..(1191)
atgaccttccgcaccctcgacaccgccgatctcgccggcaagcgcgctctggtccgcgtggacttcaacgtcccggtcgacggtggcaaggtcgccgacgacacccggctgaaggcggccctgccgaccatccgcttcctggccgacaagggcgccaaggtcgtgctgctggcccacttcgaccgtcccaagggcaaggtcgtgccggagatgagtctcgccttcgtggccgagccgctggcggccctgctgggcgcgccggtcgccttcgtcggtgactgcgtcggcccggccgccgctgaggtcgtgaacggcctcgccgatggcggcgtcgccttgctggagaacgtccgcttccacgccggcgaagagaagaacgacgccgagttcgccaaggccctggccgccaatggcgacgtttatgtcaacgacgccttcagcgccgcccaccgcgcccacgcctcgaccgaaggcctggccaagctgctgcccgcctatccgggcgtgtcgatgcagcgcgagctggaagccctggacgcggcgctgggcaatccgaagaagccggtgatcggcatcgtcggcggctccaaggtctcgaccaagctcgacctcttgaacaacctggtcgccaagctggatcgcctggcgatcggcggcggcatggccaacaccttcctgttcgcccagggccacgatgtcggcggctcgctgtgcgaaaaggacctggccgacaccgcccgcgagatcatggaaaaggccaaggccgccggctgcgaactgctgctgccggtcgacgtcgtggtcgccaagaaggtcgcgccgggcgttgagacggcggttcgttcgctgagcgaagtccaggctgacgacctgatcctggacgcgggcccggaaagcgccaagcgtctgctggccgccatggaccagagcctgaccttgatctggaacggccctctgggtgttttcgaggtgcctccgttcgatgaagcgaccgtttccgcagcgaaacatgccgcttcgctcgccaaatcgggtaaaatcgtagccgtggccggtggtggtgatacagtcgccgctctgaaccacgcaggcgtgtcggccgacttcaccttcgtttcgacggcgggcggcgcgttcctggaatggatggagggcaagacgctcccgggcgtcgcggcgctcgaatcctga

SEQ ID NO: 10449 - protein, 396 aa, Caulobacter crescentus
MTFRTLDTADLAGKRALVRVDFNVPVDGGKVADDTRLKAALPTIRFLADKGAKVVLLAHFDRPKGKVVPEMSLAFVAEPLAALLGAPVAFVGDCVGPAAAEVVNGLADGGVALLENVRFHAGEEKNDAEFAKALAANGDVYVNDAFSAAHRAHASTEGLAKLLPAYPGVSMQRELEALDAALGNPKKPVIGIVGGSKVSTKLDLLNNLVAKLDRLAIGGGMANTFLFAQGHDVGGSLCEKDLADTAREIMEKAKAAGCELLLPVDVVVAKKVAPGVETAVRSLSEVQADDLILDAGPESAKRLLAAMDQSLTLIWNGPLGVFEVPPFDEATVSAAKHAASLAKSGKIVAVAGGGDTVAALNHAGVSADFTFVSTAGGAFLEWMEGKTLPGVAALES

SEQ ID NO: 10450 - DNA, 1182 bp, Borrelia burgdorferi (Lyme disease spirochete)
  CDS (1)..(1182)
atgtcaataaaaacagtaaaagactttagtagctttgcgggcaagcgagctttagtaagatgtgattttaatgttcccctaaaagaggggagcattagcgatgatactagaattagggcagcattgtctacaatagagtatctaaaagaaagaggagctaggattgtgcttgtaagtcatttgggtagaccagatggaaagaaaaatcctaaatattctcttaagccggttgccaataggttgtcagagcttttaggccaagatgtcaagatgctttctgattgtattggaagtgaggttgtaaatagtaccttgcaaatgaaggatggggatgttgtattgcttgaaaatgtaaggttttatgcagaagaagagaaaaacgataaaaattttgcaaaaaaactttctgaaaatggagatgtttttgtaaatgatgcttttggcgcagctcatagagctcatgcttcaactgtgggagttgctgattatttgccgtctgttggtggatttttaatggaaaaagaagataaatttcttggtggaatattaaaaaatcccgaaaggccatttgtttcaattattggtggttctaaggtttcttcaaagattgcggtactagaatcacttttgtcaaagtctaatgtagttgtgattggcggtggaatggcttatacttttttgcattccgaaggatattctataggcaaatctcttttagaggacgaatatattggtatagcatcttcttttttaaagaaagcaaaagagctgggcgttaaagtaattttaccacttgatcatattgtagctgatgattttaacaaaaattcaattcctgagtatattgactcctttaatattcctgaaaacaagattggcatggatattggagctaatactttaaaagaaattgaaaatgttgtgaaaactgccaaaactataatttggaatggtcctcttggtgtatttgaatttgattcattttcaaaagggactgctaaggttgccgaaatggtagcatcttgctcaggtttaaccgttgttggtggtggagattctgttgcagctgttaataaatttaatttatctgataagattactcatgtttcaacgggcggtggtgcatcgcttgaatatcttgaagggagaattttgccgggtattaaggttttggagaattaa

SEQ ID NO: 10451 - protein, 393 aa, Borrelia burgdorferi (Lyme disease spirochete)
MSIKTVKDFSSFAGKRALVRCDFNVPLKEGSISDDTRIRAALSTIEYLKERGARIVLVSHLGRPDGKKNPKYSLKPVANRLSELLGQDVKMLSDCIGSEVVNSTLQMKDGDVVLLENVRFYAEEEKNDKNFAKKLSENGDVFVNDAFGAAHRAHASTVGVADYLPSVGGFLMEKEDKFLGGILKNPERPFVSIIGGSKVSSKIAVLESLLSKSNVVVIGGGMAYTFLHSEGYSIGKSLLEDEYIGIASSFLKKAKELGVKVILPLDHIVADDFNKNSIPEYIDSFNIPENKIGMDIGANTLKEIENVVKTAKTIIWNGPLGVFEFDSFSKGTAKVAEMVASCSGLTVVGGGDSVAAVNKFNLSDKITHVSTGGGASLEYLEGRILPGIKVLEN

SEQ ID NO: 10452 - DNA, 1239 bp, Mycobacterium tuberculosis
  CDS (1)..(1239)
atgagcgttgcaaacctcaaggatctactcgccgaaggtgtttcggggcgtggagtgctggtgcgctccgatctcaacgttccgctcgacgaggacggcaccattaccgatgcgggccgcatcatcgcgtcggcgccgacgttgaaggcgttgctcgacgccgacgccaaggtggtggttgccgcgcacttgggacgtcccaaggacgggccggacccgacactgtcgctggcgccggtcgccgtggcgctgggtgagcaactcggccggcacgtccagctggctggagacgttgtcggcgccgatgcgctggcccgcgccgaggggctcaccggcggcgacatcctgctgctggagaacatccgcttcgacaaacgcgaaaccagcaagaacgatgacgaccggcgggcactggccaagcagctggtcgaactggtcggaacgggaggcgttttcgtctccgacggctttggggtggtgcaccgcaagcaagcctcggtctatgacatcgcaaccctgttgccgcactacgccggcacgctggtcgccgacgagatgcgggtactggagcagttgaccagctcgacccagcggccctatgcggtagtgctcggcggatcaaaggtgtccgacaagctgggtgtcatcgagtcgctggcgaccaaggcggacagcattgtgattggcggcggaatgtgcttcacattccttgctgcacagggattttcggttggcacatcgctgctggaagacgacatgatcgaagtctgtcgcgggctgctggaaacctatcacgacgtgttgcggctgcccgtggatctagtggtcacggagaagttcgccgccgactcgccgccccagacggtcgacgtcggcgctgtgcccaatggcttgatgggcctggatatcgggccgggatcgatcaaacggttcagcacgctgctgtccaacgccgggaccatcttctggaacgggccgatgggagtattcgagttcccggcttatgcggccggcaccagaggcgtcgccgaggcgatcgtcgccgccaccggcaaaggggcgtttagtgtggtcggcggcggtgactccgcggccgcagtgcgcgcgatgaacatccccgagggcgccttctcacacatatccaccggcggcggtgcctcgctggaataccttgagggcaagacgcttcccggcatcgaggtactgagccgtgagcagccaaccggaggagttttgtga

SEQ ID NO: 10453 - protein, 412 aa, Mycobacterium tuberculosis
MSVANLKDLLAEGVSGRGVLVRSDLNVPLDEDGTITDAGRIIASAPTLKALLDADAKVVVAAHLGRPKDGPDPTLSLAPVAVALGEQLGRHVQLAGDVVGADALARAEGLTGGDILLLENIRFDKRETSKNDDDRRALAKQLVELVGTGGVFVSDGFGVVHRKQASVYDIATLLPHYAGTLVADEMRVLEQLTSSTQRPYAVVLGGSKVSDKLGVIESLATKADSIVIGGGMCFTFLAAQGFSVGTSLLEDDMIEVCRGLLETYHDVLRLPVDLVVTEKFAADSPPQTVDVGAVPNGLMGLDIGPGSIKRFSTLLSNAGTIFWNGPMGVFEFPAYAAGTRGVAEAIVAATGKGAFSVVGGGDSAAAVRAMNIPEGAFSHISTGGGASLEYLEGKTLPGIEVLSREQPTGGVL

SEQ ID NO: 10454 - DNA, 1242 bp, Alcaligenes eutrophus
  CDS (1)..(1242)
atgatgagcctatcccatgctacgaacccgcaaccgaaacccgcggcggcgccgcacacgctggccgcactgcttgcagccggtggactggctggcaagcgggtcttcatccgcgccgacctcaacgtcccgcaggatgcagcgggcgctatcaccgacgatacccgcatccgggcttccgtgcccgccatcgcggcctgcctgcaggcgggcgccgcggtgatggtcacctcgcacctgggccggccgcaggagggggcgcccgacccgcgccacagcctggcgccggtgggccgccgcctgtccgaactgctgggccgccaggtgccgctcttgtccggctggaccgagggcggcttccaggtgccgcccgggcaggtggtgctgctggaaaactgccgcatgaacacgggcgagaagaagaacagcgacgaactggcgcagaaaatggcggcgctgtgcgatgtctacgtcaacgacgcgttcggcaccgcccaccgcgccgaggcgaccacgcatggcatcgccaggtacgcccccattgcctgcgccggcccgctgctggccgccgagatcgacgcgctgggcaaggcgctgggccagccggcgcgtccgctggtggcgatcgtggccggctccaaggtctcgaccaagctgaccatcctgaagtcgctggccgacaaggtcgacaacctgatcgtcggcggcggcattgccaataccttcatgctggccgccggcctgaagatcggcaagtcgctggccgagcctgacctgctggccgatgccagggccatcatcgacatcatggccaggcgtggcgcctcggtgccgattccggtcgacgtggtgtgcgccaaggaattcagcgccactgccgcggccaccgtcaaggacgtcaaggacgtggccgacgacgacatgatcctggacatcggccccaagaccgccgcgatgctggccgagcagctcaaggccgccggcaccatcgtctggaacggcccggtgggcgtgttcgagttcgaccagttcggcaacggcaccagggtgctggcccaggccatcgctgaatcgaaggcgttctcgatcgccggcggcggcgacacgctggccgcgatcgccaagcacggcattgccgaccgcgtgggctatatctcgaccggcggcggcgcgttcctggaattcctggagggcaagacgctgcccgcgctggccgtgctggcacagcgcgccgctgcctga

SEQ ID NO: 10455 - protein, 413 aa, Alcaligenes eutrophus
MMSLSHATNPQPKPAAAPHTLAALLAAGGLAGKRVFIRADLNVPQDAAGAITDDTRIRASVPAIAACLQAGAAVMVTSHLGRPQEGAPDPRHSLAPVGRRLSELLGRQVPLLSGWTEGGFQVPPGQVVLLENCRMNTGEKKNSDELAQKMAALCDVYVNDAFGTAHRAEATTHGIARYAPIACAGPLLAAEIDALGKALGQPARPLVAIVAGSKVSTKLTILKSLADKVDNLIVGGGIANTFMLAAGLKIGKSLAEPDLLADARAIIDIMARRGASVPIPVDVVCAKEFSATAAATVKDVKDVADDDMILDIGPKTAAMLAEQLKAAGTIVWNGPVGVFEFDQFGNGTRVLAQAIAESKAFSIAGGGDTLAAIAKHGIADRVGYISTGGGAFLEFLEGKTLPALAVLAQRAAA

SEQ ID NO: 10456 - DNA, 1453 bp, Gallus gallus (chicken)
  CDS (96)..(1349)
accaaaacctccccagttcacgagcagcatcgccaagcgtcagagcgcgggcggcggcggtagggaacggacggcagcggtgacttgcggtaaccatgtctctctccaacaagctcaccctggataaggtggatgtgaagggcaagcgggtcgtcatgagggttgacttcaatgttccaatgaaggatcacaaaataaccaacaaccaaagaatcaaggcagctgtccctaccatcaagcactgcttggaccatggagccaagtcagtggttttgatgagtcacctgggccgcccggatggagttcccatgcctgacaagttctccttttctccagtagctgtggagcttaaagctctcctgggcagggaggtctcattcctgaaggattgtgttggtcctgaggtggagaaggcctgtgctaatcctgcaaacggctccgtcatcctgctagagaacctccgattccatgtagaagaagaagggaaagggaaggatgcttcagggaacaagatcaaagctgatgctgcaaaagtggaggctttcagagcctctctttctaaattgggagatgtttatgtcaatgatgcttttggaactgcccatcgtgctcacagctccatggtaggtgttcatcttcctcagaaggctgctggcttcctgatgaagaaagaactggattattttgcaaaggcccttgagagtccagagagacccttcttagcaattcttggaggagctaaagttcaggataagatccagctgatcagtaacatgttagataaggtcaacgagatgatcattggtggtggaatggcattcacctttctcaaagtgttaaacaacatgcagattggcaactcgctgtttgatgaagagggatcaaaaattgtcaaggacctgatggccaaggcagagaagaacggtgtgaagattaccttgccagttgacttcatcactgcagacaaatttgatgagcatgcacagactggggaagccacagtggcttcaggcattcctgctggctggatgggcttggactgcggccctgaaagtgttaagaagtttgttgaagttgtgggaagggccaaacaaatagtgtggaacggtccagttggagtctttgaatgggacaagttctccaaaggaaccaaagccctgatggacaaagtggtggaagtaactggaaagggctgcatcaccattattggtggtggagatactgctacatgctgtgcgaagtggaatactgaagataaagttagccacgttagcactggaggtggtgccagcctggaactgctagagggtaaggttcttcctggcgtggatgccttgagcagtgtgtagagaacagcgtatcaccccagttcctgttcctgtgcacagcccctgagattcaacacttcaacacttctatgcttctgtatttcaactctgcgataggcagaccg

SEQ ID NO: 10457 - protein, 417 aa, Gallus gallus (chicken)
MSLSNKLTLDKVDVKGKRVVMRVDFNVPMKDHKITNNQRIKAAVPTIKHCLDHGAKSVVLMSHLGRPDGVPMPDKFSFSPVAVELKALLGREVSFLKDCVGPEVEKACANPANGSVILLENLRFHVEEEGKGKDASGNKIKADAAKVEAFRASLSKLGDVYVNDAFGTAHRAHSSMVGVHLPQKAAGFLMKKELDYFAKALESPERPFLAILGGAKVQDKIQLISNMLDKVNEMIIGGGMAFTFLKVLNNMQIGNSLFDEEGSKIVKDLMAKAEKNGVKITLPVDFITADKFDEHAQTGEATVASGIPAGWMGLDCGPESVKKFVEVVGRAKQIVWNGPVGVFEWDKFSKGTKALMDKVVEVTGKGCITIIGGGDTATCCAKWNTEDKVSHVSTGGGASLELLEGKVLPGVDALSSV

SEQ ID NO: 10458 - DNA, 1431 bp, Bacillus stearothermophilus
  CDS (188)..(1372)
aacgaaacgggctattcgcaccgcgtcgtcgacttagctgcctacatcgcctcgaaagggctgtaaaaccagcttggtgctgagttttccgcctgttcaagtctataataggaaaatggaggggagcggggaaatgatccccactccttttccttgtccaaactgtagccaaaagggggcacgaacgatgaacaagaagacgatccgcgacgttgatgtgaggggaaagcgcgtcttttgccgcgtcgatttcaacgttccgatggagcaaggcgctatcaccgatgacacgcgcattcgcgccgcactcccgacgatccgctatttgatcgagcacggggcgaaagtcattttggcgagccacctcggccgcccgaaaggaaaagtggtcgaagaattgcgtttggatgccgttgcgaagcggctcggcgagctgcttgaacggccggttgccaaaacgaatgaagcggtcggcgatgaggtgaaagcggcggtcgaccgtttgaacgaaggcgatgtgctcttgcttgagaacgtccgtttttaccctggcgaagagaaaaatgatcccgagctcgccaaagcgtttgcggagcttgcggatctatatgtcaacgatgcgttcggcgccgcccatcgcgctcatgcgtcgacggaaggcatcgcccattacttgccggcggtggccggatttttgatggaaaaagaacttgaagtgcttggcaaggcgctttcgaatccggaccgcccgtttacagcgatcatcggcggggcgaaagtgaaagacaaaatcggcgtcatcgacaatttgcttgaaaaagtcgacaacttgatcatcggcggcggactggcgtatacgttcgtcaaagcgctcggccatgacgtcggcaagtcgctgcttgaggaggacaaaatcgaactcgccaaatcgtttatggaaaaggcgaaagaaaaaggcgtccgtttttatatgccggtggacgtggtcgtcgccgaccggtttgcgaacgacgccaacacgaaagtcgtgccgattgacgcgattccagccgattggtcggcgcttgacatcggcccgaaaacgcgcgaattgtaccgcgatgtcattcgcgagtcgaagctcgttgtctggaacggcccgatgggcgtctttgaaatggacgcgttcgcccacgggacaaaagcgatcgccgaagcactggcggaagcgctcgacacctattcggtcatcggcggcggggattcggcggcggcggttgagaaattcggcttggccgacaaaatggatcatatctccaccggcggcggcgcttcgctcgagtttatggaaggaaaacagctgccgggtgtcgtcgcactcgaagacaaatgacccacggcgccggatttggcgcatggcggctgactccgcccattgaaaggaagggtgaa

SEQ ID NO: 10459 - protein, 394 aa, Bacillus stearothermophilus
MNKKTIRDVDVRGKRVFCRVDFNVPMEQGAITDDTRIRAALPTIRYLIEHGAKVILASHLGRPKGKVVEELRLDAVAKRLGELLERPVAKTNEAVGDEVKAAVDRLNEGDVLLLENVRFYPGEEKNDPELAKAFAELADLYVNDAFGAAHRAHASTEGIAHYLPAVAGFLMEKELEVLGKALSNPDRPFTAIIGGAKVKDKIGVIDNLLEKVDNLIIGGGLAYTFVKALGHDVGKSLLEEDKIELAKSFMEKAKEKGVRFYMPVDVVVADRFANDANTKVVPIDAIPADWSALDIGPKTRELYRDVIRESKLVVWNGPMGVFEMDAFAHGTKAIAEALAEALDTYSVIGGGDSAAAVEKFGLADKMDHISTGGGASLEFMEGKQLPGVVALEDK

SEQ ID NO: 10460 - DNA, 1254 bp, Candida maltosa
  CDS (1)..(1254)
atgtcattatccaacaaattatctgtcaaagacttaaacgtcactggtaaaagagtttttatcagagttgatttcaacgttccattggacggtaaaaccatcaccaacaaccaaagaattgttgctgctttaccaactatcaaatatgttgaagaacaaaaaccaaaatgtatcattttagcttctcacttgggtagaccaaacggtgaaagaaatgaaaaatactctttggccccagttgctgctgaattggaaaaattattgggtcaaaaagtcaccttcttggatgactgtgttggtccagaagtcaccaaagctgttgactctgctactgaaggtcaaatcttcttgttggaaaacttgagattccacattgaagaagaaggttctgctaaagacaaggatggtaaaaaaactaaagctgacccagaagctgtcaagaaattcagagaacaattgacttctttagctgatgtttacgtcaatgatgctttcggtactgcccacagagcccactcttctatggttggtttggaagttccagaaagagctgctggtttcttgatgtccaaagaattggaatactttgctaaagctttggaaaacccacaaagaccattcttggctatcttgggtggtgctaaagtttctgacaaaatccaattgattgacaacttgttggacaaagttgatatgttgattgttggtggtggtatggctttcaccttcaaaaaagtcttgaacaacatgccaattggtgactctcttttcgacgaagctggtgctaaaaacgttgaaaacttggttgctaaagccaagaagaacaatgttgaattgatcttgccagttgatttcgtcactgccgacaaattcgacaaagatgctgaagtctctactgccgatgatgttactggtatcccagacaaatggatgggtttagactgtggtccaaaatccagaaaattatttgctgatgccgttgctaaagctaaaaccattgtttggaacggtccaccaggtgttttcgaatttgacaaattcgctgaaggtactaaatctttattggatgacgctgtcaaatccgctgaagttggtaacattgtcatcattggtggtggtgataccgctactgttgctaagaaatacggtgttgttgacaaattatcccacgtttctactggtggtggtgcttctttggaattattagaaggtaaagaattaccaggtgtaactgctctttctaacaaagcctaa

SEQ ID NO: 10461 - protein, 417 aa, Candida maltosa
MSLSNKLSVKDLNVTGKRVFIRVDFNVPLDGKTITNNQRIVAALPTIKYVEEQKPKCIILASHLGRPNGERNEKYSLAPVAAELEKLLGQKVTFLDDCVGPEVTKAVDSATEGQIFLLENLRFHIEEEGSAKDKDGKKTKADPEAVKKFREQLTSLADVYVNDAFGTAHRAHSSMVGLEVPERAAGFLMSKELEYFAKALENPQRPFLAILGGAKVSDKIQLIDNLLDKVDMLIVGGGMAFTFKKVLNNMPIGDSLFDEAGAKNVENLVAKAKKNNVELILPVDFVTADKFDKDAEVSTADDVTGIPDKWMGLDCGPKSRKLFADAVAKAKTIVWNGPPGVFEFDKFAEGTKSLLDDAVKSAEVGNIVIIGGGDTATVAKKYGVVDKLSHVSTGGGASLELLEGKELPGVTALSNKA

SEQ ID NO: 10462 - DNA, 1377 bp, Plasmodium falciparum
  CDS (15)..(1265)
gaagcttccataaaatgttaggcaacaaattaagcattagtgacctaaaggatattaagaacaagaaggttttagtaagagttgattttaatgtacctattgaaaatggaataattaaagatacgaacagaattactgctacattacccacaattaaccatttaaagaaagaaggagcttcaaaaattatattaatatcccattgtggtagaccagatggtttaagaaatgagaaatataccttaaagccagtagctgaaactttaaaaggattattaggagaagaagtattatttttaaatgattgtgtaggtaaagaagttgaagataaaataaatgctgctaaagaaaattcagtaattctcttagaaaatttaagatttcatattgaagaagaaggtaaaggtgttgatgctaatggaaacaaagtaaaagcaaataaagaagatgttgagaagttccaaaatgatttaacaaaattagctgatgtttttattaatgatgctttcggtactgctcatcgtgctcatagtagtatggtaggtgttaaattaaatgttaaagcttcaggattcttaatgaaaaaagaattagaatattttagtaaagccttagaaaacccacaaagaccactactagccattttaggtggtgctaaagtatcagataaaattcagttaatcaaaaatttattagataaagttgatcgtatgattattggaggtggtatggcttatacttttaaaaaagtcttaaacaatatgaaaattggtacctctctttttgatgaagcaggtagtaaaattgttggagaaattatggaaaaggcaaaagctaaaaatgttcaaatatttttacctgtagattttaaaattgcagataattttgataataatgctaataccaaattcgttactgatgaagaaggtatcccagataattggatgggtcttgatgctggtccaaaaagtattgaaaattataaagatgttattttaacatcaaaaactgttatttggaacggaccacaaggtgttttcgaaatgccaaactttgcaaaaggtagtatcgaatgtctcaatttagttgttgaagttaccaaaaaaggagctatcaccattgttggaggtggagatacagcttcattagttgaacaacaaaataagaaaaacgaaattagtcatgtatctacaggtggaggagcctcacttgaacttttagaaggaaaagaattaccaggtgtattagcactttcaaacaaataaaaccaaggcacaataattaaataaataaaatcatgtaaaataaaaataatatgatatatacaatataatatatattttataatagtgctttatttatttatttatttttttt

SEQ ID NO: 10463 - protein, 416 aa, Plasmodium falciparum
MLGNKLSISDLKDIKNKKVLVRVDFNVPIENGIIKDTNRITATLPTINHLKKEGASKIILISHCGRPDGLRNEKYTLKPVAETLKGLLGEEVLFLNDCVGKEVEDKINAAKENSVILLENLRFHIEEEGKGVDANGNKVKANKEDVEKFQNDLTKLADVFINDAFGTAHRAHSSMVGVKLNVKASGFLMKKELEYFSKALENPQRPLLAILGGAKVSDKIQLIKNLLDKVDRMIIGGGMAYTFKKVLNNMKIGTSLFDEAGSKIVGEIMEKAKAKNVQIFLPVDFKIADNFDNNANTKFVTDEEGIPDNWMGLDAGPKSIENYKDVILTSKTVIWNGPQGVFEMPNFAKGSIECLNLVVEVTKKGAITIVGGGDTASLVEQQNKKNEISHVSTGGGASLELLEGKELPGVLALSNK

SEQ ID NO: 10464 - DNA, 1185 bp, Bacillus megaterium
  CDS (1)..(1185)
atgaacaaaaaaacgttgaaagacatcgatgtaaaaggaaagcgagtattttgtcgcgtagactttaacgtaccaatgaaagacggaaaagtaacagacgaaactcgtattcgtgcagctattcctactattcaatatttagtagaacaaggtgcaaaagtaattttagctagccatcttggacgtccaaaaggcgaagttgttgaagagttacgtctaaatgctgttgcagaacgtttacaagctcttcttggtaaagacgttgcaaaagctgacgaagcttttggcgaagaagtaaagaaaacaatcgacggcatgagcgaaggcgatgttttagtacttgaaaacgtacgtttttacccaggtgaagagaaaaacgatcctgaattagcaaaagcatttgctgaattagcagacgtgtacgtaaacgatgcattcggtgcagctcaccgtgcgcatgcttcaacagaaggaattgcacaacatattccagcagtagcaggtttcttaatggaaaaagagcttgatgtgctttcaaaagcattatcaaacccagaacgtccatttactgcaatcgttggtggagcaaaagttaaagacaaaatcggtgtaattgaccacttgcttgataaagtagataacttaatcatcggtggaggactttcttacacatttattaaggcactaggccatgaagtaggtaaatcacttcttgaagaagacaagattgaacttgcaaaatctttcatggaaaaagctaagaaaaacggagtaaacttctacatgccagtggacgtggtagtagcagatgacttctcaaatgatgctaatattcaagttgtatcaattgaagatattccaagcgattgggaaggcttagacgcaggaccgaaaacgcgtgaaatctatgctgacgtaatcaaaaactctaagttagttatttggaacggaccaatgggtgtatttgaattagacgcatttgctaacggaacaaaagcagtagctgaagctttagcagaagcaactgacacatattcagtaatcggcggaggagactctgcagcagctgttgaaaaattcaacttagctgataaaatgagccatatttctacaggtggcggtgcgtcactagagtttatggaaggtaaagaacttccaggcgtagttgcattaaacgataagtaa

SEQ ID NO: 10465 - protein, 394 aa, Bacillus megaterium
MNKKTLKDIDVKGKRVFCRVDFNVPMKDGKVTDETRIRAAIPTIQYLVEQGAKVILASHLGRPKGEVVEELRLNAVAERLQALLGKDVAKADEAFGEEVKKTIDGMSEGDVLVLENVRFYPGEEKNDPELAKAFAELADVYVNDAFGAAHRAHASTEGIAQHIPAVAGFLMEKELDVLSKALSNPERPFTAIVGGAKVKDKIGVIDHLLDKVDNLIIGGGLSYTFIKALGHEVGKSLLEEDKIELAKSFMEKAKKNGVNFYMPVDVVVADDFSNDANIQVVSIEDIPSDWEGLDAGPKTREIYADVIKNSKLVIWNGPMGVFELDAFANGTKAVAEALAEATDTYSVIGGGDSAAAVEKFNLADKMSHISTGGGASLEFMEGKELPGVVALNDK

SEQ ID NO: 10466 - DNA, 1831 bp, Crithidia fasciculata
  CDS (131)..(1648)
aaagcggcagcaccaactgcgctcactatattttatcttgtttctttgcttccccgtcgtccgtcatcgtgcgcgggctgctttgagctcctgcacaagtttattttattttcttattgtgtccgccgtgatgctcctctccacgcaatcgattcccataaaaaagagcgtcgacgacatctggccggtggcaggcaaacgcgttctcattcgggtggacttcaacgtgcccaccagctctggcggcatcgacgacgacttccgcattcgctctgctatccccactattcgccgcatcgttgaccagggtggcatctgcatcctcatcagccacctcggccgccccaccggtgtggactacgacaccgcccatgcagagcaggaaaagcgccagacaccggtgcagctgcccaattcgcgtggcaagaccgccttcttctctgggctgcgtggcgatgcgaaggcgacgatcttggcgtggtcgagtcagcgagagaaggctgcaacgctctccaacccgtacggcagtggcaagacggccgtctttgcgcgcctgccagaggaagagaagcggcgcctgctgctgcgcttcatgagtgagcacaaggaggagctcttcccccagctcggctccgcgggctacgagaaggagttcagcttggagccggtggcggtgaagctggcggagctgctggatcagcacgtgtactttggccacgactgcctcggcgcgcaagcggatattgcaaagctgcggtgtggggaggtgatgctgctggagaaccttcgcttctacacgaacgagaactcatctgacgagcgcaagcgcatgctgatggcgcgtattctcgcctcgtatgccgatgtgtacatcaacgacgccttcggcacggcgcaccgcgacagcgcgagtttgacgggcatcccccgcgtgctgcagcagggtgcggccggctacctgatggagaaggagatctcgtacttctccaaggtgctgaacaacccaccccggccgctcttggcgattatcggcggcgcgaagctcagcgacaagatgcaggtgctggagaacctgctggactgcgtcgacagcctcttcatcggtggtggcttggcgtacacgtttctccggtctcagggctactcgatcggcacgtcccacttcgaggaggcttttgtgcccttcgcccaagcgcttcctctcgctggcagcggacggcaggtgcgggtggtgctgccagaggaccacgtctgccacgcccacacgcggccggccgaagcgccgctcacgacgacgagtgccaatataccggacggctacgcagggctggacattggcccgctcaccatccaatccatcacgcacctcgtgcggcagtgcagcagcgtgatctggaacggaccacttggcatgttcgagatgccatactacgccttcggcacgttttccattgcgcgagtggtgagtcagtcttcggctgcgaagggcactaccagcatcgtcggcggtggcgacacggcgagcgcgatgatgaagtccggcgaggcggctcacatttcgcacatctccacaggcggcaacgcatcgctggagctgctggaggggaaggtgctagccgccgtggcggtgctggacaacaaggagtgagagcgactccgtatgtatttttttttttctgcccggcgtgtattacgccgttttaagagctccatcgacgcctttttgtccttcagctgctccagctgctccacggtgactcgcttctttctctttctagagtgtctttttttttcttttcactctctatacatatgtgagcgacctctttgc

SEQ ID NO: 10467 - protein, 505 aa, Crithidia fasciculata
MLLSTQSIPIKKSVDDIWPVAGKRVLIRVDFNVPTSSGGIDDDFRIRSAIPTIRRIVDQGGICILISHLGRPTGVDYDTAHAEQEKRQTPVQLPNSRGKTAFFSGLRGDAKATILAWSSQREKAATLSNPYGSGKTAVFARLPEEEKRRLLLRFMSEHKEELFPQLGSAGYEKEFSLEPVAVKLAELLDQHVYFGHDCLGAQADIAKLRCGEVMLLENLRFYTNENSSDERKRMLMARILASYADVYINDAFGTAHRDSASLTGIPRVLQQGAAGYLMEKEISYFSKVLNNPPRPLLAIIGGAKLSDKMQVLENLLDCVDSLFIGGGLAYTFLRSQGYSIGTSHFEEAFVPFAQALPLAGSGRQVRVVLPEDHVCHAHTRPAEAPLTTTSANIPDGYAGLDIGPLTIQSITHLVRQCSSVIWNGPLGMFEMPYYAFGTFSIARVVSQSSAAKGTTSIVGGGDTASAMMKSGEAAHISHISTGGNASLELLEGKVLAAVAVLDNKE

SEQ ID NO: 10468 - DNA, 1248 bp, Drosophila melanogaster
  CDS (1)..(1248)
atggccttcaataagctgagcatcgaaaacctggacttggcgggcaagcgggtgttgatgcgcgtcgacttcaatgtgcccatcaaggagggcaagatcaccagcaaccagagaattgtcgctgccttggatagtatcaagttggccctttccaagaaagccaagtcggtggtgctgatgtcccacttgggtcgtcccgatggcaacaagaacatcaagtacaccctggcacccgtggccgctgagctgaagaccctgcttggccaggatgtgatcttcctaagtgactgcgtcggcagcgaagtggaggccgcttgcaaggatcccgcaccgggatccgtcattctgctggagaacgtccgcttctacgtggaggaggagggcaagggcttggatgccagcggcggcaaggtcaaggccgatcctgccaaggtcaaggagttccgtgccagcctggccaagctgggcgatgtctatgtcaacgacgccttcggcactgcccatcgcgcccacagttccatgatgggcgatggcttcgagcagcgcgcagctggtctgttgctgaacaaggagctgaagtacttctcgcaggccctggacaagccaccaaatcccttcctggcaattctcggtggcgccaaggtggccgacaagatccagctgattgagaaccttctggacaaggtcaacgagatgatcatcggtggcggcatggccttcaccttcctgaaggtcctcaacaacatgaagatcggcggttccctgttcgacgaggagggctccaagatcgtcgagaaactggtggagaaggccaagaagaataacgtgcagttgcatctgccagtggactttgtctgcggcgacaagttcgccgagaacgctgccgtcagcgaggccaccgtggaggccggaattcccgatggacacatgggtctggatgtgggtcccaagacccgtgagctcttcgcggcacccatcgcacgcgccaagctcatcgtgtggaacggaccccccggtgtctttgagttccccaacttcgccaacggcaccaagtccatcatggacggcgtggtggccgccaccaagaacggcaccgtctccatcatcggcggcggcgacactgcctcttgctgcgccaagtggaacacggaggcactcgtctcgcacgtctccaccggaggcggcgcttcgctggagctcctggagggcaagacactgccaggcgtgcgtgcattgaccagcgcctaa

SEQ ID NO: 10469 - protein, 415 aa, Drosophila melanogaster
MAFNKLSIENLDLAGKRVLMRVDFNVPIKEGKITSNQRIVAALDSIKLALSKKAKSVVLMSHLGRPDGNKNIKYTLAPVAAELKTLLGQDVIFLSDCVGSEVEAACKDPAPGSVILLENVRFYVEEEGKGLDASGGKVKADPAKVKEFRASLAKLGDVYVNDAFGTAHRAHSSMMGDGFEQRAAGLLLNKELKYFSQALDKPPNPFLAILGGAKVADKIQLIENLLDKVNEMIIGGGMAFTFLKVLNNMKIGGSLFDEEGSKIVEKLVEKAKKNNVQLHLPVDFVCGDKFAENAAVSEATVEAGIPDGHMGLDVGPKTRELFAAPIARAKLIVWNGPPGVFEFPNFANGTKSIMDGVVAATKNGTVSIIGGGDTASCCAKWNTEALVSHVSTGGGASLELLEGKTLPGVRALTSA

SEQ ID NO: 10470 - DNA, 1251 bp, Kluyveromyces marxianus var. lactis, Candida sphaerica
  CDS (1)..(1251)
atgtctttgagttcaaaattgactgtcaaggatttggatgtcactggtaaaagagtgttcatcagagttgatttcaacgtcccattggacggtaagaagatcacttccaaccaaagaattgtagcagctctgcctactattcaatacgttttggaaaagaagccaaaggccattgtcttggcctctcatttgggtagaccaaacggtgaagttaacgacaaatactcattggctccagttgccgatgaattgtctagactattgcaaaagccagttactttcttgcatgactgtgttggtgaagaagtcaccaatgccgttaacaacgctaaggacggtgaagttttcctattggaaaacttgagattccacatcgaagaagaaggttccagaaaggtggatggtaacaaggttaaggctgacaaggctgctgttaccaaattcagagaacaattgagttctttggccgatgtttacgttaacgatgccttcggtaccgctcacagagctcactcttccattgtcggtttcgacttgccaaacagagctgccggtttcttgttgtccaaggaattgcaatactttgctaaggctttggaaaacccaaccagaccattcttggctatcttgggtggtgctaaggttgcagacaagattcaattgatcgacaatttgttggacaaggtcgattctttgatcattggtggtggtatggctttcaccttcaagaaggtcttggaaaacactgaaatcggtgactccatctacgatgctgctggtgccgaattggttccaaagttggtcgaaaaggctaagaagaacaacgtcaagatcgtcttgccaactgacttcgtcattggtgacaagttctctgctgatgctaacacaaaggttgtcaccgacaaggaaggtattccaagcggctggcaagggttggacaacggtccagaatctagaaaggctttcgctgccactgttgctgaagctaagactattgtctggaacggtccaccaggtgtcttcgaatttgctcctttcgctaagggtaccgaagctctattggacgccgttgtcgcctcctctcaagctggtaacaacgtcatcatcggtggtggtgacaccgctaccgtcgccaagaagtacggtgtcgtcgacaagatctctcacgtctccactggtggtggtgcttctttggaattgttggaaggtaaagaattgcctggtgtcactttcttgtccaacaagcaataa

SEQ ID NO: 10471 - protein, 416 aa, Kluyveromyces marxianus var. lactis, Candida sphaerica
MSLSSKLTVKDLDVTGKRVFIRVDFNVPLDGKKITSNQRIVAALPTIQYVLEKKPKAIVLASHLGRPNGEVNDKYSLAPVADELSRLLQKPVTFLHDCVGEEVTNAVNNAKDGEVFLLENLRFHIEEEGSRKVDGNKVKADKAAVTKFREQLSSLADVYVNDAFGTAHRAHSSIVGFDLPNRAAGFLLSKELQYFAKALENPTRPFLAILGGAKVADKIQLIDNLLDKVDSLIIGGGMAFTFKKVLENTEIGDSIYDAAGAELVPKLVEKAKKNNVKIVLPTDFVIGDKFSADANTKVVTDKEGIPSGWQGLDNGPESRKAFAATVAEAKTIVWNGPPGVFEFAPFAKGTEALLDAVVASSQAGNNVIIGGGDTATVAKKYGVVDKISHVSTGGGASLELLEGKELPGVTFLSNKQ

SEQ ID NO: 10472 - DNA, 1449 bp, Zymomonas mobilis
  CDS (148)..(1341)
ctgcagttagttattaagctgattgcagcattaacctcctgatacaggcccgttatgggatatatccgttatagctgggtctcgtaaggaggctgtctccgttatcagatccgctttatgatataaggcggccaaaaggaggatataatggcttttcgtacattagatgatattggtgacgtcaaaggtaagcgcgttcttgttcgcgaagatctgaacgttcctatggatggcgatcgcgttacggatgatactcgtctgcgcgctgcaatcccgaccgttaatgaattggctgaaaagggcgccaaagtccttattctggctcacttcggtcgtccaaaaggtcagccgaatcctgaaatgtccttggctcgcatcaaagatgcgctggctggcgttctgggtcgtccggttcacttcatcaatgacatcaaaggtgaagctgcagcaaaagccgttgatgccctgaatcctggtgccgttgctcttcttgaaaacacccgcttttatgctggtgaagaaaagaatgatccggctctggcagcagaagtagctaagctcggcgatttctatgtcaatgatgctttctcggctgctcaccgcgcccatgtttcgaccgaaggtctggctcacaagctgcctgctttcgctggtcgtgccatgcagaaagaattagaagctcttgaagctgcccttggtaagccgacccacccggtcgcagccgttgtcggtggtgctaaagtttctaccaagctcgacgttctgaccaaccttgtttccaaggttgaccatctgatcatcggtggtggtatggctaataccttcctcgctgctcagggtgttgatgttggtaaatcgctttgtgagcatgagctgaaagataccgttaaaggtattttcgctgctgctgaaaaaacgggctgcaaaatccatcttccgagcgatgtcgttgtcgccaaggaattcaaagccaatccgccgatccgtaccattccggtcagcgacgttgctgctgacgaaatgatccttgacgttggcccgaaagccgtcgctgctttgaccgaagttctgaaagcttccaagaccttggtctggaatggcccgttgggcgctttcgaaattgaacctttcgataaagctacggttgctctcgctaaggaagccgctgctttgaccaaagccggttctttgatctctgttgctggtggtggtgacacggttgccgctcttaaccatgctggtgtggcaaaagactttagctttgtctcaacggctggtggtgctttcctcgaatggatggaaggtaaagagctgccgggtgttaaagccctcgaagcttaattttccagaagaagggggcggcttttttaagtcgccctttttttgtctttatttagataaaagaggctttttaggcttgcctcttctttttaaaaaattaacctgcga

SEQ ID NO: 10473 - protein, 397 aa, Zymomonas mobilis
MAFRTLDDIGDVKGKRVLVREDLNVPMDGDRVTDDTRLRAAIPTVNELAEKGAKVLILAHFGRPKGQPNPEMSLARIKDALAGVLGRPVHFINDIKGEAAAKAVDALNPGAVALLENTRFYAGEEKNDPALAAEVAKLGDFYVNDAFSAAHRAHVSTEGLAHKLPAFAGRAMQKELEALEAALGKPTHPVAAVVGGAKVSTKLDVLTNLVSKVDHLIIGGGMANTFLAAQGVDVGKSLCEHELKDTVKGIFAAAEKTGCKIHLPSDVVVAKEFKANPPIRTIPVSDVAADEMILDVGPKAVAALTEVLKASKTLVWNGPLGAFEIEPFDKATVALAKEAAALTKAGSLISVAGGGDTVAALNHAGVAKDFSFVSTAGGAFLEWMEGKELPGVKALEA

SEQ ID NO: 10474 - DNA, 1254 bp, Penicillium citrinum
  CDS (1)..(1254)
atgtctctctccaacaagctccccgttactgatgtcgacctcaagggcaagcgtgtcttgatccgggttgacttcaatgtccccctcgatgagaacaagaacgttaccaacccccagcgtatcgttggtgctctgcccaccatcaagtatgctatcgacaacggtgccaaggctgttgtgctcatgtcccacctcggccgccccgatggcaaggtcaaccccaagtacagcctgaagcccgttgttcccgtgcttgagaagcttctcggcaagagcgtcaccttcgctgaggactgcgttggtccccagaccgaggagaccgtgaacaaggcttccgatggccaggtcattctgcttgagaacctgcgtttccacgctgaggaggagggcagctccaaggatgctgagggcaagaaggtcaaggccgacaaggccgatgttgatgcgttccgcaagggcctcactgccctcggtgacgtttacgttaacgatgctttcggtaccgcacaccgcgctcacagctccatggtcggcgtggacctcccccagaaggccgccggtttcctcgtgaagaaggagctggagtacttcgccaaggctcttgagagccctgcccgtcccttcctcgccatcctcggtggtgccaaggtgtccgacaagatccagctgatcgataacctcctgcccaaggttaacagcctcatcatcaccggtggaatggctttcaccttcaagaagactcttgagaacgtcaagatcggtaacagtctcttcgacgaggccggcagcaagatcgtcggcgagatcgtcgagaaggccaagaagtacaacgtcgagatcgtcctccccgttgactacgtcaccgccgataagttctccgccgatgctaccgttggtgccgctaccgacgccaccggtatccccgacggctacatgggtctggatgttggccccgagagtgtcaagctctaccagaagaccatcgccgaggccaagaccatcctctggaacggtccccccggtgtcttcgagcttaagcccttcgccagcgccaccgaggctaccctcgatgccgctgtcaaggctgccgagtccggctccatcgtcatcatcggtggtggtgataccgctaccgtggccgctaagtacaaggtcgaggacaagatctcccacgtctcaactggtggcggtgcttcgctcgagcttctcgagggcaaggagcttcccggtgttgctgctctgtccagtaagtaa

SEQ ID NO: 10475 - protein, 417 aa, Penicillium citrinum
MSLSNKLPVTDVDLKGKRVLIRVDFNVPLDENKNVTNPQRIVGALPTIKYAIDNGAKAVVLMSHLGRPDGKVNPKYSLKPVVPVLEKLLGKSVTFAEDCVGPQTEETVNKASDGQVILLENLRFHAEEEGSSKDAEGKKVKADKADVDAFRKGLTALGDVYVNDAFGTAHRAHSSMVGVDLPQKAAGFLVKKELEYFAKALESPARPFLAILGGAKVSDKIQLIDNLLPKVNSLIITGGMAFTFKKTLENVKIGNSLFDEAGSKIVGEIVEKAKKYNVEIVLPVDYVTADKFSADATVGAATDATGIPDGYMGLDVGPESVKLYQKTIAEAKTILWNGPPGVFELKPFASATEATLDAAVKAAESGSIVIIGGGDTATVAAKYKVEDKISHVSTGGGASLELLEGKELPGVAALSSK

SEQ ID NO: 10476 - DNA, 1227 bp, Sulfolobus solfataricus
  CDS (1)..(1227)
atgggagacttaactatacccacaatggatgatatagatatccaatcaaaaaaagttctgttacgaatagacataaattcccccgtagatgagaacggcaaaataattgatgattctagaataaaggcacatattggaacaattaaggaattgattaataagggcaattctgttgtgttaatttcacatcaaggtaggcctggagacaaggatttcacaagtttagaggaacatgctaaattaatttcaaagtatttagatcgagaagtaattttcgtagatgatgtaataggcccatatgcaagggaaatgattaaaaaattagaaaataatgggattttactcttagataatataagattaatttcagaggagttaatagaggctccaccacaacaacacgtaaaaagctttttagtaaagaaattagctccgcttttcgacatttatatcaatgatgcgttcgctactgcacacagaagtcagcctagtatcgtaggctttcctttagctttaccatcagcagctggaagagtaatggaaagggaagtttcagcgttagccaagatttttaatgccgaagacacaccaaagatatttacgttaggtggtggtaaggttcacgatactattaggataattgaaaatctagtgagaaaaaggatagctgacagaatacttactgggggtttagttgcagaattattttctgtcgctaaaggaatgaatttaaatccaaagaatatggaaattctggaaaaattaggtatactgagtctaattcctagagctagaaaactacttctaagtggagctcctatcgaaataccagttgactataaggtagaaataaacggaaacgtaatcgaggaaccagctagtaaggtcactggcattataaaggatatcggatccactactgcagaaatatactcatcatttataaaagatgctaaagtagtagttttaaggggaccaatgggagtaatcgaagatgaaagatttaagagtggaagtaaaagcgtcttaaaagcatcattagagggacaaggttacgttataataggaggtggacacatgataagtgctttagatgaggatatgaagatagatagtagtaaagttcatatctctactggtggaggagctctcctcttattcttatctggagaacgattaccagcattagaggcattatcaatgtcggtggtgaatagcggtgattaa

SEQ ID NO: 10477 - protein, 408 aa, Sulfolobus solfataricus
MGDLTIPTMDDIDIQSKKVLLRIDINSPVDENGKIIDDSRIKAHIGTIKELINKGNSVVLISHQGRPGDKDFTSLEEHAKLISKYLDREVIFVDDVIGPYAREMIKKLENNGILLLDNIRLISEELIEAPPQQHVKSFLVKKLAPLFDIYINDAFATAHRSQPSIVGFPLALPSAAGRVMEREVSALAKIFNAEDTPKIFTLGGGKVHDTIRIIENLVRKRIADRILTGGLVAELFSVAKGMNLNPKNMEILEKLGILSLIPRARKLLLSGAPIEIPVDYKVEINGNVIEEPASKVTGIIKDIGSTTAEIYSSFIKDAKVVVLRGPMGVIEDERFKSGSKSVLKASLEGQGYVIIGGGHMISALDEDMKIDSSKVHISTGGGALLLFLSGERLPALEALSMSVVNSGD

SEQ ID NO: 10478 - DNA, 1206 bp, Haloarcula vallismortis
  CDS (1)..(1206)
atgatgactttccagacgctcgatgacctcgacgatggacagcgcgtcctcgtccgactcgacctcaactcaccggtcgaggacggcacagtacaggacaatcgacggttcgaccgccacgcggagactgtcaaggaactcgctgaccgggggttcgaggtcgcagtgctggcccatcagggccgcccgggccgcgacgacttcgtctcgctcgaccagcacgccgacatcctcgccgaccacatcgaccgcgacgtggatttcgtcgacgagacctacgggccacaggcgattcacgatatcgccgacctcgatagtggcgacgtgctcgttctggagaacacgcggatgtgtgacgacgaactgcccgaggaagaccccgaagtgaaggcccagacggagttcgtcaagacgctggccggggagttcgacgcctacatcaacgacgcctactccgcggcccaccgctcgcacgcctcgctcgtgggcttcccgctcgtgatggatgcctacgccggtcgcgtgatggagaccgagtacgaggccaacaccgccatcgccgagaaggagttcgacgggcaggtgacgatggtcgtcggcgggacgaaggccaccgacgtcatcgacgtgatgacccacttagacgagaaggtcgacgacttcttgcttggcggtatcgcgggaactgttcctgcggcagccggccacccagtcggctacgacatcgacgacgcgaacctctacgacgagcagtgggaggcaaacagtgagaagatcgagtccatgctcgaagaccaccgggaccagattaccctcgcggtcgacctggcctacgaggacgagaacgacgaccgcgccgagcaggccgtcgacgacatcgacgagaaaaggctctcgtacctcgacgtgggcagcgagaccctcatggagtactcgccgatcatccgcgagtccgaggccgtcttcggtgaagggcgcgctgggatgttcgaagacgaacggttctcggtcgggactgccggtgtgctcgaagccatcgccgacaccgactgtttctccgtcgtcggcggcggcgacacctcacgcgctatcgagatgtacgggatggaagaagacgagttcggccacgtctccatcgctggcggggcctacatccgggcgttgacgcgcgcacaactggtcggcgtcgaagtcctccagcgctaa

SEQ ID NO: 10479 - protein, 401 aa, Haloarcula vallismortis
MMTFQTLDDLDDGQRVLVRLDLNSPVEDGTVQDNRRFDRHAETVKELADRGFEVAVLAHQGRPGRDDFVSLDQHADILADHIDRDVDFVDETYGPQAIHDIADLDSGDVLVLENTRMCDDELPEEDPEVKAQTEFVKTLAGEFDAYINDAYSAAHRSHASLVGFPLVMDAYAGRVMETEYEANTAIAEKEFDGQVTMVVGGTKATDVIDVMTHLDEKVDDFLLGGIAGTVPAAAGHPVGYDIDDANLYDEQWEANSEKIESMLEDHRDQITLAVDLAYEDENDDRAEQAVDDIDEKRLSYLDVGSETLMEYSPIIRESEAVFGEGRAGMFEDERFSVGTAGVLEAIADTDCFSVVGGGDTSRAIEMYGMEEDEFGHVSIAGGAYIRALTRAQLVGVEVLQR

SEQ ID NO: 10480 - DNA, 1448 bp, Pyrococcus woesei
  CDS (85)..(1317)
caacatgttttaggctatacaatcttttcttccccttccccacaactttcttaaatctccatccaactattttatggtggtgaaatgttcaggttgagagattttgaatactacaacagaaccgtgtttcttcgagttgacttaaactcaccaatgagtaatggaaaaataataagtgacgcgagatttcgagcagtccttccaacgataaagtacctaatagagagtggagcaaaagtagttgttggcactcatcaaggaaaaccctacagcgaagagtattcgactactgaagagcatgcgagaattctctctgagctcctaaatatgcatgttgaatacgttgaagacatttttggaaagtatgcaagggagagaataaaggctatgaaacctggggaagttatagtcctcgaaaacctcaggttctctgcagaagaagtaaaaaacgcaactattgaggaatgcgaaaagacgttttttgttaggaagctctcccaggtaatagacctcgttgttaacgatgcctttgctgccgctcatagaagtcagccatctctcgttggttttgcaagaataaagcctatgataatgggattccttatggaaaaagaagttgatgctttaacaaaagcttatgaaagtgaagaaaagccgagagtttatgttcttggtggtgcaaaagttgatgactcattaaaagttgccgaaaacgttcttaggaaagaaaaggctgatctcatactgacagggggattggttggccaattattcactctagctaagggctttgacctgggaagagaaaacattaaattcttagaaaagaagggaattttaaaatacgtagactgggcagaaaagattcttgacgaattttatccctacgttagaactcccgtagactttgccattgacttcaagggagaaagagtagagatagatttgctcagcgacgagaaaaggctctttgacgaatatccaatccttgacatcggttctagaacagttgaaaagtatagggagatactcttaaaggccaggataatagtagccaacggtcctatgggagtgttcgaaagggaagaatttgccgtgggaacaattggggtattcaaggccatcggagagagtccagcctttagcgtcattggtggtggtcattcaatagcaagcatatacaagtacaacataactgggataagccatatctctaccggtgggggagctatgctaacattttttgctggagaaaagttgccagttcttgaagcgctaaagattagttacgaaaagttctctaacttactttcttaatttttaaccagacatttaaaagtagaatcctgtgaatatccttggaggtgaggaagtgaaaggggttattctagctgctggatatgggagtagaatgggagagaaccaaagggactactaaagatcgcagg

SEQ ID NO: 10481 - protein, 410 aa, Pyrococcus woesei
MFRLRDFEYYNRTVFLRVDLNSPMSNGKIISDARFRAVLPTIKYLIESGAKVVVGTHQGKPYSEEYSTTEEHARILSELLNMHVEYVEDIFGKYARERIKAMKPGEVIVLENLRFSAEEVKNATIEECEKTFFVRKLSQVIDLVVNDAFAAAHRSQPSLVGFARIKPMIMGFLMEKEVDALTKAYESEEKPRVYVLGGAKVDDSLKVAENVLRKEKADLILTGGLVGQLFTLAKGFDLGRENIKFLEKKGILKYVDWAEKILDEFYPYVRTPVDFAIDFKGERVEIDLLSDEKRLFDEYPILDIGSRTVEKYREILLKARIIVANGPMGVFEREEFAVGTIGVFKAIGESPAFSVIGGGHSIASIYKYNITGISHISTGGGAMLTFFAGEKLPVLEALKISYEKFSNLLS

SEQ ID NO: 10482 - DNA, 1251 bp, Mycobacterium leprae
  CDS (1)..(1251)
atgcgcattcctaatcttaaagatcttcttgaggaaggtgtttctggtcgctgcgtgttggtgcgctgcgatctgaacgtcccgctgggggatgatggcgccatcaccgacctcggtcgggtcaccgcgtcggtgcctacgttgaaagcgctgcttgaggccggagccaagattgtggttgccgcccatctgggccgccccaagaacgggccagacccaaagctgtcactggagccggtcgccgcggcgctcggtgagcagctgggccaaaacgtccagttggtctgcagcaccgatcgttcccctgtcgggggtgatgcgctcgcctgtgttgagaggctgaccgacggcgacctcctactgctgcagaacatccgcttcgatccgcgcgagaccagcaaagtcgacgacgaacgactcgctctggccaagcaattggttgaattggtcgggtcagcaggagcttttgtttcggatggattcggtgtggtgcatcgcaggcaggcttcggtgtatgacgtcgctacgctattgccgcactacgccggcatactggttgctgacgagataaggatactcgagcaattgactagttcggccaaacgcccctacgcagtggtgctcggcgggtcgaaggtatccgacaagctcggcgtcatcgagtcgctggcgacaaaagccgatagcatcgtactcggaggtggaatgtgctttacatttcttgctgcacaaggattttcagtaggtaaatcgttattggaaaccgagatgatcgagacctgtcgtagtctgttggacacctacgctgacgtgcttcggcttcctatggacattgtggtgacagagaagttcgtcgctgattcgccgccgcagaccgtcgccgccgacgctatcccagatggattgatgggactggatatcgggccggaatcggtcaagcggttcgctacgttgttatccaacgcctcgaccattttctggaacggaccgatgggcgtgttcgaattccctgcgtacgccgcgggcaccagaggtgttgctgaagcaatcgtggctgttactggcaagggagctttcagcgtggtcggcggcggtgactctgcggctgcgatgcgggcgctcagcctacccgaaggcagtgtctcgcacctttccaccggtggcggcgcgtcgttggaataccttgagggcaagacgctacccgggatcgaggtactaggtcgtgagcagccaaggggaggagactcgtga

SEQ ID NO: 10483 - protein, 416 aa, Mycobacterium leprae
MRIPNLKDLLEEGVSGRCVLVRCDLNVPLGDDGAITDLGRVTASVPTLKALLEAGAKIVVAAHLGRPKNGPDPKLSLEPVAAALGEQLGQNVQLVCSTDRSPVGGDALACVERLTDGDLLLLQNIRFDPRETSKVDDERLALAKQLVELVGSAGAFVSDGFGVVHRRQASVYDVATLLPHYAGILVADEIRILEQLTSSAKRPYAVVLGGSKVSDKLGVIESLATKADSIVLGGGMCFTFLAAQGFSVGKSLLETEMIETCRSLLDTYADVLRLPMDIVVTEKFVADSPPQTVAADAIPDGLMGLDIGPESVKRFATLLSNASTIFWNGPMGVFEFPAYAAGTRGVAEAIVAVTGKGAFSVVGGGDSAAAMRALSLPEGSVSHLSTGGGASLEYLEGKTLPGIEVLGREQPRGGDS

SEQ ID NO: 10484 - DNA, 1230 bp, Mycoplasma pneumoniae
  CDS (1)..(441)
atggttgactttaaaacagtccaagcgtttgactttcagggtaaaaccgtagtcttacgtgctgacctcaatgtgccgatgaaggacggggtcattaccgacaacgaacgcatactagctagcttagacacgattaagtacctcttgggtcacaattgcaaaattgtgttactgtcccatttgtcacgagtcaaatcgctcgatgacaaaaagggtaagaagtcactccaaccagtagctagtgctttacaaaatttattaaagaacaccaaggttcacttttgtccggaaaacacgggtgacaaggtcaaagtcgcagtcaatcaactcccattaggggaaattttggtgttggaaaacacgcgttactgtgatgtgaatgaggctggtgaagtggttaaacacgaaagcaagaataacgctgagttagcacagttctgagcatcattgggtgacatctttgtcaatgacgcctttggcaccgcccaccgccgtcacgcttccaacgctggcattgccaagtacatcaaaaactcctgcattggtcttttaatggagcgggaattgatcaacctctaccgcttaattaataacccacccaaaccgtttgtggttgtgttgggtggcgctaaggtttctgataagttacaggtagtaaataacctgttcaagattgcggatcatattttaataggtgggggcatggtcaacaccttcctcaaagctctgggtaacgaagttggcacttccttagtggaggaagacttagtccaaaccgccaagcaaatccttgacagtgacaaggacaagaaaattgtcttgggggtagaccaaatgcttcatgctagctttaaggatgaaccaggcgtggagtgtgttgtagccccccaatgaccagcagaacttcagggctttatgtccttggatgttggtagcaaaacagtggccctgtttagcagttacctcgccaaggccaaaacaatcttttggaatggtcccatgggcgtatttgaatttagcaactatgctcagggtaccttagcaattggtaaagcgattgcgcaaaaccaacaagcctttagtgtcattggcggtggtgattctgcagccgctgctaaacaactccagattgctgatcaatttagttttatttccactggtggtggtgcatctttagcactaataggtggggaagagctagtgggaattagcgatattcaaaaaaagtaa

SEQ ID NO: 10485 - protein, 146 aa, Mycoplasma pneumoniae
MVDFKTVQAFDFQGKTVVLRADLNVPMKDGVITDNERILASLDTIKYLLGHNCKIVLLSHLSRVKSLDDKKGKKSLQPVASALQNLLKNTKVHFCPENTGDKVKVAVNQLPLGEILVLENTRYCDVNEAGEVVKHESKNNAELAQF

SEQ ID NO: 10486 - DNA, 1722 bp, Nicotiana tabacum (common tobacco)
  CDS (52)..(1497)
gcacgaggctttttgccgtaagacagaaccgagaagagaagagtgtaaacaatggcatcagctacagcttcccacactttgtgcggcatccccgccacctcatcctctactaccaacaaggctattgccccttcatccgctcgcttcctcgccaaaactcctctccgccgcctcggcttcgctggcgccgccgctgattctctcttcaccaaccacgtggctaccaagctccgatccctcaagagctcctccaagcctattaggggcgttgcttctatggccaagaagagcgttggagacctcaccgctgccgagttgaagggcaagaaagtcttcgtcagggccgatttgaatgtcccacttgatgataaccagaacattactgatgacactagaattagagctgccgtccctactatcaagcacttgatggccaatggtgctaaagttattctctccagtcacctgggacggccaaaaggagtcactcctaaatacagcttggcaccactggtccccaggctatccgaactgcttggaatccaggttgtgaaggttgaggactgcattggtccagaagttgagaagttggttgcttcacttcccgagggtggtgttcttcttctcgagaacgtgagattctacaaggaggaagagaagaacgaacctgagtttgcaaagaaacttgcatcattggcagatctttatgtgaatgatgcattcggtacagctcacagagcacatgcctctacagagggagttactaaatttttgaagccttctgttgcaggtttcctcttacaaaaggaattggactatttagtcggggcggtttcaaatccaaagaggccatttgctgctattgtgggtggttcaaaggtttcatccaagattggagtgatcgaatcacttttagagaaatgtgatatattgcttttgggtggaggaatgatctttaccttctacaaggctcagggtctttcagttggttcctccttggttgaggaagacaaactagaactcgctacatcactcctagagaaggccaaggcgaaaggagtcagtctcttgttaccatctgatgttgtgattgcagataaatttgctcctgatgcaaacagcaagattgtgcctgcatctgctatcccagacggttggatggggttggacattggaccagactctgttaagactttcaacgatgccttggataccacaaaaacagtgatctggaatggacctatgggggtgtttgaatttgacaagtttgctgttggaacagaggcaattgcaaagaagctcgcggacttaagtgggaaaggagtgacgactatcattggaggtggagattctgttgcagctgttgagaaagttggagttgctagcgtgatgagccacatatccactggtggtggtgccagtttggagctactggaaggcaaggtgctccccggtgtcattgctcttgatgaagcagacgcccccgttgctgtgtaaaacaatttgtactaattcttttttctccggggtcaacataatcagtggtaatttccagttaggaagcattgagtcgatgttgtagatttgtcgggttatattgttatataatgtcctttttttaacccatattatttttgtctaaataaagggcgagtatatcagttatagatagctatccttttgatgtctttcaacaaactctatccttgatttggttcagtt

SEQ ID NO: 10487 - protein, 481 aa, Nicotiana tabacum (common tobacco)
MASATASHTLCGIPATSSSTTNKAIAPSSARFLAKTPLRRLGFAGAAADSLFTNHVATKLRSLKSSSKPIRGVASMAKKSVGDLTAAELKGKKVFVRADLNVPLDDNQNITDDTRIRAAVPTIKHLMANGAKVILSSHLGRPKGVTPKYSLAPLVPRLSELLGIQVVKVEDCIGPEVEKLVASLPEGGVLLLENVRFYKEEEKNEPEFAKKLASLADLYVNDAFGTAHRAHASTEGVTKFLKPSVAGFLLQKELDYLVGAVSNPKRPFAAIVGGSKVSSKIGVIESLLEKCDILLLGGGMIFTFYKAQGLSVGSSLVEEDKLELATSLLEKAKAKGVSLLLPSDVVIADKFAPDANSKIVPASAIPDGWMGLDIGPDSVKTFNDALDTTKTVIWNGPMGVFEFDKFAVGTEAIAKKLADLSGKGVTTIIGGGDSVAAVEKVGVASVMSHISTGGGASLELLEGKVLPGVIALDEADAPVAV

SEQ ID NO: 10488 - DNA, 1517 bp, Nicotiana tabacum (common tobacco)
  CDS (34)..(1239)
ggcacgagttccgacgtcaaaaactatagagaaatggcggtgaagaagagcgtgggatcactgaaagaagcagatctgaaggggaagagagtattcgtgagagttgatctgaacgttccattggatgaaaactttaacatcactgatgacaccagaatcagagccgctgtacctaccatcaagtacttgatgcaacacggttctcatgtcattcttgcctctcatcttggtcgccctaaaggtgttaccccaaagtacagcttaaagccgcttgtgcctagactttcagaactattgggagttgaggtcaagatagcaaatgattcaattggtccagaagttgagaaattggtcgctgaaataccggaaggaggagttctgctgctagagaatgtcagattctataaagaagaggagaagaatgagcccgaatttgccaagaaattggcatctcttgcagatttgtacgtcaatgatgcatttgggactgctcatagagcccatgcttccacagaaggggttgctaagtacttgaaaccagctgttgctggattccttatgcaaaaggaacttgactatttagttggagctgtggcaaatccccagaagccatttgctgcaattgttggtggttcaaaagtatcatctaagattggtgttatagagtctctcttggagaaggttgacgtgttattacttggcggaggaatgatctttactttctacaaggcgcaagggtacgctgttggatcatcactagtggaggaggacaagcttgatttggcaacatctctcatggagaaggcaaaggcaaaaggggtatctctattgcttcccactgatgtagtgattgccgacaagtttgctgctgatgcgaacagcaaggttgttccagcatctgaaattcctgatggctggatgggattagatattggacccgatgcaatcaagtcatttggcagcgccttggataccaccaagactgtcatttggaatggaccaatgggtgtgtttgagtttgacaagtttgctgctggaacagaggctattgcaaagaaactggcagagcttagtggaaagggagtgacaaccatcatagggggtggtgattctgtagctgcagttgagaaggtaggacttgcagagaagatgagccacatatcaactggagggggtgctagcttggagcttctcgaggggaaaccactccccggagtgcttgccctagatgatgcctgagcaatataatgctcatgcttttctccctttttttttgtgcacattttgttagctcttatgtctggattttagtccagagcggatttggatctatagagtcttgtaggttggtggataaaactgtaataagtattttctgggcctccattatgtgcactgctgcagttggcagggtactgaggcacttcctcttgtgacaagagaatcttccatggttgataacttgaaattactaatgaactatgtataagttatcaaatccttttattggattggag

SEQ ID NO: 10489 - protein, 401 aa, Nicotiana tabacum (common tobacco)
MAVKKSVGSLKEADLKGKRVFVRVDLNVPLDENFNITDDTRIRAAVPTIKYLMQHGSHVILASHLGRPKGVTPKYSLKPLVPRLSELLGVEVKIANDSIGPEVEKLVAEIPEGGVLLLENVRFYKEEEKNEPEFAKKLASLADLYVNDAFGTAHRAHASTEGVAKYLKPAVAGFLMQKELDYLVGAVANPQKPFAAIVGGSKVSSKIGVIESLLEKVDVLLLGGGMIFTFYKAQGYAVGSSLVEEDKLDLATSLMEKAKAKGVSLLLPTDVVIADKFAADANSKVVPASEIPDGWMGLDIGPDAIKSFGSALDTTKTVIWNGPMGVFEFDKFAAGTEAIAKKLAELSGKGVTTIIGGGDSVAAVEKVGLAEKMSHISTGGGASLELLEGKPLPGVLALDDA

SEQ ID NO: 10490 - DNA, 1730 bp, Solanum tuberosum (potato)
  CDS (209)..(1657)
atgattacgccaagcttggtaccgagctcggatccactagtaacggccgccagtgtggtggaattcggaaattaaacctcaaccccaaacgcaacgataagaaaaatccttttgacgcccatttccaacctcttgtattactacttataatacatctctctcttcgccactctctgtctgcggccacaaacacaaaagagaaagagatatggcatcagctactgcttcccacactttctgcggcattcccaccacatcatcatcctctaccaccaacaggtctaccacccattcctctgctcgcttcctcctcaaaactcctctccgccgcctcggtttcgccggcgctgtcgctgatcctctcttcaccaaccacgtcgcaacaaagctccgatctctcaaggcctcctccaaccctgttagggccgttgtctccatggccaagaagagcgttggagaccttagctcttccgatttgaagggcaagaaagtcttcgtcagggctgatttgaatgtcccacttgatgatgctcagaacattactgatgacactaggattagagctgccatccctaccatcaaacacttgattgccaatggggctaaagttattctctccagtcacttgggaaggccaaagggagtcactcctaaatacagcttagcaccgcttgtccccaggctatctgaactacttggaatccaggttgtaaaggctgatgattgcattggtccagaagttgagaagttggttgattcacttccagagggcggcgttcttcttcttgagaatgtaagattctacaaggaggaagagaagaacgaacctgagtttgcaaagaaacttgcatcattggcagatctttttgtgaatgatgcctttggtacagctcacagagcacatgcctctacggagggagttactaaatttttgaagccttctgttgcaggtttccttttacaaaaggaattggactatttagttggggcagtttcaactccaaagaggccatttgctgctattgtgggtggttcaaaggtttcatccaagattggagtgattgaatcacttctggagaaatgtgatatattgcttttgggtggaggaatgatctttaccttctacaaggctcagggtctttcagttggttcctccttggttgaggaagacaaactagagcttgcaacatcactcctggaaaaggccaaggcaaaaggagtcagtctcttgttaccatctgatgttgtgattgcagataaatttgctcctgatgccaacagcaagattgtgccggcatctgctatcccagatggttggatggggctagacattggacctgactctatcaagactttcaacgatgctttggataccacaaaaacagtgatctggaatggacctatgggggtgtttgaatttgacaagtttgctactggaacggaggcaattgcaaagaagctagcagacttaagtgggaaaggagtgaccactatcattggaggtggagactctgttgcagcggttgagaaagttggagtggctagcgtgatgagccacatatccactggtggtggtgccagtttggagctacttgaaggaaaggtgctccctggtgtcatagctctagatgaagctgacgcccctgttgcagtgtaaaacaatttgtactaaattcttttttcggtcaacttaacttaatcagttgggaaacattgagttgatgttgtag

SEQ ID NO: 10491 - protein, 482 aa, Solanum tuberosum (potato)
MASATASHTFCGIPTTSSSSTTNRSTTHSSARFLLKTPLRRLGFAGAVADPLFTNHVATKLRSLKASSNPVRAVVSMAKKSVGDLSSSDLKGKKVFVRADLNVPLDDAQNITDDTRIRAAIPTIKHLIANGAKVILSSHLGRPKGVTPKYSLAPLVPRLSELLGIQVVKADDCIGPEVEKLVDSLPEGGVLLLENVRFYKEEEKNEPEFAKKLASLADLFVNDAFGTAHRAHASTEGVTKFLKPSVAGFLLQKELDYLVGAVSTPKRPFAAIVGGSKVSSKIGVIESLLEKCDILLLGGGMIFTFYKAQGLSVGSSLVEEDKLELATSLLEKAKAKGVSLLLPSDVVIADKFAPDANSKIVPASAIPDGWMGLDIGPDSIKTFNDALDTTKTVIWNGPMGVFEFDKFATGTEAIAKKLADLSGKGVTTIIGGGDSVAAVEKVGVASVMSHISTGGGASLELLEGKVLPGVIALDEADAPVAV

SEQ ID NO: 10492 - DNA, 1778 bp, Chlamydomonas reinhardtii
  CDS (7)..(1392)
ccaatcatggccctctctatgaagatgcgcgccaacgcgcgcgtgtccggtcgccgcgtcgccgctgtggccccccgcgtggtgcccttctcgtcggcctccagctccgtgctgcgctctggcttcgcgctgaggtgtctgtggacatccgccgcgtgggccgctctcgcatccgtcgtcgaggcggtgaagaagtcggttggcgacctgcacaaggctgacctggagggcaagcgcgtgttcgtccgcgcggacctgaacgtgcctcttgacaaggccaccctggccatcaccgacgacacccgcattcgcgcggccgtccccaccctgaagtacctgctggacaacggtgctaaggtcctgctgacctcgcacctgggtcgcccgaagggcggtcccgaggacaagtaccgcctgacccccgtggtggcccgcctgtcggagctgctgggcaagcccgtgaccaaggtcgatgactgcatcggccccgaggtggagaaggcggtgggcgccatgaagaacggcgagctgctgctgctggagaactgccgcttctacaaggaggaggagaagaacgagcccgagttcgccaagaagctggccgccaacgccgacctgtacgtgaacgacgcgttcggcactgcccaccgcgcccacgcctccaccgagggtgtgaccaagttcctgaagccctccgtggccggcttcctgctgcagaaggagctggactaccttgatggcgccgtgtccaaccccaagcgccccttcgtggccattgtgggcggctccaaggtgtcctccaagatcaccgtcattgaggcgctgatggagaagtgcgacaagatcatcatcggcggtggcatgatcttcaccttctacaaggcccgcgcgctgaaggtgggctcctcgctggttgaggacgacaagatcgagctggccaagaagctggaggagatggccaaggccaagggtgtgcagctgctgctgcccaccgacgtggtggtggccgacaagttcgacgccaacgccaacacccagaccgtgcccatcaccgccatccccgatggctggatgggtctggacattggcccggactccgtcaagaccttcaacgacgccctggccgacgccaagaccgttgtgtggaacggccccatgggtgtgttcgagtttccccaagttcgccaacgcaccgtgtcgatcgccaacaccctggccggcctgacgcccaagggctgcatcaccatcattggtggcggtgactccgtggctgccgtcgagcaggccggcgttgccgagaagatgagccacatctccaccggcggcggtgcctccctggagctgctggagggcaaggtcctgcccggcgtggccgccctggacgagaagtaaattgctcgcaattgaataagaacagttgccgtgtagtttacgtgtggacagaggttgagatggctctcgggtctggttgttcgggagttgcggagtgtgtttcgggttgttggttttggtcatgacgacttgagtgattgcagaaaggggagtgttccggatccgggggcctcttgtatggggtcatgatttggtgccgacagcgaaacgctgggagccctgggcgtctgggccccggtgctgaatgcgggctgacgccgggggagtgaaagaactcctttaaccgagcgtatcgtgtacatgagagaagagacaagagctttcgctgaggcactctggctccgtagcagggatttgcgctccctgagttttcacggattgccggg

SEQ ID NO: 10493 - protein, 461 aa, Chlamydomonas reinhardtii
MALSMKMRANARVSGRRVAAVAPRVVPFSSASSSVLRSGFALRCLWTSAAWAALASVVEAVKKSVGDLHKADLEGKRVFVRADLNVPLDKATLAITDDTRIRAAVPTLKYLLDNGAKVLLTSHLGRPKGGPEDKYRLTPVVARLSELLGKPVTKVDDCIGPEVEKAVGAMKNGELLLLENCRFYKEEEKNEPEFAKKLAANADLYVNDAFGTAHRAHASTEGVTKFLKPSVAGFLLQKELDYLDGAVSNPKRPFVAIVGGSKVSSKITVIEALMEKCDKIIIGGGMIFTFYKARALKVGSSLVEDDKIELAKKLEEMAKAKGVQLLLPTDVVVADKFDANANTQTVPITAIPDGWMGLDIGPDSVKTFNDALADAKTVVWNGPMGVFEFPQVRQRTVSIANTLAGLTPKGCITIIGGGDSVAAVEQAGVAEKMSHISTGGGASLELLEGKVLPGVAALDEK

SEQ ID NO: 10494 - DNA, 1254 bp, Caenorhabditis elegans
  CDS (1)..(1254)
atgagctccctcaacaagttggctatcgaccagttgaacctcgccggaaagcgagttttgatccgtgttgacttcaatgtcccactcaaggatggcaaaatcaccaacaatcaacgtattgctgccgctgttccaaccattcagcatgctcttagcaacggagccaaatctgtcgttttaatgtcacatttgggacgtccagatggcagacgccaagacaagtacaccttgaaaccagttgctgaagagttgaaggctctcttgaaaaaagatgttctcttcctcgacgactgtgtcggatcagaagtggaggctgcatgcgccgatccagctcctggatcagtcattctccttgaaaatcttcgttatcatctggaagaggagggcaaaggagtcgatgcatccggtgccaaggttaaggctgattcagcagccgtaaagaaattccgcgagtctctcaccaagcttggcgatatttatgtcaatgatgctttcggaaccgctcacagagcccatagctccatggttggagtcgagcactcacaacgtgcaagtggattcttgctcaagaacgagctctcctactttagcaaggccctcgacaacccagctcgtccattcctggccatccttggaggagctaaggtcgctgacaagattcagttgatcaagaacttgttagacaaggttaatgagatgatcatcggcggaggaatggcctataccttcttgaaagttgcccagggagtcaagatcggaaactctttgtacgacgaagaaggagcgaaaattgtgaacgagcttcttgaggctgccaaggcaaagggagttcaaatccatctcccagtggatttcgtcattgctgacaagttcgccgaggacgcaacctcgaagaccgtcaccgccgaggaaggtgttccagatggccacatgggacttgatgttgggccggaatcttctaagatcttcgccgctgccattcaacgcgccaaaacgattgtctggaacggtccagcaggagtattcgagtttgataaattcgccacaggcaccaagtcattgatggatgaagttgtcaaggccaccgctgccggagccatcacaatcattggaggaggtgacactgcgaccgccgccaagaagtataacacggaagataaggtgtctcacgtctcaactggaggtggagccagtttggaattgctcgaaggaaaagttctgccaggagttgatgctctttcgccagctcaataa

SEQ ID NO: 10495 - protein, 417 aa, Caenorhabditis elegans
MSSLNKLAIDQLNLAGKRVLIRVDFNVPLKDGKITNNQRIAAAVPTIQHALSNGAKSVVLMSHLGRPDGRRQDKYTLKPVAEELKALLKKDVLFLDDCVGSEVEAACADPAPGSVILLENLRYHLEEEGKGVDASGAKVKADSAAVKKFRESLTKLGDIYVNDAFGTAHRAHSSMVGVEHSQRASGFLLKNELSYFSKALDNPARPFLAILGGAKVADKIQLIKNLLDKVNEMIIGGGMAYTFLKVAQGVKIGNSLYDEEGAKIVNELLEAAKAKGVQIHLPVDFVIADKFAEDATSKTVTAEEGVPDGHMGLDVGPESSKIFAAAIQRAKTIVWNGPAGVFEFDKFATGTKSLMDEVVKATAAGAITIIGGGDTATAAKKYNTEDKVSHVSTGGGASLELLEGKVLPGVDALSPAQ

SEQ ID NO: 10496 - DNA, 1212 bp, Streptomyces coelicolor
  CDS (1)..(1212)
atgaagacgatcgacgaactgctctccgaaggcgtcgcgggcaagcgcgtcttcgtccgcgccgacctgaacgtcccgctggacggcaccaccatcaccgacgacggccgcatccgcgcggtagtgcccaccgtcaaggcgctggccgacgcgggcgcccgcgtgatcgtcgcctcgcacctgggccgccccaagggcgccccggaccccgccttctccctcgccccggccgccgcccgcctcggtgagctgctcggcgccgacgtcgccttcgccgaggacacggtcggcagctccgccgaggccgtcgttaccggcctcgccgacggtggtgtcgccgtcatcgagaacctgcgcttcaacgccggcgagaccagcaaggacgacgccgagcgcgccgccttcgccgacaagctggccggcctcgcggacgtctacgtcggcgacggcttcggcgcggtgcaccggaagcacgcgtccgtcttcgacctgccgaagcggctcccgcactatgccggatacctcatcgccaccgaggtcggcgtgctcaagaagctcaccgacgaggtgaagcgcccgtacgtggtcgcgctcggcggcgccaaggtctccgacaagctcgccgtcatcgaccagctgctcggcaaggccgaccggctgctcatcggcggaggcatggcgtacaccttcctcaaggccaaggggtacgaggtcggcatctcgctgctccaggaggaccagatcccggcggtcaaggagtacatcgagcgcgccgagaagaacggcgtcgagctggtgctgcccgtcgacgtcctggtcgcgcccgagttcccggacctgaagacgaaggccccggccaaccccaccaccgtcgccgcggacgccatcccggccgaccaggagggtctggacatcggtcccgagacccgcaagctgtacgcatcgaagctcgccgacgccggcaccgtcttctggaacggtcccatgggcgtcttcgagcaccccgactacgccgagggcaccaaagcggtcgcccaggccctcgtcgacgccccgggcttcaccgtggtcggcggcggcgactccgccgcggccgtgcgcacgctcggcttcgacgagaacgcattcggccacatctcgaccggcggcggcgcctccctcgaatacctcgagggcaagacgctccccggcctcgccgcactggaggactga

SEQ ID NO: 10497 - protein, 403 aa, Streptomyces coelicolor
MKTIDELLSEGVAGKRVFVRADLNVPLDGTTITDDGRIRAVVPTVKALADAGARVIVASHLGRPKGAPDPAFSLAPAAARLGELLGADVAFAEDTVGSSAEAVVTGLADGGVAVIENLRFNAGETSKDDAERAAFADKLAGLADVYVGDGFGAVHRKHASVFDLPKRLPHYAGYLIATEVGVLKKLTDEVKRPYVVALGGAKVSDKLAVIDQLLGKADRLLIGGGMAYTFLKAKGYEVGISLLQEDQIPAVKEYIERAEKNGVELVLPVDVLVAPEFPDLKTKAPANPTTVAADAIPADQEGLDIGPETRKLYASKLADAGTVFWNGPMGVFEHPDYAEGTKAVAQALVDAPGFTVVGGGDSAAAVRTLGFDENAFGHISTGGGASLEYLEGKTLPGLAALED

SEQ ID NO: 10498 - DNA, 1245 bp, Schizosaccharomyces pombe
  CDS (1)..(1245)
atgtctttgtctactaagctcgctatcaccgacgtcgacttgaagggcaagaacgtcttgatccgtgtcgacttcaacgtccctttggacggtgaccgtatcaccaacaatgcccgtatcgttggtgctctccccaccatcaagtacgctcttgagcaacaacccaaggctgtcatcttgatgtctcacttgggccgtcccaacggtgctcgtgttgccaagtactccttgaagcctgttgctgctgagctcagcaagcttttgggcaagcccgtcaagttccttgacgactgtgttggccctgaggtcgaaaaggcctgcaaggaagccaagggtggtgaggtcatccttttggagaacttgcgtttccacatcgaggaggagggttccgccaaggttgacggtaagaaggttaaggctgacgcttctgccgtcgaggctttccgtaagtctttgacttctctcggtgacatctttgtcaacgatgctttcggtaccgctcaccgtgctcactcctctatggtcggtgtcgatctcccccgtgtctccggtttccttatgaagaaggagctcgactacttctccaaggctttggagaaccccgctcgtcccttccttgccatcttgggtggtgccaaggttgctgacaagatccaacttattgacaaccttcttgacaaggtcaaccgccttatcatctgcggtggtatggctttcaccttcttgaaggtccttaacggtatgaagattggtgactctcttttcgatgaggctggttccaagaacgtcgaatccatgatggccaaggccaagaagaacaacgtcgaggtcttcctccccgttgacttcgtcactgccgacaagttcgacaaggacgccaaggttggctctgccaccgccgaggagggtatccccgacggatggatgggtttggactgtggacccaagtcctctgctaagtttgccgaggttatcaccacctccaagaccattgtctggaatggtcccgctggtgtctttgagtttgacaactttgccaagggtaccaagtctatgcttgatgcttgtgtcaagacctgtgaagctggtaacgttgttattgttggtggtggtgacactgctactgttgccaagaagtacggtaaggaggatgctctttcccacgtctctaccggtggtggtgcttctcttgaactcttggagggtaaggctcttcccggtgtcgttgctctttcttccaagtaa

SEQ ID NO: 10499 - protein, 414 aa, Schizosaccharomyces pombe
MSLSTKLAITDVDLKGKNVLIRVDFNVPLDGDRITNNARIVGALPTIKYALEQQPKAVILMSHLGRPNGARVAKYSLKPVAAELSKLLGKPVKFLDDCVGPEVEKACKEAKGGEVILLENLRFHIEEEGSAKVDGKKVKADASAVEAFRKSLTSLGDIFVNDAFGTAHRAHSSMVGVDLPRVSGFLMKKELDYFSKALENPARPFLAILGGAKVADKIQLIDNLLDKVNRLIICGGMAFTFLKVLNGMKIGDSLFDEAGSKNVESMMAKAKKNNVEVFLPVDFVTADKFDKDAKVGSATAEEGIPDGWMGLDCGPKSSAKFAEVITTSKTIVWNGPAGVFEFDNFAKGTKSMLDACVKTCEAGNVVIVGGGDTATVAKKYGKEDALSHVSTGGGASLELLEGKALPGVVALSSK

SEQ ID NO: 10500 - DNA, 1533 bp, Crithidia fasciculata
  CDS (139)..(1506)
aattattactctctcatcagaggaccgcaacttgttataccctcaagtcgagtctctccacctgtcaccgtcaattattagcttgcccgcaacctgcattctttcttttctctcgcacaacacccgaagacttcacaaatgtctctcgttccgaagaagagcatcgatgatgccgtggtgaagggcaagaaggtcctcatccgtgtggacttcaacgtgccggtgaagaacggcgagatcacgaacgacttccgcatccgctccgccctgccgacgatccagaaggtgctgaaggagggcggctcctgcatcctgatgagccacctcggccgcccgaagggtgcgaagatgagcgacccgaagccggccaagagcgtgcgcgggtacgaggaggctgcgacgctgcggccggtggctgcgcggctgtcggagctgctggggcagaaggtggagttcgcgccggactgcctggacgctgcgtcgtacgctgctaagctgaagggcggcgacgtgctgctgctggagaacgtgcgcttctacgcggaggagggcagcaagaaggaggaggagcgcgacgcgatggcgaaggtgcttgcggcgtacggcgacgtgtacgtgagcgacgccttcggcactgcgcaccgcgacagcgcggacatgacgggcatcccgaaggtgctgggtgcgggctacgccggctacctgatggagaaggagatcaactacttcgcgcaggtgctgaacaacccgccgcgtccgctggtggccatcgtgggcggtgcgaaggttagcgacaagatccagctgctggacaacatgctgggccgcatcaactacctggtgattggcggcgcgatggcgtacacgttccagaaggcgcagggccacgcgatcggcatctcgatgtgcgaggaggacaagctggaccttgccaagtcgctgctgaagaaggcgcaggagcgcaacgtggaggtgcttctgccggtggaccacgtgtgcaacaaggagttccaaggcgtggacgcgccgctggtgacgaaggacgtggagatcccggaggggtacatggcgctggacattggcccgaagacgatcaagatctacgaggacgtgattgccaagtgcaagagcacgatctggaacggcccgatgggtgtgttcgagatgccgtgctactcgaagggcacgttcgctgtggccaaggcgatgggcaacgggacgcagaagaacgggctgatgagcatcatcggcggcggcgacacggcgagcgctgcggagctgagcggggaggcgaagaacatgtcgcacgtgtcgactggcggcggtgcctcgctggagctgctggagggcaagtcgctgccgggcgtcaccgttctcaccaacaaggacgcgaaggcgcctgctgctgctgccgctgccggtggtgactgcccgtgcggttccggctgcgctgcggttcccgccgcagccacggcaacggtttcgatggtgctcgcctcgccatgaagattctgaagctgctcgccgcggtgc

SEQ ID NO: 10501 - protein, 455 aa, Crithidia fasciculata
MSLVPKKSIDDAVVKGKKVLIRVDFNVPVKNGEITNDFRIRSALPTIQKVLKEGGSCILMSHLGRPKGAKMSDPKPAKSVRGYEEAATLRPVAARLSELLGQKVEFAPDCLDAASYAAKLKGGDVLLLENVRFYAEEGSKKEEERDAMAKVLAAYGDVYVSDAFGTAHRDSADMTGIPKVLGAGYAGYLMEKEINYFAQVLNNPPRPLVAIVGGAKVSDKIQLLDNMLGRINYLVIGGAMAYTFQKAQGHAIGISMCEEDKLDLAKSLLKKAQERNVEVLLPVDHVCNKEFQGVDAPLVTKDVEIPEGYMALDIGPKTIKIYEDVIAKCKSTIWNGPMGVFEMPCYSKGTFAVAKAMGNGTQKNGLMSIIGGGDTASAAELSGEAKNMSHVSTGGGASLELLEGKSLPGVTVLTNKDAKAPAAAAAAGGDCPCGSGCAAVPAAATATVSMVLASP

SEQ ID NO: 10502 - DNA, 1248 bp, Penicillium chrysogenum
  CDS (1)..(1248)
atgtctctctccaacaagctccccgttactgatgtcgacctcaagggcaagcgtgtcttgatccgggttgacttcaatgtccccctcgatgagaacgagaacgttaccaacccccagcgtatcgtcggtgccctgcccaccatcaagtatgccatcgacaacggtcgcaaggccgttgtgctcatgtcccacctgggtcgccccgatggcaaggtcaaccccaagtacagcttgaagcccgttgttcccgtgcttgaggagctcctcggcaagagcgtcactttcaccgaggactgcattggcccccagaccgaggagaccgtgaacaaggcttccgatggccaggtcattctgctcgagaacctgcgtttccacgccgaggaggagggcagctccaaggatgccgagggcaagaaggtcaaggccgacaaggccgatgttgatcgttccgcaagcctcactgccctcggtgacgtttacgtcaacgatgctttcggtaccgcacagcgcgctcacagctccatggtcggcgtggacctcccccagaaggctgccggtttcctcgtgaagaaggagctggagtacttcgccaaggctcttgagagccctgcccgccccttcctcgccatcctcggcggtgctaaggtgtctgacaagattccagtgattgacaacctcctgcccaaggtcaacagcctcatcatcatcggcggcatggctttgaccttcaagaagactcttgagaacgtcaagatcggcaacagtctcttcgacgaggccggcagcaagatcctcggcgagatcgtcgagaaggccaagaagcacaacgtcgagatcgttctccccgttgactacgtcaccgccgacaagttctccgccgatgccaccgttgggtccgccacgacgcagcgtatccctgacggctacatgggttcggatgtcggccccgagagtgtcaagctctaccagaagaccatcgccgaggccaagaccatcctctggaacggtccccctggtgtcttcgaactcaagccttcgccaaggcccaccgaggctaccctcgatgccgctgtcaaggctgctgaatccggttccattgtcatcattggtggtggtgataccgctaccgtggccgccaagtacaaggccgaggacaagatctcccacgtctcgaccggtggcggtgcctcgctcgagcttctcgagggcaaggagctgcccggtgttgctgctctgtccagtaagtaa

SEQ ID NO: 10503 - protein, 415 aa, Penicillium chrysogenum
MSLSNKLPVTDVDLKGKRVLIRVDFNVPLDENENVTNPQRIVGALPTIKYAIDNGRKAVVLMSHLGRPDGKVNPKYSLKPVVPVLEELLGKSVTFTEDCIGPQTEETVNKASDGQVILLENLRFHAEEEGSSKDAEGKKVKADKADVDRSASLTALGDVYVNDAFGTAQRAHSSMVGVDLPQKAAGFLVKKELEYFAKALESPARPFLAILGGAKVSDKIPVIDNLLPKVNSLIIIGGMALTFKKTLENVKIGNSLFDEAGSKILGEIVEKAKKHNVEIVLPVDYVTADKFSADATVGSATTQRIPDGYMGSDVGPESVKLYQKTIAEAKTILWNGPPGVFELKPSPRPTEATLDAAVKAAESGSIVIIGGGDTATVAAKYKAEDKISHVSTGGGASLELLEGKELPGVAALSSK

SEQ ID NO: 10504 - DNA, 1251 bp, Trichoderma reesei
  CDS (1)..(1251)
atgtctctgtctaacaagctgtccatcaccgatgtcgacctcaagggcaagagggtcctgattcgggtcgacttcaacgtccccctcgacgagaacaagaaaatcacaaacaaccagcgcatcgtcggcgccatcccgaccatcaagcacgccctcgacaatggcgccaaggccgtcgtcctcatgtcccacctcggccgccccaacggcgccgtcaaccccaagtactccctcaagcccgtcgtccccgagctcgagcgcctgctgggcaagcccgtcacctttgcccgcgactgcgtcggccccgaggtcgagtccattgtcaacgacgccgacaacggtgccgtcatcctgctggagaacctccgcttccacattgaggaggagggcagcgccaaggacaaggacggcaacaagaccaaggctgacaaggccaaggttgaggagttccgcaagggcctgactgctctgggcgacatctacatcaacgatgctttcggcactgcccaccgtgctcactcttccatggtcggcgttgacctgccccaaaaggccgctggcttcctcatgaagaaggagctcgactacttcgccaaggccctcgagtctcctcagcgccccttcctcgccatcctcggcggcgccaaggtctctgacaagatccagctcatcgacaacctgctcgacaaggtcgacaccctcattgtctgcggcggcatggccttcaccttcaagaaggtcctcaacaacatccccatcggcacctccctcttcgacgaggccggcgccaagacgtgccccagctgtcgagaagccaaggccaagaacgtcaagctggtcctgcccgtcgactacatcaccgccgacaagttcgacaaggacgccaacaccggcaccgccaccgacgagagcggcatccccgacggctggatgggcctcgactgcggcgagaagtcgattgagctgtacaaggaggccattgccgacgccaagaccatcctctggaacggccccgccggcgtctttgagtttgacaagttcgccaacggcaccaaggccacgctcgacgccgtcgtcgagggctgcaagaacggcaagattgtcattatcggcggtggtgacacggccaccgttgccgccaagtacggcgtcgaggacaagctgagccacgtctccaccggcggtggtgccagcttggagctgctggagggcaaggagctgcctggtgttgttgctctgtctagtaagtaa

SEQ ID NO: 10505 - protein, 416 aa, Trichoderma reesei
MSLSNKLSITDVDLKGKRVLIRVDFNVPLDENKKITNNQRIVGAIPTIKHALDNGAKAVVLMSHLGRPNGAVNPKYSLKPVVPELERLLGKPVTFARDCVGPEVESIVNDADNGAVILLENLRFHIEEEGSAKDKDGNKTKADKAKVEEFRKGLTALGDIYINDAFGTAHRAHSSMVGVDLPQKAAGFLMKKELDYFAKALESPQRPFLAILGGAKVSDKIQLIDNLLDKVDTLIVCGGMAFTFKKVLNNIPIGTSLFDEAGAKTCPSCREAKAKNVKLVLPVDYITADKFDKDANTGTATDESGIPDGWMGLDCGEKSIELYKEAIADAKTILWNGPAGVFEFDKFANGTKATLDAVVEGCKNGKIVIIGGGDTATVAAKYGVEDKLSHVSTGGGASLELLEGKELPGVVALSSK

SEQ ID NO: 10506 - DNA, 1271 bp, Thermus aquaticus
  CDS (28)..(1200)
gagctcgtcctgaagaagggggtctagatgcggacccttttggacctggaccccaagggcaagcgggtcctggtgcgggtggactacaacgtccccgtccaagacgggaaggtccaggacgagacccggatcctggaaagcctccccaccctccgccacctcctcgccgggggggcttccctcgtcctcctctcccacctgggccgccccaagggcccggaccccaagtactccctggccccggtgggggaggccttgagggcccacctcccagaggcccgcttcgcccccttccctccgggctcggaggaggcgaggcgggaggcggaggccctgaggcccggggaggtcctcctcctggagaacgtccgctttgagccgggagaggagaagaacgaccccgagctttccgcccgctacgccaggctcggggaggccttcgtcctggacgccttcgggagcgcccaccgggcccacgccagcgtggtgggggtggcgaggctcctccccgcctacgccggcttcctcatggagaaggaggtgagggccctttcccgcctcctcaaggacccggaaaggccctacgccgtggtgctgggcggggccaaggtctcggacaagatcggggtcattgagagcctccttccccgcatagaccgcctcctcattggcggggccatggccttcaccttcctcaaggccctagggggagaggtggggaggagcctggtggaggaggaccggctggacctggccaaggacctcttggggcgggccgaggccttgggggtcagggtctacctccccgaagacgtggtggcggcggagcgcatagaggcgggggtggagacccgggtcttcccggcccgggccatccccgtcccctacatgggcctggacatcggccccaagacccgggaggccttcgcccgggccctggaaggggcgaggacggtcttctggaacgggcccatgggggtctttgaggtgcctccctttgacgaggggaccttggccgtggggcaggccatcgccgccctcgagggcgccttcaccgtggtgggcgggggcgactcggtggcggcggtgaaccgcctgggccttaaagagcgcttcggccacgtctccaccgggggcggggcgagcctggagttcctggaaaagggcaccctgcccggcctcgaggtcctggaaggctaaggcgcgggcgtttagaatgggcctggggcgtggagccccaggccatggcttacggcaaggcccacctcgag

SEQ ID NO: 10507 - protein, 390 aa, Thermus aquaticus
MRTLLDLDPKGKRVLVRVDYNVPVQDGKVQDETRILESLPTLRHLLAGGASLVLLSHLGRPKGPDPKYSLAPVGEALRAHLPEARFAPFPPGSEEARREAEALRPGEVLLLENVRFEPGEEKNDPELSARYARLGEAFVLDAFGSAHRAHASVVGVARLLPAYAGFLMEKEVRALSRLLKDPERPYAVVLGGAKVSDKIGVIESLLPRIDRLLIGGAMAFTFLKALGGEVGRSLVEEDRLDLAKDLLGRAEALGVRVYLPEDVVAAERIEAGVETRVFPARAIPVPYMGLDIGPKTREAFARALEGARTVFWNGPMGVFEVPPFDEGTLAVGQAIAALEGAFTVVGGGDSVAAVNRLGLKERFGHVSTGGGASLEFLEKGTLPGLEVLEG

SEQ ID NO: 10508 - DNA, 1527 bp, Trypanosoma brucei
  CDS (1)..(1527)
atgtccactgcaccgaatgcgaagaacaacataagcctgaagaagtctgtgggcgatgtttttcggttaacggcgaagcgagtgcttatgcgtgtcgatttcaacgttcctatgcaaaatggccatattactaacgattatcgaatccgtgcggcgattccaacgatacggcgggttattgatcagggtggtatttgtattctcctgagccatcttggacggcccagaggcgtttcaatggttgcgggtgtgcgagatataagacggcgatatcacgaggctcagtttcacgacaacaaaggtaaaacagcgttttttagtgttctaccgggagaggagaaagttaaaatattagcgaaatccagtgcacgggaagaggcaacgcacatatcacctgaggtgaaatctggaaaaacaatgctgtttgcgcgccttcctgaggacgagaagaaatctttgcttatgcagtacttaaacgaaaacaaagacagtgcgttaccgcagatgagtgttagtgcaggctacgaagagcaatacagtcttcgtccagttgctgtaaggcttgccgaattactcggccaacatgtatattttgctcacgactgcttggatgccagagtagaggtttcgcggttaaagcgtggaaatgttatgttacttgaaaatgtacggttctacagcgaagaaaacggtgaaaatgctgaggaacgtgaagccatggccaagatccttgcgtcatatggtgatgtttacatcagtgatgcttttggtgcagctcaccgtgacagtgctaccatgaccggaattccaaagattttgggtcacggtgctgccggttatttgatggagaaggagatttcatacttcgctaaggtacttggtaacccgccgcgtccgctggttgctatcgttggtggagcgaaagtgagcgaaaagatccaacttctggataacatgttgcagcgcatcgattatctcttaattggtggtgcaatggcatacacatttctgaaggctcagggttacagcattggaaaatcgaagtgcgaggaaagtaaacttgaatttgctcgatccctgctgaagaaggcggaggaccgcaaggtgcagattattcttccaattgatcatgtttgccacacggaattcaaagctgtggattctccattgataactgaggatcaaaacatccctgaaggacatatggctctggatattggtcccaagactattgaaaaatatgttcagacgattgggaagtgtaagagcgccatttggaacggtcccatgggtgtatttgaaatggttccttattccaaaggtacatttgcaattgcgaaagccatgggtcgaggaactcagaaacgtggactcatgagtatcatcggtggtggtgagagtgcgggtgcggctgaactctgtggtaagctcagtatttctcatgtttcaactggtggtggtgcgtctttggaactcctcgagggcaaaacgcttcccggtgttgcagtattggatgataaggagtaa

SEQ ID NO: 10509 - protein, 508 aa, Trypanosoma brucei
MSTAPNAKNNISLKKSVGDVFRLTAKRVLMRVDFNVPMQNGHITNDYRIRAAIPTIRRVIDQGGICILLSHLGRPRGVSMVAGVRDIRRRYHEAQFHDNKGKTAFFSVLPGEEKVKILAKSSAREEATHISPEVKSGKTMLFARLPEDEKKSLLMQYLNENKDSALPQMSVSAGYEEQYSLRPVAVRLAELLGQHVYFAHDCLDARVEVSRLKRGNVMLLENVRFYSEENGENAEEREAMAKILASYGDVYISDAFGAAHRDSATMTGIPKILGHGAAGYLMEKEISYFAKVLGNPPRPLVAIVGGAKVSEKIQLLDNMLQRIDYLLIGGAMAYTFLKAQGYSIGKSKCEESKLEFARSLLKKAEDRKVQIILPIDHVCHTEFKAVDSPLITEDQNIPEGHMALDIGPKTIEKYVQTIGKCKSAIWNGPMGVFEMVPYSKGTFAIAKAMGRGTQKRGLMSIIGGGESAGAAELCGKLSISHVSTGGGASLELLEGKTLPGVAVLDDKE

SEQ ID NO: 10510 - DNA, 1263 bp, Trypanosoma brucei
  CDS (1)..(1263)
atgtcactaaaagagaggaagagcattaatgaatgcgatcttaagggaaagaaggttcttatccgtgttgactttaatgttcctctggatgatggtaatattaccaacgactaccgaatccgatcagctcttccagccgtccaaaaagttctcacagaaggcggcagttgtgttctcatgagccacctcgggaggccgaaaggcgtttctatggctgaaggcaaagaactgcggagcactggcggtattcccgggttcgagcagaaggcaacactcaaaccggtagccaaggccctcagcgaattgttatcgagacccgtcacattcgcacctgactgtctgaacgctgcagatgtcgtctctaagatgtctccgggcgatgttgttctgcttgaaaatgtacgcttctacaaagaagagggcagcaagagcactgaggaacgtgaagccatggccaagatccttgcgtcatatggtgatgtttacatcagtgatgcttttggtacagctcaccgtgacagtgctaccatgaccggaattccaaagattttgggtcacggtgctgccggttatttgatggagaaggagatttcatacttcgctaaggtacttggtaacccgccgcgtccgctggttgctatcgttggtggagcgaaagtgagcgacaagatccaacttctggataacatgttgcagcgcatcgattatctcttaattggtggtgcaatggcatacacatttctgaaggctcagggttacagcattggaatatccatgtgcgaggaaagtaaacttgaatttgctcgatccctgctgaagaaggcggaggaccgcaaggtgcaggttattcttccaattgatcatgtttgccacacggaattcaaagctgtggattctccattgataactgaggatcaaaacatccctgaaggacatatggctctggatattggtcccaagactattgaaaaatatgttcagacgattgggaagtgtaagagcgccatttggaacggtcccatgggtgtatttgaaatggttccttattccaaaggtacatttgcaattgcgaaagccatgggtcgaggaactcacgagcatggactcatgagtatcatcggtggtggtgagagtgcgggtgcggctgaactctgtggtgaagctgcacgtatttctcatgtttcaactggtggtggtgcgtctttggaactcctcgagggcaaaacgcttcccggcgttacagtattggacgaaaaggagtaa

SEQ ID NO: 10511 - protein, 420 aa, Trypanosoma brucei
MSLKERKSINECDLKGKKVLIRVDFNVPLDDGNITNDYRIRSALPAVQKVLTEGGSCVLMSHLGRPKGVSMAEGKELRSTGGIPGFEQKATLKPVAKALSELLSRPVTFAPDCLNAADVVSKMSPGDVVLLENVRFYKEEGSKSTEEREAMAKILASYGDVYISDAFGTAHRDSATMTGIPKILGHGAAGYLMEKEISYFAKVLGNPPRPLVAIVGGAKVSDKIQLLDNMLQRIDYLLIGGAMAYTFLKAQGYSIGISMCEESKLEFARSLLKKAEDRKVQVILPIDHVCHTEFKAVDSPLITEDQNIPEGHMALDIGPKTIEKYVQTIGKCKSAIWNGPMGVFEMVPYSKGTFAIAKAMGRGTHEHGLMSIIGGGESAGAAELCGEAARISHVSTGGGASLELLEGKTLPGVTVLDEKE

SEQ ID NO: 10512 - DNA, 1323 bp, Trypanosoma brucei
  CDS (1)..(1323)
atgacccttaacgagaagaagagcattaatgaatgcgatcttaagggaaagaaggttcttatccgtgttgactttaatgttcccgtgaaaaacggtaagatcaccaacgactaccgaatccgatcagctctgccaacgctcaagaaggttctcacagaaggcggcagttgtgttctcatgagccacctcgggaggccgaaaggtattcccatggcgcaagctgacaaaatacggagcactggcggtgttcccgggttccaacagaaggcaacactcaaaccggtagccaaggccctcagcgaactgctattgaggcccgtcacattcgcacctgactgcctgaatgctgcagatgtcgtctctaagatgtctccgggcgatgttgttctgcttgaaaatgtacgcttttacaaagaagagggcagcaagaaggcaaaagaccgtgaagccatggccaagatccttgcgtcatatggtgatgtttacatcagtgatgcttttggtacagctcaccgtgacagtgctaccatgaccggaattccaaagattttgggcaacggtgctgccggttatttgatggagaaggagatttcatacttcgctaaggtacttggtaacccgccgcgtccgctggttgctatcgttggtggagcgaaagtgagcgacaagatccaacttctggataacatgttgcagcgcatcgattatctcttaattggtggtgcaatggcatacacatttctgaaggctcagggttacagcattggaaaatcgaagtgcgaggaaagtaaacttgaatttgctcgatccctgctgaagaaggcggaggaccgcaaggtgcaggttattcttccaattgatcatgtttgccacacggaattcaaagctgtggattctccattgataactgaggatcaaaacatccctgaaggacatatggctctggatattggtcccaagactattgaaaaatatgttcagacgattgggaagtgtaagagcgccatttggaacggtcccatgggtgtatttgaaatggttccttattccaaaggtacatttgcaattgcgaaagccatgggtcgaggaactcacgagcatggactcatgagtatcatcggtggtggtgacagcgcaagtgcagctgagttgagcggtgaggcgaagcgcatgtctcatgtttcaactggtggtggtgcgtctttggaactcctcgagggcaaaacgcttcccggcgttacagtattggacgaaaagtcggcggttgtgtcgtatgcctctgcaggtactggaactctttctaaccggtggagctctctttaa

SEQ ID NO: 10513 - protein, 440 aa, Trypanosoma brucei
MTLNEKKSINECDLKGKKVLIRVDFNVPVKNGKITNDYRIRSALPTLKKVLTEGGSCVLMSHLGRPKGIPMAQADKIRSTGGVPGFQQKATLKPVAKALSELLLRPVTFAPDCLNAADVVSKMSPGDVVLLENVRFYKEEGSKKAKDREAMAKILASYGDVYISDAFGTAHRDSATMTGIPKILGNGAAGYLMEKEISYFAKVLGNPPRPLVAIVGGAKVSDKIQLLDNMLQRIDYLLIGGAMAYTFLKAQGYSIGKSKCEESKLEFARSLLKKAEDRKVQVILPIDHVCHTEFKAVDSPLITEDQNIPEGHMALDIGPKTIEKYVQTIGKCKSAIWNGPMGVFEMVPYSKGTFAIAKAMGRGTHEHGLMSIIGGGDSASAAELSGEAKRMSHVSTGGGASLELLEGKTLPGVTVLDEKSAVVSYASAGTGTLSNRWSSL

SEQ ID NO: 10514 - DNA, 1605 bp, Triticum aestivum (common wheat)
  CDS (19)..(1461)
gggccagccccagccccaatggcgtccaccgccgcgccgcccgccgccctcgtcgcccgccgcgccgcgtccgcgtccgtcgccgcgccgctccggggcgcggggctcgcggccgggtgccagccggcgcgctcgctggcgttcgcggccggcgccgacccgcgcctcgcggtccacgtcgcgtcgcgctgccgggcggcgtccgccgcgcgcgggacacgcgccgtcgccaccatggccaagaagagcgtgggcgacctcaccgccgccgacctcgagggcaagcgcgtgctcgtgcgggccgacctcaacgtgccgctcgacgacaaccagaacatcaccgacgacacccgcatccgcgccgccatccccaccatcaagtacctcctcagcaacggcgccaaggtcatcctcaccagccacctgggtcgtcctaagggtgttactcctaagtttagcttggctccccttgtgccccgattatccgagcttcttggcattgaggtgaaaaaagcagaagatgttatcggcccagaagttgagaaattggtggctgacctggcaaatggtgctgttttgctcctggaaaacgtaagattttacaaggaagaggagaagaatgacccagagtttgcaaagaagcttgcgtcactggcagatctgtttgtaaacgatgcattcggaacagcccacagagcacatgcctcgactgagggagttaccaagttcttgaagccttctgttgctggattccttttgcagaaggaacttgactacctggatggagctgtttcaaaccctaagcgcccatttgctgccattgtgggtggctcaaaggtgtcatccaagattggggttatcgaatccctgttggagaagtgtgacatccttcttttgggtggtggtatgatcttcacattttacaaggcacaaggactctcagttggttcttccttggttgaggaagataaacttgagctggcaacatctctccttgcaaaggcaaaggcaaagggtgtctcccttctgttgccatctgacgttatcattgctgataagtttgctcctgatgctaacagtcagaccgtccctgcatctgcaattcctgatggttggatggggctggacattggcccagattcagtcaaaacatttaatgatgccctggacacaacacagacaatcatttggaacggaccaatgggtgtctttgaatttgacaagtttgcagtaggaactgagtctattgcaaagaagttggccgagcttagcaaaaagggtgtgacaactatcattggaggcggagactccgttgcggctgttgagaaggtgggagtggctgatgttatgagccacatctcaactggtggtggcgccagcttggagttgttggaaggaaaggagcttcctggagtcgttgcacttgatgaaggtgtcatgacgaggtcggtgaccgtatgaggctaagcttcatttgttgcatcttaattcctttcatgtaccgttccaaacctgccatgttgtcctccctcttttgctcgtcttcgaccactcgaaatgtaagagaccaatgttttatagagaaatactgggaactgtttgaat

SEQ ID NO: 10515 - protein, 480 aa, Triticum aestivum (common wheat)
MASTAAPPAALVARRAASASVAAPLRGAGLAAGCQPARSLAFAAGADPRLAVHVASRCRAASAARGTRAVATMAKKSVGDLTAADLEGKRVLVRADLNVPLDDNQNITDDTRIRAAIPTIKYLLSNGAKVILTSHLGRPKGVTPKFSLAPLVPRLSELLGIEVKKAEDVIGPEVEKLVADLANGAVLLLENVRFYKEEEKNDPEFAKKLASLADLFVNDAFGTAHRAHASTEGVTKFLKPSVAGFLLQKELDYLDGAVSNPKRPFAAIVGGSKVSSKIGVIESLLEKCDILLLGGGMIFTFYKAQGLSVGSSLVEEDKLELATSLLAKAKAKGVSLLLPSDVIIADKFAPDANSQTVPASAIPDGWMGLDIGPDSVKTFNDALDTTQTIIWNGPMGVFEFDKFAVGTESIAKKLAELSKKGVTTIIGGGDSVAAVEKVGVADVMSHISTGGGASLELLEGKELPGVVALDEGVMTRSVTV

SEQ ID NO: 10516 - DNA, 1473 bp, Triticum aestivum (common wheat)
  CDS (79)..(1284)
gggccaagcccatcgccactccaatccagcgaccacctcgcccagatcgccgccgattcgatccggttcctcgacgggatggcgaccaagaggagcgtgggcaccctcggggaggcggatctcaaggggaagaaggtgttcgtgcgcgccgacctcaacgtgccgctcgacgacgcccagaagatcaccgacgacacccgcatccgcgcctccatccccaccatcaagtacctcctcgagaagggcgccaaggtcatcctggccagccatctgggccgcccaaaaggtgtcacccccaagttcagcttgaagcctcttgttgcacgcttgtctgagctccttggacttgaagttgtgatggcccctgactgcatcggtgaagaagttgagaaattggctgctgctttgccagatggtggtgttctactcctagagaatgttagattctacaaggaggaagagaagaacgatcctgagtttgctaagaagcttgcgtcagttgctgacctttatgtaaatgacgctttcggcactgcacatagggctcatgcttcaactgagggtgtaaccaagtttttgaggccttctgttgctggcttcctcatgcagaaggaacttgactatcttgtcggagctgttgccaacccaaagaagccatttgctgccattgttggtggatcaaaggtctcatctaagattggtgtgatcgagtctctgctggccaaggttgatatcctcatccttggtggtggtatgatcttcacattctacaaggcccagggattagctgttggaaagtctcttgtggaggaagacaaacttgaactggcaacttcactgattgaaacggcaaagtccaagggtgttaagctcttgcttccgactgatgtcgttgtggctgacaagtttgcagcagatgccgaaagcaagattgttcctgccactgctatccctgatggttggatgggtctggatgttggcccagattccatcaagacttttgcagaagccttggacaccaccaagactgttatctggaacggtcctatgggagtctttgagtttgagaagtttgccgcaggcactgatgcgatcgcgaagcagttggctgagcttactgggaagggtgtcacgaccatcattggtggaggtgactccgttgctgctgttgagaaggctgggctggccgacaagatgagccacatttccaccggcggtggcgcgagcttggagctgctggaaggcaagcccctccctggtgttcttgcccttgacgaggcgtaggttgattcggtttcacctatcagcttgctgcgtgccccttttgtttgggatctcatctcggtgtaacgctggaacgttatatgtcccaaggaaactttgagataggcttgtcgccaatttttgctagtagatgagtcgtgaataattatcaacttcctctgtgcgtgtgaagtgatgtggctggaattt

SEQ ID NO: 10517 - protein, 401 aa, Triticum aestivum (common wheat)
MATKRSVGTLGEADLKGKKVFVRADLNVPLDDAQKITDDTRIRASIPTIKYLLEKGAKVILASHLGRPKGVTPKFSLKPLVARLSELLGLEVVMAPDCIGEEVEKLAAALPDGGVLLLENVRFYKEEEKNDPEFAKKLASVADLYVNDAFGTAHRAHASTEGVTKFLRPSVAGFLMQKELDYLVGAVANPKKPFAAIVGGSKVSSKIGVIESLLAKVDILILGGGMIFTFYKAQGLAVGKSLVEEDKLELATSLIETAKSKGVKLLLPTDVVVADKFAADAESKIVPATAIPDGWMGLDVGPDSIKTFAEALDTTKTVIWNGPMGVFEFEKFAAGTDAIAKQLAELTGKGVTTIIGGGDSVAAVEKAGLADKMSHISTGGGASLELLEGKPLPGVLALDEA

SEQ ID NO: 10518 - DNA, 1777 bp, Physcomitrella patens
  CDS (135)..(1562)
gctaaacctagtgatgcacgagccgttttgcccatcggcacgaggaaacctcgatcatctccgcctgtgcagcagctgcagccgttctgttggagtgcttgtgtggtgccgcgcgcggtctttaagcttgaaggatggagtccctcgcgctgcgatctgccgtggttgccaccggattgacctccagtgtggcatcccaaacctctgtgcagacccgcgctacggtttcgtctgctttcatcgggaagagcatacgtgtgaacactaaactcaacgcctcagctgtgcccgtccagcagaagttccgctacgtgcgtgccgacgctggtgcacagactgcgcaggttgagaccgttgagaagaaggctagcattaaggacgttcccgagtcggaattccagggcaaggttgtgttcgtgcgtgctgatctgaacgtacctctcaatgatgcatgcgaaatcaccgatgacacccgaatccgtgcctccctcccgaccatccagcatcttacgaaggccggagccaaggtggtgctcgctagccatttgggtcgccccaagaagggccctgaggacaaattcagcttgaagcccgttgcagggagactgaccgagttgcttggccagaccgtggaattggcccctgattgcattggtgctgaagtagaatctaagattgcagcactgaagaatggtgaagttctccttctggagaatgttaggttctacaaggaagaggagaagaacgacagcgagttctcccaaaagcttgccaagggtgtcgatatcttcgttaacgacgccttcggcactgcccaccgcgctcactcatctactgcaggaattgctgagtacgttggcaagactgtggctgggttcctcttggagaaggagttggcttatctcgctggcgccgtgaaggccccagccaggcctttcgttgccattgttggaggcagcaaggtctcatcgaagattactgtgattgagtccttgatgaacgtgtgcgacaaggtcattttgggaggtggcatgatctttaccttcttcaaggcagacggcaaggatgttggaagttccctagtggaggatgacaagattgatttggccaaggacctcgtggctctagctaagaagaagggcgttgagctcattctccccgtcgatgtcaccgcagctgataagttctctcccgaagccaacactcaagtgtgcagctcctcgaacatccctgccggctggatgggactagacattggcccgaaggcaatcgaccaattccaggatgccctgaagggcgccaagacggttctgtggaacggaccgatgggagtgttcgagttcgagaagttcgcggacggaacaactgccgtcgctaaaactttggcaggtttgaccaaggagggtgccatcaccatcattggaggaggtgactccgtcgcagccgttgagaaggctggactcgccgaccagatgagccatgtgtccaccggaggaggggccagtctcgagttgttggaaggcaaggtattgccaggagttgctgctcttgacaacgcttaaatgcctcttttgccgaagaggtgaattccgtccacgaactcgcagtagagtgacaatgtcactgagtgcacccccggctctggctgtctaatcatatgattcatttttttggtagttttttttgtgatttgcctttgtaccagtaaacacagattatgaccagtaaagaactccagctcgatttacctggatgcttggtattctcttaaaaaaaa

SEQ ID NO: 10519 - protein, 475 aa, Physcomitrella patens
MESLALRSAVVATGLTSSVASQTSVQTRATVSSAFIGKSIRVNTKLNASAVPVQQKFRYVRADAGAQTAQVETVEKKASIKDVPESEFQGKVVFVRADLNVPLNDACEITDDTRIRASLPTIQHLTKAGAKVVLASHLGRPKKGPEDKFSLKPVAGRLTELLGQTVELAPDCIGAEVESKIAALKNGEVLLLENVRFYKEEEKNDSEFSQKLAKGVDIFVNDAFGTAHRAHSSTAGIAEYVGKTVAGFLLEKELAYLAGAVKAPARPFVAIVGGSKVSSKITVIESLMNVCDKVILGGGMIFTFFKADGKDVGSSLVEDDKIDLAKDLVALAKKKGVELILPVDVTAADKFSPEANTQVCSSSNIPAGWMGLDIGPKAIDQFQDALKGAKTVLWNGPMGVFEFEKFADGTTAVAKTLAGLTKEGAITIIGGGDSVAAVEKAGLADQMSHVSTGGGASLELLEGKVLPGVAALDNA

SEQ ID NO: 10520 - DNA, 2000 bp, Ashbya gossypii
  CDS (447)..(1793)
ctgcagcacgtggtcctgccggtttcgcagttcgccgcacagctcccgcaccgccatgtaccgaagatctacatcctcctgctcgcgatagcgcatcacgcaccgcagcgcgctctccatctccgtctccatccttgcgcttgcccgtatctgccaacaagccgtccagaacgccgctgcttagtacgagctcgtcacgtgcgactgccagcttcctgttctgtggaagccggcttctcccctggctttttccgtagcatgacgccggggctcaccagagaacgaggaagaatttccagttggcgagcacaggccaggcgggctccctacgggtaccgtggggcgagcaaggcagggcaatgatgcaataagcgcaggccggcacgcaattgagcgagcaacgtgcacgaggatttttctgggggcgaaaaaagcgagtataaaggatgggccggtcgtggggtctgctctggatggcgtgcttgctgtacggcgtgttcacagagtgtcgcagatcttcacagcacgcacacacaggaaaaatgtcgctatcctctaagctaacagtcaaggacctgagccttgcgggcaaacgcgtgttcatccgcgtggacttcaacgtgccgctagacgggaagacgatcacgtcgaaccagcgcattgtggccgcgctacccacgatcaagtacgtgttggagcagggccccaaggcggtggtgttggcgtcgcacctagggcggcccaacggcgagcgcaacgagaagtactcgttggcgccggtggccgcggagctggagaagctgctgggccagaaggtgaacttcctggacgactgcgtgggcgagcacgtgaccgctgcggtcaacggcgcggctgcggggtccgtgttcctgcttgagaacctgcggttccacatcgaggaggagggctcgcgcaaggtggacggcgagaaggtcaaggcgtctgcggaggacgtgcagaagttccgccagggcctcatgtcgctcgcggacgtctacgtcaacgacgccttcggcaccgcgcacagagcgcactcctcgatggtcggcttcgagctgcctgagagggccggcggcttcttgttgtcgcgcgagctggagtacttcagcaaggcgttggagaaccctacgagacccttcttggcgatcctgggcggtgccaaggttgccgacaagatccagttgatcgacaacttgttggacaaggtcgactcgattgtgatcggcggtggcatggccttcaccttcaagaaggtgcttgagaacatggagatcggtaactccatctacgacaaggcgggtgccgagatcgttcctaagctagcggagaaggccaagaagaacggcgtcaagatcgtgttgcctgtggacttcgtgatcggcgacgacttctcccaggacgccaacaccaagattgtctctgcctccgagggcattccatccggctgggagggtctagactgtggtcctgagtccagaaagctgttcagcgagaccatcgcgagcgcgaagaccatcgtgtggaacggcccaccaggtgtctttgagattccaaagttctccgagggtacccaggccatgcttgcggccgctgtcaaggcctccgaggctggcagcaccgtcatcatcggcggtggtgacaccgctaccgtggccaagaagtacggtgtggtcgagaagatctcccatgtgtccaccggtggtggtgcctccctagagctattggagggtaaggacctaccaggtgtcaccttcttgtccagcaagcagtagatgcgtccgcgcgcctgccggcttgaatagataataaactatatacgcaacgtaatggaaagttgagaaactactatatgcgcctgttgcgctgctcgtccgtgggctccagccgcgggaacccgagcagctccatgatgcagtactcgtccgggctctcgacgcacgcgccgctcgacttgtcaaacaggccgtgctgattcagcg

SEQ ID NO: 10521 - protein, 448 aa, Ashbya gossypii
MGRSWGLLWMACLLYGVFTECRRSSQHAHTGKMSLSSKLTVKDLSLAGKRVFIRVDFNVPLDGKTITSNQRIVAALPTIKYVLEQGPKAVVLASHLGRPNGERNEKYSLAPVAAELEKLLGQKVNFLDDCVGEHVTAAVNGAAAGSVFLLENLRFHIEEEGSRKVDGEKVKASAEDVQKFRQGLMSLADVYVNDAFGTAHRAHSSMVGFELPERAGGFLLSRELEYFSKALENPTRPFLAILGGAKVADKIQLIDNLLDKVDSIVIGGGMAFTFKKVLENMEIGNSIYDKAGAEIVPKLAEKAKKNGVKIVLPVDFVIGDDFSQDANTKIVSASEGIPSGWEGLDCGPESRKLFSETIASAKTIVWNGPPGVFEIPKFSEGTQAMLAAAVKASEAGSTVIIGGGDTATVAKKYGVVEKISHVSTGGGASLELLEGKDLPGVTFLSSKQ

SEQ ID NO: 10522 - DNA, 1453 bp, Populus nigra
  CDS (91)..(1296)
cttacaccactctctcacactattcttttcttgatctcacctaaagccgaagtctttgttctcttctctcgcgtcgattggttttgaaaaatggctactaagaagagtgttagcagtttaaaggaagcagatttgaagggaaaaagcgtttttgtaagagtagatctgaatgttcctttggatgataactttaatattaccgatgatactaggatccgtgctgctgtccccactatcaagtacttgatgggtcatggtgccagagttattctttcctctcacttgggacgcccaaagggtgtcacacctaaatacagcttgaagcctcttgtaccaaggctatctgaacttcttggtgttgatgttaagatggcaaatgattgtattggtgtggaggttgagaaaattgtggctgagattccagaagggggtgttttgctccttgaaaatgtaaggttttataaggaggaagagaagaatgaccctgaatttgcaaagaagctcgcttctctagcagaaatctatgtgaatgatgcattcggcactgctcacagagcccatgcatccactgagggcgtggctaaatacttgaagcctgctgttgctggtttccttatgcagaaggaactcgattatcttgttggagctgtggcaaatcccaagaagccatttgctgcaattgttggtggctcaaaggtatcttctaagattggagttatcgaatcactcttggagaaggttgacctcctcttcttgggtggaggaatgatctatactttttacaaagcacaagggcactcagttgggtcctcccttgttgaggaagacaaacttgatcttgcaacttcacttattgagaaggccaaggtcaagggggtaaaactgctgctgcctgcagatgtggttgttgctgacaagtttgctccagatgccaacagcaaggtggtgccagcttctgagataccagatggttggatgggtttggacataggacctgattccatcaagacatttagcgaggcattggatacaaccaagaccatcatttggaatggaccaatgggtgtctttgagttcgagaagtttgcagcgggaactgaggcaattgccaggaagcttgccgagctcagcggcaagggagtgactaccatcattggaggaggtgactctgtcgctgctgtggagaaggctggacttgctgacaagatgagccacatctcaacaggaggtggtgccagcttagagcttctagagggcaaaccattacctggagtcctggctcttgatgacgcttaagccgaatttttcctcgtgttacttcttaagaacatgcttggtaaatgtttggtattacaatcagagtggactagatgagtgctgatctttggaggctgtagagtgactaaataaatcttctctcaagtatattcaaccatggaatggtttcggattg

SEQ ID NO: 10523 - protein, 401 aa, Populus nigra
MATKKSVSSLKEADLKGKSVFVRVDLNVPLDDNFNITDDTRIRAAVPTIKYLMGHGARVILSSHLGRPKGVTPKYSLKPLVPRLSELLGVDVKMANDCIGVEVEKIVAEIPEGGVLLLENVRFYKEEEKNDPEFAKKLASLAEIYVNDAFGTAHRAHASTEGVAKYLKPAVAGFLMQKELDYLVGAVANPKKPFAAIVGGSKVSSKIGVIESLLEKVDLLFLGGGMIYTFYKAQGHSVGSSLVEEDKLDLATSLIEKAKVKGVKLLLPADVVVADKFAPDANSKVVPASEIPDGWMGLDIGPDSIKTFSEALDTTKTIIWNGPMGVFEFEKFAAGTEAIARKLAELSGKGVTTIIGGGDSVAAVEKAGLADKMSHISTGGGASLELLEGKPLPGVLALDDA

SEQ ID NO: 10524 - DNA, 1394 bp, Populus nigra
  CDS (56)..(1261)
tctcaattgaagcccaactcttgacttctttctcttagcgagatttattgaaaaaatggccactaagaagagtgttagcagtttaaaggaaacagatttgaagggaaagagagtgtttgtgagggtagatctgaatgttcctttggatgataactttaatattactgatgatactaggatccgtgctgccgtacccactgtcaagtacttgatggatcatggtgccagagttattctatgctctcacttgggacgcccaaagggtgttacacctaaatacagcttgaagcctcttgtaccaaggctatccgaacttcttggtgttgaggttaagatagcaaatgattgtattggcgaggaagttgagaaattggtggctgagattccaggaggaggtgttgtgcttcttgaaaatgtaaggttccacaaggaggaagagaagaatgaccctgaatttgcaaagaagcttgcttctctagcagaagtctatgtgaatgatgcatttggcactgctcacagagcccatgcttccaccgagggagtggctaaatacttgaagcccgctgttgctggtttccttatgcagaaggaacttgactatcttgttggagctgtggcaaatcccaagaagccatttgctgctattgttggtggctcaaaggtatcatccaagattggagtgattgaatccctcttagagaaggttgacttcctcttcttgggtggaggaatgatctttactttttacaaagcccaagggtactcagttgggtcatcccttgtggaggaagacaagcttgatcttgcaacttcacttattgagaaggccagggtcaagggggtaaaactactgctgcctaccgatgtggttgttgctgacaagtttgcttcagatgccaacagcaaggtggtaccagcttctgagatagcagatggttggatgggtttggatataggacctgattctatcaagacattcagtgaggcattggatacaaccaaaaccattatttggaatggaccaatgggtgtgtttgagttcgagaagtttgcagcaggaactgaggcaatcgcctggaagcttgctgagctcagtggcaagggagtgactaccatcattggaggaggtgactctgttgctgcagtggagaaggttgggctcgctgataagatgagccacatctcaacaggaggtggtgccagcttagagcttcttgaggggaagccgctgcctggagtcctggctcttgacgacgcttaagctggatttttcttttagtgctggtatatgtttggttttgccaccggagtgggctaaatgatagagctgatcttatggaggctgtagagtgaccgaataaatgctcttccaagtatattcaactatgcaatgg

SEQ ID NO: 10525 - protein, 401 aa, Populus nigra
MATKKSVSSLKETDLKGKRVFVRVDLNVPLDDNFNITDDTRIRAAVPTVKYLMDHGARVILCSHLGRPKGVTPKYSLKPLVPRLSELLGVEVKIANDCIGEEVEKLVAEIPGGGVVLLENVRFHKEEEKNDPEFAKKLASLAEVYVNDAFGTAHRAHASTEGVAKYLKPAVAGFLMQKELDYLVGAVANPKKPFAAIVGGSKVSSKIGVIESLLEKVDFLFLGGGMIFTFYKAQGYSVGSSLVEEDKLDLATSLIEKARVKGVKLLLPTDVVVADKFASDANSKVVPASEIADGWMGLDIGPDSIKTFSEALDTTKTIIWNGPMGVFEFEKFAAGTEAIAWKLAELSGKGVTTIIGGGDSVAAVEKVGLADKMSHISTGGGASLELLEGKPLPGVLALDDA

SEQ ID NO: 10526 - DNA, 1802 bp, Populus nigra
  CDS (205)..(1650)
caaaaaccaacacacaccgcccattcattccctccttcgttcttcccgtccacagcttcccccattattttcatctctcactctcactccaaaagatcagagaaagagagcctcgttttcacatccacataacccctcattacctcctcttttccttttagtccacacaacttctctcacgaaacagtccacaaacaccgccaaatggcctctgccacagcaccaacaactctatctctcctcaaaacagccgccgcctccacctccacttctgcccgtgcctcccttctcccagtctccacctctggcctccgcacaaccagcctccgtggtcttggtttctctgctgcagacccattgtttagttctcatgtggtgtccaaaatccgatcttttaagtcaaatggcagagcaccaagagctgtggtgtctatggcaaagaagagtgtgggtgacttgactgctgctgacttgaaagggaagaaagtgtttgttagagctgatttgaatgtgcctcttgatgagaatcagaaaattactgatgataccagaattagagccgctgttcctactattaaatatttgatttcaaaaggggccaaagttattctttctagtcatttgggacgaccaaaaggtgtaactccaaaattcagcttggcacctcttgttccccggttatctgaactccttggaattcaggttgtgaaagctgatgattgcattggtccagaggtagaaaagttggttgcttcacttcccgagggtggtgttcttcttcttgaaaatgtcaggttttacaaggaagaagagaagaacgaacctgaattcgcaaagaagcttgcttccatggcagatctttatgtaaatgatgcatttggaactgcacatagagcacacgcctcaactgagggagtcacgaaattcttgaaaccatctgttgctggtttcctcttgcagaaggagctggactaccttgttggggcagtttcaaacccaaagaggccatttgctgccattgtgggtggttctaaggtctcatcgaagattggagtcattgagtcactcctggagaagtgtgatatcctccttttgggtggaggtatgattttcacattttacaaggctcaaggcctcgcagtaggttcatccttggttgaggaagataagcttgatttggcgaccacactacttgagaaggccaaggcaaaaggagtgtctcttttgctacctagtgatgtggtaattgcagacaagtttgctcctgatgcaaatagcaagactgtgccagcatcagccatcccagatggttggatgggactggatattggaccagaatctgtgaaaacattcagtgaggctttgggaaccacccaaactgtcatctggaatggacccatgggagtgtttgagtttgagaagtttgcgaatggaacagaggccattgcaaagaagcttgctgagcttagtggcaagggagttacaactattattggaggtggagattctgttgcagctgtagaaaaagtaggagttgctgatgtcatgagccacatatcaactggtggtggtgccagcttggagttgttggaagggaaagagctaccaggtgtccttgctcttgacgaagtcgaacgagttgctgtgtaggataatttgatttccccccaatcccgttcccatttccatgtcctcgcttttactgttacgaaagggagatgcaatgttgtagagaagtacgagtcatgctgtacgttgaggttggttaacaagagtgatccaagactttaaataaatagttg

SEQ ID NO: 10527 - protein, 481 aa, Populus nigra
MASATAPTTLSLLKTAAASTSTSARASLLPVSTSGLRTTSLRGLGFSAADPLFSSHVVSKIRSFKSNGRAPRAVVSMAKKSVGDLTAADLKGKKVFVRADLNVPLDENQKITDDTRIRAAVPTIKYLISKGAKVILSSHLGRPKGVTPKFSLAPLVPRLSELLGIQVVKADDCIGPEVEKLVASLPEGGVLLLENVRFYKEEEKNEPEFAKKLASMADLYVNDAFGTAHRAHASTEGVTKFLKPSVAGFLLQKELDYLVGAVSNPKRPFAAIVGGSKVSSKIGVIESLLEKCDILLLGGGMIFTFYKAQGLAVGSSLVEEDKLDLATTLLEKAKAKGVSLLLPSDVVIADKFAPDANSKTVPASAIPDGWMGLDIGPESVKTFSEALGTTQTVIWNGPMGVFEFEKFANGTEAIAKKLAELSGKGVTTIIGGGDSVAAVEKVGVADVMSHISTGGGASLELLEGKELPGVLALDEVERVAV

SEQ ID NO: 10528 - DNA, 1263 bp, Trypanosoma brucei
  CDS (1)..(1263)
atgtcactaaaagagaggaagagcattaacgaatgcgatcttaagggaaagaaggttcttatccgtgttgactttaatgttcctctggatgatggtaatattaccaacgactaccgaatccgatcagctctgccagccgtccaaaaagttctcacagaaggcggcagctgtgttctcatgagccacctcgggaggccgaaaggcgtttctatggctgaaggcaaagaactgcggagcgctggcggtattcccgggttcgagcagaaggcaacactcaaaccggtagccaagcgcctcagcgaattgttatcgagacccgtcacattcgcacctgactgtctgaacgctgcagatgtcgtctctaagatgtctccgggcgatgttgttctgcttgaaaatgtacggttctacaaagaagagggcagcaagagcactgaggaacgtgaagccatggccaagatccttgcgtcatatggtgatgtttacatcagtgatgcttttggtacagctcaccgtgacagtgctaccatgaccggaattccaaagattttgggtcacggtgctgccggttatttgatggagaaggagatttcatacttcgctaaggtgcttggtaacccgccgcgtccgctggttgctatcgttggtggagcgaaagtgagcgaaaagatccaacttctggataacatgttgcagcgcatcgattatctcttaattggtggtgcaatggcatacacatttctgaaggctcagggttacagcattggaaaatcgaagtgcgaggaaagtaaacttgaatttgctcgatccctgctgaagaaggcggaggaccgcaaggtgcaggttattcttccaattgatcatgtttgccacacggaattcaaagctgtggattctccattgataactgaggatcaaaacatccctgaagggcatatggctctggatattggtcccaagactattgaaaaatatgttcagacgattgggaagtgtaagagcgccatttggaacggtcccatgggtgtatttgaaatggttccttattccaaaggtacatttgcaattgcgaaagccatgggtcgaggaactcacgagcatggactcatgagtatcatcggtggtggtgacagcgcaagtgcagctgagttgagcggtgaggcgaagcgcatgtctcatgtttcaacgggtggtggtgcgtctttggaactcctcgagggcaaaacgcttcccggtgttacagtattggacgaaaaggagtaa

SEQ ID NO: 10529 - protein, 420 aa, Trypanosoma brucei
MSLKERKSINECDLKGKKVLIRVDFNVPLDDGNITNDYRIRSALPAVQKVLTEGGSCVLMSHLGRPKGVSMAEGKELRSAGGIPGFEQKATLKPVAKRLSELLSRPVTFAPDCLNAADVVSKMSPGDVVLLENVRFYKEEGSKSTEEREAMAKILASYGDVYISDAFGTAHRDSATMTGIPKILGHGAAGYLMEKEISYFAKVLGNPPRPLVAIVGGAKVSEKIQLLDNMLQRIDYLLIGGAMAYTFLKAQGYSIGKSKCEESKLEFARSLLKKAEDRKVQVILPIDHVCHTEFKAVDSPLITEDQNIPEGHMALDIGPKTIEKYVQTIGKCKSAIWNGPMGVFEMVPYSKGTFAIAKAMGRGTHEHGLMSIIGGGDSASAAELSGEAKRMSHVSTGGGASLELLEGKTLPGVTVLDEKE

SEQ ID NO: 10530 - DNA, 1251 bp, Debaryomyces hansenii CBS767
  CDS (1)..(1251)
atgtctttatctaacaagttatctgtcaaggacttagatgtctccggtaagagagttttcatcagagtggatttcaatgttccattagatggtaaaaccatcaccaacaaccaaagaattgttgctgctttaccaactatcaagtatgtgttagaaaacaagcctaaggctgttatcttggcttctcacttaggaagaccaaacggtgaaaaagttgacaagttctctttagctccagttgccagtgaattggaaaagttgttgggtaagaaggttaacttcttagacgactgtgttggtgacaatgttgaaaaagctgtgaacggtggtagtgacggtgaagttttcttattagaaaacttgagattccacatcgaagaagaaggttcgcaaaagaaggacggtgaaaaggtcaaggcttccggcgaagatgtcaagaaattcagacaacaattgaccaacttggccgatgtctacgttaatgatgctttcggtactgcccacagagcccactcttctatggttggtttagaattaccacaaaaagctgctggtttcttaatggccaaggaattagaatactttgctaaggccttagaaaacccagtcagaccattcttagccatcttaggtggtgccaaggtttctgacaagatccaattgatcgacaacttgttagacaaggtcgatttattgattgttggtggtggtatgtctttcaccttcaagaaggtcttagacaacatgccaattggtgactccttgttcgacgaagctggtgctaagaacgtcgaaaacttagttgctaaggctaagaagaacaacgtcaagattgtcttgccggttgatttcattactgccgacaaattcgacaaggatgctaagacctccactgccactgaagacgaaggtatcccagacaattggatgggtttagatgctggtccaaagtccaacgaattgtttgctaagactgttgctgaagctaagactattgtctggaatggtccaccaggtgttttcgaattcgacaacttcgctaaaggtactaagtctttattagatgctgctgtcaagtctgctgaatctggtaacactgttatcatcggtggtggtgacactgctactgttgctaagaagtacggtgttgttgacaagttgtcccatgtctctaccggtggtggtgcttctttagaattattggaaggtaaggaattgccaggtgttgttgctatttccgataagaaataa

SEQ ID NO: 10531 - protein, 416 aa, Debaryomyces hansenii CBS767
MSLSNKLSVKDLDVSGKRVFIRVDFNVPLDGKTITNNQRIVAALPTIKYVLENKPKAVILASHLGRPNGEKVDKFSLAPVASELEKLLGKKVNFLDDCVGDNVEKAVNGGSDGEVFLLENLRFHIEEEGSQKKDGEKVKASGEDVKKFRQQLTNLADVYVNDAFGTAHRAHSSMVGLELPQKAAGFLMAKELEYFAKALENPVRPFLAILGGAKVSDKIQLIDNLLDKVDLLIVGGGMSFTFKKVLDNMPIGDSLFDEAGAKNVENLVAKAKKNNVKIVLPVDFITADKFDKDAKTSTATEDEGIPDNWMGLDAGPKSNELFAKTVAEAKTIVWNGPPGVFEFDNFAKGTKSLLDAAVKSAESGNTVIIGGGDTATVAKKYGVVDKLSHVSTGGGASLELLEGKELPGVVAISDKK

SEQ ID NO: 10532 - DNA, 1281 bp, Yarrowia lipolytica CLIB99
  CDS (1)..(1281)
atgagcacatttcacacgcatctcaaaatgtctcttaccaacaagctctccatcaaggatctcgatctcaagaacaagcgagtcttcatccgagtcgactttaacgttcctctcgatggcaccaccatcaccaacaaccagcgaattgttgctgccctgccctccatcaagtatgccattgatcagggtgccaaggctgtgatccttgcttctcatctcggccggcccaacggccagcgagtcgagaagtactctctcaagcccgtccaggccgagctttcaaagctccttggcaagcccgtcaccttccttgacgactgcgtcggccccaaggttgaggaggaggtctccaaggccaaggacggtgaggtcattctcctcgagaacctgcgattccaccccgaggaggagggatcccacaaggacgccgacggcaagaagatcaaggctgaccccgccaaggttgaggagttccgaaagtctctgacttctctcgccgatgtctacgtcaacgacgctttcggaaccgcccaccgagcccactcctccatggtcggcattgagcttccccagcgagccgctggtttccttgtcgccaaggagctcgagttcttcgccaaggctctggagcaccccgagcgacccttccttgccatccttggtggtgccaaggtctccgacaagatccagctcatcgacaacctacttgacaaggtcaacgccctgatcattggtggtggtatggctttcaccttcaagaagacccttgagaacgtcaagattggaaactctctcttcgacgaggatggatccaagattgtcgccggcctcgttgagaaggccaagaagaacaacgtcaagcttgtcttccccgtcgactacgtcaccgccgacaagttctccaaggatgccaaggttggccacgcaaccgacgctgagggtatccccgacggatggcagggtctggactgtggtcccaagtctatcgaggagttccagaaggtcattggcgagtccaagaccatcctctggaacggaccccccggtgtctttgagttcgacaacttcgccaagggtaccaaggctgtgcttgacgcctgtgtcaaggccgttgacaacggtgctaccgtgatcattggtggtggagataccgccactgtcgccaagaagtacggtgccgaggacaagctctcccatgtttccactggaggaggagcttctcttgagcttctcgagggtaagacccttcccggtgtcgctgctctctccgagaagaagtaa

SEQ ID NO: 10533 - protein, 426 aa, Yarrowia lipolytica CLIB99
MSTFHTHLKMSLTNKLSIKDLDLKNKRVFIRVDFNVPLDGTTITNNQRIVAALPSIKYAIDQGAKAVILASHLGRPNGQRVEKYSLKPVQAELSKLLGKPVTFLDDCVGPKVEEEVSKAKDGEVILLENLRFHPEEEGSHKDADGKKIKADPAKVEEFRKSLTSLADVYVNDAFGTAHRAHSSMVGIELPQRAAGFLVAKELEFFAKALEHPERPFLAILGGAKVSDKIQLIDNLLDKVNALIIGGGMAFTFKKTLENVKIGNSLFDEDGSKIVAGLVEKAKKNNVKLVFPVDYVTADKFSKDAKVGHATDAEGIPDGWQGLDCGPKSIEEFQKVIGESKTILWNGPPGVFEFDNFAKGTKAVLDACVKAVDNGATVIIGGGDTATVAKKYGAEDKLSHVSTGGGASLELLEGKTLPGVAALSEKK

SEQ ID NO: 10534 - DNA, 1164 bp, Erwinia carotovora subsp
  CDS (1)..(1164)
atgtctgtaattaagatgaccgatctggatctggctggtaaacgtgttcttattcgtgcggatctgaacgtaccagtaaaagaagggaaagtgacgtctgatgcgcgcatccgtgcctctctgccgaccatcgaaatcgctctgaaacaaggcgctcgcgttatggtcacttcccacttgggacgtccgaccgaaggcgagtacaacgaagatttttctctgctgcctgttgttgactacctgaaagagaaactctcttctcccgtacgtctggcgaaagactacctagatggtgttgatgtcgccgaaggcgagctggttgtactggaaaacgtccgctttaacaaaggcgagaagaaagacgacgaagtgctctccaagaaatacgcggcactgtgcgatgtgttcgtgatggacgccttcggtacggcgcaccgtgcacaggcttcaacccacggcgtaggtaaatttgccactatcgcttgtgcgggcccgctgctgtctggtgagctggaagcgctgggtaaagcactgagcaaaccagcccgtccgatggtcgccattgtgggcggttctaaagtttctactaaactgaccgtactggattcactgtctaaaatcgccgatcagctgatcgtgggtggcggtatcgccaatacctttgttgccgcacaaggccacaatgtaggtaagtccctgtatgaagcagacctgatttctgaagcgaaaaagctgctggaaacgtgtgatattcctgttccgagcgatgtgcgtgtagcgtcagaattctctgaaactgctgcagcaacgctgaagtctgttacggaaattaaagacgaagagcagattcttgatctgggagatgtttccgctgagcgtttggctgaaattctgaagaatgccaaaaccatcctgtggaatggcccagttggcgtcttcgaattcccgaatttccgtaaaggaaccgagattatcgctcgtgctatcgcggatagcgacgcattctctatcgcaggtggcggcgatacgctagctgcgatcgatctgtttggtattgcagacaagatctcctacatttctactggtggtggcgcattcctggagttcgttgaagggaaaaaactgccagcagtcgttatgctggaagaacgcgccaagcagtaa

SEQ ID NO: 10535 - protein, 387 aa, Erwinia carotovora subsp
MSVIKMTDLDLAGKRVLIRADLNVPVKEGKVTSDARIRASLPTIEIALKQGARVMVTSHLGRPTEGEYNEDFSLLPVVDYLKEKLSSPVRLAKDYLDGVDVAEGELVVLENVRFNKGEKKDDEVLSKKYAALCDVFVMDAFGTAHRAQASTHGVGKFATIACAGPLLSGELEALGKALSKPARPMVAIVGGSKVSTKLTVLDSLSKIADQLIVGGGIANTFVAAQGHNVGKSLYEADLISEAKKLLETCDIPVPSDVRVASEFSETAAATLKSVTEIKDEEQILDLGDVSAERLAEILKNAKTILWNGPVGVFEFPNFRKGTEIIARAIADSDAFSIAGGGDTLAAIDLFGIADKISYISTGGGAFLEFVEGKKLPAVVMLEERAKQ

SEQ ID NO: 10536 - DNA, 1215 bp, Mesoplasma florum
  CDS (1)..(1215): transl_table=4
atgaattacaatttgaaaaaaacattaaaagatattaatgtaaaaggaaaaaaagttttagttcgtgttgactttaatgttccattaaaagatggagttattactgatgacaatcgtattcaagcagcattaccaacaattaaatatttagttgaaaatggcgcaaaagttatcttattttcacacttatcaagaattaaaagtgaagatgacaaaaaaactaaatcattagctccagtagcaaaaagattggaagaagttttagcacaatcagtaaactttgttaaccaaacaagaggaactgaattagaaactgcaattaatgcattaaatgaaaaagaagttttattatttgaaaacactcgtttcgaagatgtaaaagatggtgaagtagttaaagctgaatcaaaaaatgatccagaattaggaaaatactgagcaagccttggagatgtatttattaatgatgcatttggtactgcacaccgtgctcatgcttcaaacgttggtatagcttcaaacatttctgaatcagcattaggtttcttagttcaaaatgaaattgaaatgttaggtaaaggaatagacgcacctgaaagaccttttgttgcaattttaggaggagcaaaagtttctgacaaaattggtgttattgataaccttttaactaaagttgacaaaattttaattggtggaggtatgacttatacattccataaagcaatgggattagaaattggtaactcattattagaagctgataaagttgaattggctaaagaatacttagaaaaagctaatggaaaaataatgttacctgttgatagtttatgtgctcctgaatatgctgatgttgctccaacattatgtggagaaaatgttccagcaggaatgatgggattagatatcggaccaaaaactattgaaatgtatgaaaaagaattagcaaacgcaaaaactgttgtttgaaatggaccaatgggagttagtgaatttgaaaacttcaaagctggtactgttgctgtttgtgaagctgctgcaaaacgtaaagctgatggaggtttcactttaattggtggaggagactcagctgcagctgcaattaaattaggattcaaagatgaattctcatgaatttctacaggtggtggagcttcattagaatatatggaaggtaaagaattacctggaattgctgcaatccaaaacaaataa

SEQ ID NO: 10537 - protein, 404 aa, Mesoplasma florum
MNYNLKKTLKDINVKGKKVLVRVDFNVPLKDGVITDDNRIQAALPTIKYLVENGAKVILFSHLSRIKSEDDKKTKSLAPVAKRLEEVLAQSVNFVNQTRGTELETAINALNEKEVLLFENTRFEDVKDGEVVKAESKNDPELGKYWASLGDVFINDAFGTAHRAHASNVGIASNISESALGFLVQNEIEMLGKGIDAPERPFVAILGGAKVSDKIGVIDNLLTKVDKILIGGGMTYTFHKAMGLEIGNSLLEADKVELAKEYLEKANGKIMLPVDSLCAPEYADVAPTLCGENVPAGMMGLDIGPKTIEMYEKELANAKTVVWNGPMGVSEFENFKAGTVAVCEAAAKRKADGGFTLIGGGDSAAAAIKLGFKDEFSWISTGGGASLEYMEGKELPGIAAIQNK

SEQ ID NO: 10538 - DNA, 1188 bp, Acinetobacter sp
  CDS (1)..(1188)
atgaactttaagcgtatgacggacctcgacttaagcgaaaaacgtgtattaattcgtgaagatttaaatgtaccagtaaaaaatggccagattaccagtgatgctcgtttgcgtgcagcattaccaaccattcaggctgcacttgctcaaggtgctgctgtgatggtttgctctcacttagggcgtcctgttgaaggtgaaccaaaacctgaacagtcacttgcacctgttgcagcttacctttcagatgcattagggcaggaagttaaacttttgactgactaccttgaaggggttgagatagcaccaggtcaagttgttcttcttgaaaatgtacgttttaacctcggcgaaaagaaaaataatgctgaacttgcacaaaaatatgcagcactctgtgatgtattcgtgatggatgcatttggcactgcacatcgtgcagaagcatcaaccgaaggtgctgctcgttatgccaaagttgcagcggcaggcccattgcttgcgactgagctagatgcattaggtcgtgcacttcaaacccctgaaaagccaatggtggcgattgttgcaggttctaaagtttcaacaaaacttgatgttttaacctcactttctgacatttgcggtcaattgattgtgggtggtggaattgccaataccttcttggcagcagctggtttcaatgtaggcaaatcgctttgtgaaaatgatttgattgataccgctaaagcaattgccgctaaagtatctgttccacttcctacggatgtggtggtagctgatgccacagagattgactttgctgacttcttgggttcattagcaaaagcacaagcaattgtgaaaaaagtggaagatattgctgacaatgacatgattctggatgtgggtcctgacacggcgaaagcatttgctgagatcttaaaaacagctaaaacgatactttggaacggcccagttggtgtatttgaagtagatcagtttggtgaaggaaccaaaacgctttcattggcaattgctgaatctaaaggattttctattgcaggtggtggtgatactttggctgcaattgataaatataaagttgctgacaaaattggttatatctcaacaggtggcggcgcattccttgagtttgtagaaggaaaaaccttaccagccgttgctgtattactcgaacgtgcctaa

SEQ ID NO: 10539 - protein, 395 aa, Acinetobacter sp
MNFKRMTDLDLSEKRVLIREDLNVPVKNGQITSDARLRAALPTIQAALAQGAAVMVCSHLGRPVEGEPKPEQSLAPVAAYLSDALGQEVKLLTDYLEGVEIAPGQVVLLENVRFNLGEKKNNAELAQKYAALCDVFVMDAFGTAHRAEASTEGAARYAKVAAAGPLLATELDALGRALQTPEKPMVAIVAGSKVSTKLDVLTSLSDICGQLIVGGGIANTFLAAAGFNVGKSLCENDLIDTAKAIAAKVSVPLPTDVVVADATEIDFADFLGSLAKAQAIVKKVEDIADNDMILDVGPDTAKAFAEILKTAKTILWNGPVGVFEVDQFGEGTKTLSLAIAESKGFSIAGGGDTLAAIDKYKVADKIGYISTGGGAFLEFVEGKTLPAVAVLLERA

SEQ ID NO: 10540 - DNA, 1251 bp, Candida glabrata CBS138
  CDS (1)..(1251)
atgtctctatcctctaagctaactgttcaagaccttgaattgaaggacaagcgtgtcttcatcagagttgacttcaacgtcccattggatggtaagaagatcacttctaaccaaagaattgttgctgctttgccaaccatcaagtatgttttggagcacaacccacgttacgttgtcttggcctcccacttgggtagaccaaacggtgaaagaaacgagaaatactccttggctccagttgctgaagagctacaatccttgttgggtaagccagttactttcttgaacgactgtgtcggtagcgaagttgactccgctgtcaaggcttccgccccaggctccgttatcctattggaaaacttgagataccacatcgaagaagaaggttccagaaaggtcgacggccaaaaggtcaaggcctccgctgaagacgtcgccaagttcagaaaggagctgtgctctctagctgatgtttacatcaacgacgctttcggtaccgcccacagagctcactcctccatggtcggtttcgacttgccacaacgtgctgctggtttccttttgaccaaggaattgcaatacttcggtaaggctttggaaaacccaaccagaccattcttggctatcctaggtggtgctaaggtcgctgacaagatccaattgatcgacaacttgttggacaaggtcgactccatcatcatcggtggtggtatggctttcaccttcaagaaggttttggaaaacgctgaaatcggtgactccatcttcgacaaggctggtgctgaaatcgttccaaagttgatggaaaaggctaaggctaagggtgtcgaagtcgtcctaccagttgacttcgtcattgctgacgctttctccgctgacgctaacaccaagatcgtctccgacaaggaaggtatcccagccggctggcaaggtttggacaatggtccagagtccagaaagttgttcgctgcaactatcgctaaggctaagaccattgtctggaacggtcctccaggtgtcttcgaattcgagaagttcgcttccggtaccaaggctatgttggacgaagttgtcaagtcctccacttccggtaacaccgtcatcatcggtggtggtgacactgctaccgtcgctaagaagtacggtgtcactgacaagatctcccacgtttccactggtggtggtgcctccttggaattgttggaaggtaaggaattgccaggtgtcgctttcctatctgaaaagaactaa

SEQ ID NO: 10541 - protein, 416 aa, Candida glabrata CBS138
MSLSSKLTVQDLELKDKRVFIRVDFNVPLDGKKITSNQRIVAALPTIKYVLEHNPRYVVLASHLGRPNGERNEKYSLAPVAEELQSLLGKPVTFLNDCVGSEVDSAVKASAPGSVILLENLRYHIEEEGSRKVDGQKVKASAEDVAKFRKELCSLADVYINDAFGTAHRAHSSMVGFDLPQRAAGFLLTKELQYFGKALENPTRPFLAILGGAKVADKIQLIDNLLDKVDSIIIGGGMAFTFKKVLENAEIGDSIFDKAGAEIVPKLMEKAKAKGVEVVLPVDFVIADAFSADANTKIVSDKEGIPAGWQGLDNGPESRKLFAATIAKAKTIVWNGPPGVFEFEKFASGTKAMLDEVVKSSTSGNTVIIGGGDTATVAKKYGVTDKISHVSTGGGASLELLEGKELPGVAFLSEKN

SEQ ID NO: 10542 - DNA, 1194 bp, Bartonella quintana
  CDS (1)..(1194)
atgggttttcgtacacttgatgatgttgatgtcactgggaaacgtgttcttgtgcgggttgattttaatgtgccaatgtcgcaaggtaaggtatgcgatgaaacccgcctcaagcgacataaagaaacactccttgagcttcaaaaacgtggtgctaagcttattcttctctcccattgtggtcgccctaaaggacagggggagccagaattttcgctacgccccgttgtgcgagtgctggaaaaaataatcaaccaaccagttgcttttgcacccgattgtgtcggtgtcgcagcgcagacagcaattgaggcattgcaaaatggtggtcttttgctgcttgaaaatgttcgttttcatccaggtgaagaaaagaatgattgttcttttgctgaagctttagcccataatggggatctttatgtcaatgatgctttttcagtttctcatcgtgcccatgcttcggtggagggaataacacatttgttgccctcctatgcggggcgctctttacaatgtgaattgcaggcgttggaaaaaggacttgacaatccgaagcgtccagtggtcgcacttgttggaggtgcaaaagtttccagtaagctttttgtgctcaatcatttagttgaaaaagtcgattatttggtgattggcggtggcatggccaacagttttttagctgcgcaaggtgtccatattggtaagtcattgtgtgaacatgcactaatgcagacgataaaaaaagtcattgaaaaagcacaagagtaccaatgtacgcttctactccctgtggatgcagtggttgggtttcgctttgaaaaaggtgcaccgcatcgcctctatgatattggagatattcctgatgatggaatgattttggatattggtacccgctccattgcgcatatcaatgaagtgattgataaagccgctacccttgtgtggaatggcccccttggtgtttttgagatgtctccctttgatcaaggaacgattgcagttgcacgtcatgcagcagaatgcagcttgacagggaaatgtgtttcaattgctggagggggagatacggtttttgctcttaaccacgctggtgttgccaatgatttcacttatctttcaaccgcagggggagcctttttagaatggatggaaggcaaggtgcttcccggtatttttgctctcagacaagcttaa

SEQ ID NO: 10543 - protein, 397 aa, Bartonella quintana
MGFRTLDDVDVTGKRVLVRVDFNVPMSQGKVCDETRLKRHKETLLELQKRGAKLILLSHCGRPKGQGEPEFSLRPVVRVLEKIINQPVAFAPDCVGVAAQTAIEALQNGGLLLLENVRFHPGEEKNDCSFAEALAHNGDLYVNDAFSVSHRAHASVEGITHLLPSYAGRSLQCELQALEKGLDNPKRPVVALVGGAKVSSKLFVLNHLVEKVDYLVIGGGMANSFLAAQGVHIGKSLCEHALMQTIKKVIEKAQEYQCTLLLPVDAVVGFRFEKGAPHRLYDIGDIPDDGMILDIGTRSIAHINEVIDKAATLVWNGPLGVFEMSPFDQGTIAVARHAAECSLTGKCVSIAGGGDTVFALNHAGVANDFTYLSTAGGAFLEWMEGKVLPGIFALRQA

SEQ ID NO: 10544 - DNA, 1543 bp, Oryza sativa
  CDS (86)..(1294)
cacatcgcaatccaaaccttcgtcttcgtcttcctctcgccgctgattcgattcgatccgatccgatccaaggggaggggaagcaatggcgacgaagaggagcgtggggacgctgggggaggcggatctgagggggaagaaggtgttcgtgcgggccgacctcaacgtgccgctcgacgacgcccagaagatcaccgacgacacccgcatccgcgcgtccgtgcccactgtcaagttcctcctcgagaagggcgccaaggtcatcctcgccagccatctgggccgtccgaagggtgtcacccccaagtacagcttgaagcctcttgttccacgcttgtctgagctacttggagtcgatgttgtgatggccaatgattgcattggtgaggaagttgagaaattggctgctgctttgccggaaggtggtgttctactcctagagaatgttagattctacaaggaggaagaaaagaatgatcctgagtttgccaagaagcttgcagctgtcgctgacctctatgtaaatgatgcttttggcactgcacacagagctcatgcttcaactgagggagtgaccaaatttttgaagcctgctgttgctggcttcctgatgcagaaggaacttgactatcttgttggagctgttgcaaacccaaagaagccatttgcggccatcgttggtggatccaaggtctcaactaagattggggtgattgagtctctgttggcaaaggttgatgtcctcatccttggtggtggtatgatcttcacattctacaaagcccagggatatgctgttggaaaatctcttgtggaggaagacaaacttgagcttgcaacttcacttattgagaaggcgaaggcgaagggtgtttctctcttacttcctaccgatgttgtagtggctgacaagtttgccgcagatgctgaaagcaagactgttgctgcctccgctatccccgatggttggatgggtcttgatgttggcccagatgccatcaagacttccagcgaagcattggacacctgcaacactatcatttggaacggacctatgggagtctttgagtttgagaagtttgcagcaggcactgatgcaattgccaagaagttggctgatcttactaccacaaagggcgccacgaccatcatcggtggtggtgactccgttgctgcggtcgagaaggctgggctggccgacaagatgagccacatctccaccggcggtggtgctagcttggagttgctggaaggcaagaccctcccaggtgttcttgcccttgatgaagcgtaagctaattcggcttgtctccatcagcagtctgcacttttgtttcagacctctcggtgtaactttgcaatgtcaatgcttgtatgaagaacttgagataggcttatcgtcaagttttgctagatgagtcgtgaataagcttttcgacttcctcgctgccgcgagtgaagtggttcgaactgacatacatactctcatggatcgatattttgatatgcggttatcacatccctatgatggcatcatctgttg

SEQ ID NO: 10545 - protein, 402 aa, Oryza sativa
MATKRSVGTLGEADLRGKKVFVRADLNVPLDDAQKITDDTRIRASVPTVKFLLEKGAKVILASHLGRPKGVTPKYSLKPLVPRLSELLGVDVVMANDCIGEEVEKLAAALPEGGVLLLENVRFYKEEEKNDPEFAKKLAAVADLYVNDAFGTAHRAHASTEGVTKFLKPAVAGFLMQKELDYLVGAVANPKKPFAAIVGGSKVSTKIGVIESLLAKVDVLILGGGMIFTFYKAQGYAVGKSLVEEDKLELATSLIEKAKAKGVSLLLPTDVVVADKFAADAESKTVAASAIPDGWMGLDVGPDAIKTSSEALDTCNTIIWNGPMGVFEFEKFAAGTDAIAKKLADLTTTKGATTIIGGGDSVAAVEKAGLADKMSHISTGGGASLELLEGKTLPGVLALDEA

SEQ ID NO: 10546 - DNA, 1254 bp, Homo sapiens
  CDS (1)..(1254)
atgtcgctttctaacaagctgacgctggacaagctggacgttaaagggaagcgggtcgttatgagagtcgacttcaatgttcctatgaagaacaaccagataacaaacaaccagaggattaaggctgctgtcccaagcatcaaattctgcttggacaatggagccaagtcggtagtccttatgagccacctaggccggcctgatggtgtgcccatgcctgacaagtactccttagagccagttgctgtagaactcaaatctctgctgggcaaggatgttctgttcttgaaggactgtgtaggcccagaagtggagaaagcctgtgccaacccagctgctgggtctgtcatcctgctggagaacctccgctttcatgtggaggaagaagggaagggaaaagatgcttctgggaacaaggttaaagccgagccagccaaaatagaagctttccgagcttcactttccaagctaggggatgtctatgtcaatgatgcttttggcactgctcacagagcccacagctccatggtaggagtcaatctgccacagaaggctggtgggtttttgatgaagaaggagctgaactactttgcaaaggccttggagagcccagagcgacccttcctggccatcctgggcggagctaaagttgcagacaagatccagctcatcaataatatgctggacaaagtcaatgagatgattattggtggtggaatggcttttaccttccttaaggtgctcaacaacatggagattggcacttctctgtttgatgaggagggagccaagattgtcaaagacctaatgtccaaagctgagaagaatggtgtgaagattaccttgcctgttgactttgtcactgctgacaagtttgatgagaatgccaagactggccaagccactgtggcttctggcatacctgctggctggatgggcttggactgtggtcctgaaagcagcaagaagtatgctgaggctgtcactcgggctaagcagattgtgtggaatggtcctgtgggggtatttgaatgggaagcttttgcccggggaaccaaagctctcatggatgaggtggtgaaagccacttctaggggctgcatcaccaccataggtggtggagacactgccacttgctgtgccaaatggaacacggaggataaagtcagccatgtgagcactgggggtggtgccagtttggagctcctggaaggtaaagtccttcctggggtggatgctctcagcaatatttaa

SEQ ID NO: 10547 - protein, 417 aa, Homo sapiens
MSLSNKLTLDKLDVKGKRVVMRVDFNVPMKNNQITNNQRIKAAVPSIKFCLDNGAKSVVLMSHLGRPDGVPMPDKYSLEPVAVELKSLLGKDVLFLKDCVGPEVEKACANPAAGSVILLENLRFHVEEEGKGKDASGNKVKAEPAKIEAFRASLSKLGDVYVNDAFGTAHRAHSSMVGVNLPQKAGGFLMKKELNYFAKALESPERPFLAILGGAKVADKIQLINNMLDKVNEMIIGGGMAFTFLKVLNNMEIGTSLFDEEGAKIVKDLMSKAEKNGVKITLPVDFVTADKFDENAKTGQATVASGIPAGWMGLDCGPESSKKYAEAVTRAKQIVWNGPVGVFEWEAFARGTKALMDEVVKATSRGCITTIGGGDTATCCAKWNTEDKVSHVSTGGGASLELLEGKVLPGVDALSNI

SEQ ID NO: 10548 - DNA, 1536 bp, Mycoplasma mobile
  CDS (1)..(1536): transl_table=4
atgaaaaaaacactagatcaaattagtttaaaaaacaaaaaagttatcatcagagtagattttaatgttccaatcgtaaatggtattgttacatcaaataaaagaatagaagcagtaattcctacaattaaaaaagttgttaatgaaggtggtaaggccattcttatgtcacatttaggaagagtaaaatctgaagaagatcttaagaaaaaatctcttgcacctgttgtagaaatattagtaaatttattaggaatgcctatcacttttgtcccagctactaatggaacagaacttgaagaaacaattaatagcatgaaatcaggcgaaattgttatgatggaaaatactcgttttgaggatttaaataatgatgctgaatcatcaaacaatccagatttaggaatgtattgagcttctttaggagatgtttttattaatgatgcttttggaacagtgcatagaaaacatgcttcaaatgtcggaatttcaacatacattgctgaatcaggaattggatatttagttgaaaaagaaattaaaaatcttgacaaagctttatctaggccagaaagaccaattgttgctattttaggtggagcaaaagtttcagataaaattggagttttaaataatcttttaaaatacgttgataaaataattattggtggagctatggcttatacttttttagcggcacaaggaatcgggattgggaagtctttagtcgaggaagacaaaattgatttagcgagagaatatcttaaaaataatttagataaatttgttttacctattgattatgctttagcaaaagattttgaagatgtaaagccattttataatcttgaaaatactttagaaattccaaatggatatatgggattagacattggtcctaaatcaattgaagtatttaaaaaatatataaaagatgcaaaaacaattctttgaaatggacctttaggtgttactgaatttaaatactttaaagaaggaacaaaagctattgcaaaggcaatcacagaattaaaaggaaatgtttatactgttgtaggtggtggtgatagtgttgctattattgaagaacttggattagatagaagatttagtcacgtttcaacaggtggaggagcaacattagaatttctagaaggtaaagaattaccaggaattcaagcaattcaaaatgaaggtgagctaggacgtacaaaagaagaaattttttcaattctaactcagaattcagaagaagtattacatgaacacacagcagctttttctacaagtgaagttgagccagctaatgaagagtttccatcagaatataatgattcaaattcacaaacttatttttcaaatgaagttgaaaatgatgaagattttttgcttaatacaaacgattttccaacaagagaagcttcttttccaaatgaagttaaaacagaagaaattattttaaatgaaaatgatgatgaatttgatattgaagatgaagaattagattctttaccaaatgatgatattaaattttaa

SEQ ID NO: 10549 - protein, 511 aa, Mycoplasma mobile
MKKTLDQISLKNKKVIIRVDFNVPIVNGIVTSNKRIEAVIPTIKKVVNEGGKAILMSHLGRVKSEEDLKKKSLAPVVEILVNLLGMPITFVPATNGTELEETINSMKSGEIVMMENTRFEDLNNDAESSNNPDLGMYWASLGDVFINDAFGTVHRKHASNVGISTYIAESGIGYLVEKEIKNLDKALSRPERPIVAILGGAKVSDKIGVLNNLLKYVDKIIIGGAMAYTFLAAQGIGIGKSLVEEDKIDLAREYLKNNLDKFVLPIDYALAKDFEDVKPFYNLENTLEIPNGYMGLDIGPKSIEVFKKYIKDAKTILWNGPLGVTEFKYFKEGTKAIAKAITELKGNVYTVVGGGDSVAIIEELGLDRRFSHVSTGGGATLEFLEGKELPGIQAIQNEGELGRTKEEIFSILTQNSEEVLHEHTAAFSTSEVEPANEEFPSEYNDSNSQTYFSNEVENDEDFLLNTNDFPTREASFPNEVKTEEIILNENDDEFDIEDEELDSLPNDDIKF

SEQ ID NO: 10550 - DNA, 1245 bp, Picrophilus torridus
  CDS (1)..(1245)
atgaatggttcattctttacaatggacgatttcgatcttgatggtaaaagaatctatttaaggatagatataaattcccctgtaaaccctgaaaccggagaaattcttgatgattcacgcttcagggcatattcaaagaccataaatgagctgaaatcatcaaaggttgttatagtttcacaccagagccggcctggtaagaatgatttcacatcattaatgggtcatgccaggtacatgtcaaatataataaaaaaagagataaaatttattgattccctcttctcccatgatgccataaatgccatatcaaatatgtcagccggtgatataataatgcttgaaaattcaagattttacagcgaggagacattaaatgctgattttgaaactataaaaaacacacatatagtaagaaggctatcgccgctcttcgattattatgtaatcgatgcttttcctgcaatacacagggcccagacaacattaataggctttaagggctccggtccaaacatagctggaaggctgatggagcgtgagattacaatgcttgataaattcaaatttttcaggggctcgccaaaaattgcaattctggccggatcaaagatagaggattcaataaaggtctccagggcattcttaaaagataacatcgttgattacatattaaccggcggcgtggttgcaaatgcatttctttacgccggtggttttaacataggcagaaaaaacatggagtttataatcaagaataatgataattacgaatcattgattaacagtgcaacacagctcttacaaacatttcgcggcaggattttaatgcccgatgatttccttttgagtccatcgggcaggcatgtaacaataagcgaaagcataaacgatgatgagatcatagccgatataggctttaatactgttgataaatacagcaagataatatccagggcctccgcaatatttatgaatggcccaatgggaatctatgaaatacctgaatattcaataggaaccagggaaatatttaacattgttgccgagacccctgcactgaaaatagcgggtggcggccacacactgaatgcacttaatagcatgcatttaaccaaaaaactggattacacatcaacaggtggtggtgcattaataaattatttatcaggtgattcaattccagttatagatgctttaatagaaaataaaaggttatttgggggcaaatacaatggcaggtaa

SEQ ID NO: 10551 - protein, 414 aa, Picrophilus torridus
MNGSFFTMDDFDLDGKRIYLRIDINSPVNPETGEILDDSRFRAYSKTINELKSSKVVIVSHQSRPGKNDFTSLMGHARYMSNIIKKEIKFIDSLFSHDAINAISNMSAGDIIMLENSRFYSEETLNADFETIKNTHIVRRLSPLFDYYVIDAFPAIHRAQTTLIGFKGSGPNIAGRLMEREITMLDKFKFFRGSPKIAILAGSKIEDSIKVSRAFLKDNIVDYILTGGVVANAFLYAGGFNIGRKNMEFIIKNNDNYESLINSATQLLQTFRGRILMPDDFLLSPSGRHVTISESINDDEIIADIGFNTVDKYSKIISRASAIFMNGPMGIYEIPEYSIGTREIFNIVAETPALKIAGGGHTLNALNSMHLTKKLDYTSTGGGALINYLSGDSIPVIDALIENKRLFGGKYNGR

SEQ ID NO: 10552 - DNA, 1209 bp, Parachlamydia sp
  CDS (1)..(1209)
atgagggtgaaggataaattatcgattcgcgatttaaatttgaaagacaagaaagccttaattcgtgtcgattttaacgtccctttagaaaaaggtttgattacagatgatagtcgtattcaagcctctcttcccacaattcaatatgttttagatcaagaaggagccgttattttgatgagccatctcggtcgtcctaaaggtttgtttgattctaaattttcgttggctccttgtgctaaacgtttatcagaattattaaataagcctgtaaaaatggctgcagattgttgtggattagacgttgaacagatggttcgtcagctaaaatcaggagaagttttattgcttgaaaatttacgttttcacaaaggcgaagaaaggcctgatgatgaacctaattttacaagtgctttgtcagagttgggagatgtttatatcaatgatgcttttggaactgctcatcgtgctcatgcttcgacaacaaaaattgcaaaattttttcccaatcgtgcagcagcgggtttgttacttgaaaaggaaatttcttatctaggttgtgctttaacgaatcctaaacgtcctttttgtgcagtgttaggaggtgcaaaaatttccacaaagtttaaagtcatcgaagctttacagtctaaagcagatgttttattaatagggggagcgatggctttcacttttttcaaatctgaaggaatacctattggggattcgctttacgaaagcgaattcgttgctgtcgctcgtgaattgttaggtgttgagacacagtctcgctgccgccttttactacccatagacttggtcattgctaaaaaaatggatgaatccttcactgaaacgagaattatttcagttaaagaaggaattcctgatgggtatcaaggggtagatattgggccagacactattaaactttatcaagaagaattgaacagagcagctacgattttttggaacggccctttaggagtatttgaagttcctgctttttctaaagggactcaaactattgctcaaactcttgctgttgtcaacgcgattactattgttgggggaggggattccttagctgctatagaacaagctggggtttctaaacaaataaaccatctttcaactggagggggtgcctctttagaatatatagaatttgggcaattacctgggattgaagctctatcagataaataa

SEQ ID NO: 10553 - protein, 402 aa, Parachlamydia sp
MRVKDKLSIRDLNLKDKKALIRVDFNVPLEKGLITDDSRIQASLPTIQYVLDQEGAVILMSHLGRPKGLFDSKFSLAPCAKRLSELLNKPVKMAADCCGLDVEQMVRQLKSGEVLLLENLRFHKGEERPDDEPNFTSALSELGDVYINDAFGTAHRAHASTTKIAKFFPNRAAAGLLLEKEISYLGCALTNPKRPFCAVLGGAKISTKFKVIEALQSKADVLLIGGAMAFTFFKSEGIPIGDSLYESEFVAVARELLGVETQSRCRLLLPIDLVIAKKMDESFTETRIISVKEGIPDGYQGVDIGPDTIKLYQEELNRAATIFWNGPLGVFEVPAFSKGTQTIAQTLAVVNAITIVGGGDSLAAIEQAGVSKQINHLSTGGGASLEYIEFGQLPGIEALSDK

SEQ ID NO: 10554 - DNA, 1906 bp, Rattus norvegicus
  CDS (86)..(1339)
gggggcacgcttcaaaagcgcacgtctgctgcagtgttctcctcttcctctcctccgggcctctcgacctcacggtgttgccaaaatgtcgctttctaacaagctgactttggacaagctggacgtgaaggggaagcgggtcgtgatgagggtggacttcaatgttcctatgaagaacaaccagataacgaataaccaaaggatcaaggctgctgtcccaagcatcaaattctgcttggacaatggagccaagtcggttgtgcttatgagccacctgggccgtcctgatggtgtgcccatgcccgacaagtactccttagagccagttgctgcagaactcaaatctctgctgggcaaggatgttctgttcttgaaggattgtgtgggctcagaagtagagaatgcctgtgccaacccagcggctgggactgtcatcctcctggagaacctccgctttcatgtagaggaagaagggaagggaaaagatgcttctgggaacaaggttaaagctgagccagctaaaattgatgctttccgagcctccctgtccaaacttggagatgtctatgtcaatgatgcttttgggactgcacacagagcccacagttccatggtgggtgtgaatctgccacagaaggctggtggatttttgatgaagaaggagctgaactactttgccaaggctttggagagtccagagcgacccttcctggctatcttgggaggagctaaagttgcagacaagatccagctgatcaataatatgctagacaaagtcaatgagatgatcatcggtgggggaatggcttttaccttccttaaggtgctcaacaacatggagattggcacatctctgtatgatgaagagggagccaagattgtcaaagatctcatggccaaagctgagaaaaatggtgtgaagattaccttgcctgttgactttgtcactgctgacaaatttgatgagaatgcaaagactggccaagctactgtggcctctggtatacctgctggctggatgggcttggactgtggtactgagagcagtaagaaatatgctgaggctgtggctcgagctaagcagattgtttggaacggtcctgttggggtatttgaatgggaagcctttgccaggggaaccaagtccctcatggatgaggtggtgaaagccacgtctaggggctgcatcactatcataggaggcggagacaccgccacttgctgtgccaaatggaacacagaggataaagtcagccatgtgagcactgggggcggcgccagtctagagctcctggaaggtaaagtccttcctggggtggatgctctcagcaatgtttagtattttcctgcctttggttcctgtgcacagcccctaagtcgacctagtgttttccgcatctccatttggtgttagtgcagctagtggccaagacgcagcaccaggaaccctaagcagctgcacagcatctcagctcgtctttactgcatcgggattcatctactacgttcaagatcccatttaaattccttagtgactaaaaccattgtgcattgtagagggcatctatttatactctgcctgtgaaaggaagtgagctgtaaaagcttagctctcttcgctgtatgtagcctctggttagctttgtcactgttcatgacagcatggaaataacggtgagattccagctgtaggtttggagttgatctattgaacaataaagatgcccactgaaactgaaaaaaaaaaaaaaaaaaaaaaaaaaaaaaaaaaaaaaaaaaaaaaaaaaaaaaaaaaaaaaaaaaaaaaaaaaaaaaaaaaaaaaaaaaaaaaaaaaaaaaaaaaaaaaaaaaaaaaaaaaaaaaaaaaaaaaaaaaccaaaaaaaaaaaaaaaaaaaaaaaaaaaaa

SEQ ID NO: 10555 - protein, 417 aa, Rattus norvegicus
MSLSNKLTLDKLDVKGKRVVMRVDFNVPMKNNQITNNQRIKAAVPSIKFCLDNGAKSVVLMSHLGRPDGVPMPDKYSLEPVAAELKSLLGKDVLFLKDCVGSEVENACANPAAGTVILLENLRFHVEEEGKGKDASGNKVKAEPAKIDAFRASLSKLGDVYVNDAFGTAHRAHSSMVGVNLPQKAGGFLMKKELNYFAKALESPERPFLAILGGAKVADKIQLINNMLDKVNEMIIGGGMAFTFLKVLNNMEIGTSLYDEEGAKIVKDLMAKAEKNGVKITLPVDFVTADKFDENAKTGQATVASGIPAGWMGLDCGTESSKKYAEAVARAKQIVWNGPVGVFEWEAFARGTKSLMDEVVKATSRGCITIIGGGDTATCCAKWNTEDKVSHVSTGGGASLELLEGKVLPGVDALSNV

SEQ ID NO: 10556 - DNA, 1613 bp, Mus musculus
  CDS (66)..(1319)
gttaaaaatcaccaccaagccagcctcccagcagcagtaaagaggctgttgtgcataccatcaagatggctctttctgctaagttgactctggacaaagtggatcttaagggaaaaagagtaatcatgagagtagacttcaacgttcccatgaagaataaccaaattacaaacaaccagagaatcaaggctgccatcccaagtatcaagcactgtctggacaatggagccaagtccgtagttctcatgagtcacctcggtcggcctgatggtatccctatgccagacaagtattcattagagcctgttgctgatgagctcaagtccctgctgaacaaggacgtcatattcttgaaggactgtgtgggccctgaagtagagcaagcctgtgccaacccagataatgggtctatcatcctgctggagaacctgcgcttccatgtggaggaagaaggtaagggtaaagattcttctggaaaaaagattagtgctgaccctgctaaagtagaagccttccaagcatcactgtctaaacttggcgatgtctatgtcaacgatgcatttggcactgcacatcgggctcacagttctacggtcggagtaaatttgccccagaaggcatctggtttccttatgaagaaggaactggattatttttccaaggctttagaaaagccagagaggcccttcctggctatccttggtggagccaaagtgaaagacaagatccaactcattaaaaatatgttagacaaagtcaatttcatgattattggtggtggaatggcttacaccttcctgaaagaactcaagaacatgcagattggtgcttccttgtttgatgaagagggagccacgattgttaaagagatcatggaaaaagcagaaaagaatggtgtaaagatagtttttcctgttgactttgttactggtgacaagtttgatgagaatgctaaagttggacaagccactatagaatctggtataccatctggttggatgggcttggactgtggccctgagagcattaaaatcaatgctcaaattgtggcccaagcaaagctgatagtttggaatggacctattggggtatttgaatgggatgcctttgctaaaggaaccaaagctctcatggatgaagttgtaaaggccacctccaatggctgtgtcaccattataggaggcggagatactgctacttgctgcgccaaatggggcactgaagacaaggtcagccatgtgagcacaggaggtggggcaagtcttgagcttctggaaggtaaaatccttccaggggtagaggccctcagcaacatgtaattgtcataatgtacttgcttcctgtttcctgcgcacaggaccagaaccaactcaacctaacctatatctcaacatttgttaacctctactatgaatcaagacccaggtaatgagctagcagtgagccatcaatatcacatcagcaagtcttaattctgtcacacatttgttagtctcttcaagatctcatcaggatttcccacagtccttcctagggaggaaacattctcatgtcaactattaaagaagtgagctaagtaagttaaaaaaaaaaaaaaaaaaaaaaaaaaaaaa

SEQ ID NO: 10557 - protein, 417 aa, Mus musculus
MALSAKLTLDKVDLKGKRVIMRVDFNVPMKNNQITNNQRIKAAIPSIKHCLDNGAKSVVLMSHLGRPDGIPMPDKYSLEPVADELKSLLNKDVIFLKDCVGPEVEQACANPDNGSIILLENLRFHVEEEGKGKDSSGKKISADPAKVEAFQASLSKLGDVYVNDAFGTAHRAHSSTVGVNLPQKASGFLMKKELDYFSKALEKPERPFLAILGGAKVKDKIQLIKNMLDKVNFMIIGGGMAYTFLKELKNMQIGASLFDEEGATIVKEIMEKAEKNGVKIVFPVDFVTGDKFDENAKVGQATIESGIPSGWMGLDCGPESIKINAQIVAQAKLIVWNGPIGVFEWDAFAKGTKALMDEVVKATSNGCVTIIGGGDTATCCAKWGTEDKVSHVSTGGGASLELLEGKILPGVEALSNM

SEQ ID NO: 10558 - DNA, 1665 bp, Sus scrofa
  CDS (124)..(1377)
aagataggggcgggccaagaggaagggcgttaggaaacgccatccgcgcaacatcgcagcagcagtgaagtggttccctgcaacatcgggatctaagtgttagcctgtcttcgtattgtcaaaatgtctctttctaagaagttaactttggacaaactggacgtgaaagggaaacgagtcatcatgagagtagacttcaatgttcccatgaagaggaaccaagttacaaacaaccaaagaatcaaggcttccctcccaagcatcagatactgcctagataacggagccaggtcagtagttctcatgagtcatttaggtagacctgatggtgttgcgatgcctgataaatactccttagagccggtggctgctgaactcaaatccttgctggggaaagacgttctgttcctaaaagactgtgtgggctcagaagcagagcaagcttgtgccaacccacctgcgggttcagtcatcctactggagaaccttcgctttcatgtggaagaggaagggaagggccaagatccttctgggaataagctgaaagctgagccagataaagtagaagccttccgcgcatcgctctccaagctgggggatgtgtatgtcaatgatgcttttggcacggctcaccgggctcacagttccatggtgggagtgaatctgccgcagaaggcatctggattcctgatgaaaaaggagctggattactttgccaaagccttggaaaacccagagagaccctttctggctatccttggtggagctaaagtggcagacaagatccaactcatcaaaaatatgctggacaaagtcaatgagatgattattggtggcggaatggcctttaccttccttaaggtactcaacaacatggagattggtgcctccctgttcgacaaagagggagccacgattgtcaaagagatcatggccaaagctgaaaagaatagggtgaacattacctttcctgttgactttgtcattgctgacaagtttgaggaaaatgctaaggttggccaggccacggtagcgtcaggtatacctgccggctgggtggctttggactgtggtcctgagaccaacaagaagtatgcacaagttgtggcccgagccaagctaattgtgtggaatggacctttaggggtctttgaatgggatgcctttgctaatggaacgaaagccctcatggatgaaattgtgaaagccacctccaagggctgtatcactattataggaggtggagacacggccacttgctgtgccaaatggaacactgaagataaagtcagtcatgtgagcactggaggaggtgccagtctagagcttctggaaggtaaagtccttcctggagtggaggctctcagcaatctgtagttgatagtgttccttcctactgttttctgtgcacagcctttaagtcaacttagtgcttttacatctcaacttgacttttgttaaaatctacccctccatcaagactcaggcaaagaccaaggaatgggccatcaggaactcttaacatcagcttaacagtacaactcatttttgttctgtgatgcatttgcctactgtcttaaagatctcatttgaacttcactgttgtaattcatagaaagtgagctgcctattaaagtgaattgaataagctgaaaaaaaaaaaaa

SEQ ID NO: 10559 - protein, 417 aa, Sus scrofa
MSLSKKLTLDKLDVKGKRVIMRVDFNVPMKRNQVTNNQRIKASLPSIRYCLDNGARSVVLMSHLGRPDGVAMPDKYSLEPVAAELKSLLGKDVLFLKDCVGSEAEQACANPPAGSVILLENLRFHVEEEGKGQDPSGNKLKAEPDKVEAFRASLSKLGDVYVNDAFGTAHRAHSSMVGVNLPQKASGFLMKKELDYFAKALENPERPFLAILGGAKVADKIQLIKNMLDKVNEMIIGGGMAFTFLKVLNNMEIGASLFDKEGATIVKEIMAKAEKNRVNITFPVDFVIADKFEENAKVGQATVASGIPAGWVALDCGPETNKKYAQVVARAKLIVWNGPLGVFEWDAFANGTKALMDEIVKATSKGCITIIGGGDTATCCAKWNTEDKVSHVSTGGGASLELLEGKVLPGVEALSNL

SEQ ID NO: 10560 - DNA, 1221 bp, uncultured bacterium 106
  CDS (1)..(1221)
atggataaaatgggtatgaccgaaaaaaattttattgaagatttaaatcttaatggattgcgtgtcttgacacgtgttgattttaatgtacccctcaacaaagatttgcaaattactgacaatgggagaattgaggccgctttgacgaccattcggtacatcgttgaacaaagaggaaaagcgatcttgatgtcgcacttgggccgtccgggtggagagcgggtcgagagcctgagcctaaaaccggccgcggaagagttgtcactgttgctcgggcagcctgtaacctttgctaaagattgtattggtgaagaggttgaggctctgattgaagggatgcaaaacggagaagtacttttgctggaaaatttgcgttttcataaagcagaaacgaaaaatgagcctgagttttgcggagcattgggcaaactgggagatgtttatgttaatgatgcttttggaacggcacatcgggcccatgcttctactgccggagttacaggatttattccggaatccgccgtcggatatttgattcgtaaagaactgcagtttcttggtggagcagttatgaatcctgcaagaccttttactgcaattttaggaggcgctaaagtatccgataaaattaaagttatcgacaaattgttaaacaaagttcaaactttaataatcggaggaggaatgtcatgcacttttttgaaagctcaaggttacaaaattggcgcttccctgttggaagaagactccttggatttcgcaaaagaactgatacagaaggcacaggagaaaggtgttgaactcctgttgcccgtggatgcggtaattgcagacagttttgacaaaagtgcttcaacccgaagcgtttctgtagaagagggtgcttcggatggttggcttattttggacattggtccaaaaagtgctgaaatattttgcgactccgtacgtaaatcaggaactgttctttggaatggccctatgggggtttttgagatggaaccctttgctctgggaacattcgcaattgcacaatgtcttgcggaagtgactgacaaaggtgttgtgacaattattggaggcggagattccgcggcagcgatacaacaatttggactcagtgaacggatcactcatgtctcaaccggaggtggtgcgtcacttgaatttttggaaggcaaagaacttccgggagtgaccgcaattcagcaatctaaataa

SEQ ID NO: 10561 - protein, 406 aa, uncultured bacterium 106
MDKMGMTEKNFIEDLNLNGLRVLTRVDFNVPLNKDLQITDNGRIEAALTTIRYIVEQRGKAILMSHLGRPGGERVESLSLKPAAEELSLLLGQPVTFAKDCIGEEVEALIEGMQNGEVLLLENLRFHKAETKNEPEFCGALGKLGDVYVNDAFGTAHRAHASTAGVTGFIPESAVGYLIRKELQFLGGAVMNPARPFTAILGGAKVSDKIKVIDKLLNKVQTLIIGGGMSCTFLKAQGYKIGASLLEEDSLDFAKELIQKAQEKGVELLLPVDAVIADSFDKSASTRSVSVEEGASDGWLILDIGPKSAEIFCDSVRKSGTVLWNGPMGVFEMEPFALGTFAIAQCLAEVTDKGVVTIIGGGDSAAAIQQFGLSERITHVSTGGGASLEFLEGKELPGVTAIQQSK

SEQ ID NO: 10562 - DNA, 1965 bp, Geobacter sulfurreducens
  CDS (1)..(1965)
atggcaatccgctatattgacgaaatatccgaactcaaagacaaaaaggtcttcatcagggtcgacttcaacgttcccttggatgaacatcagaacatcactgaagacacgcgcatcagggcggtcctccctacgatcaactttgccctcgatgccggcgcgaaagtggttctcgcctctcacctgggacgcccaaagggagagcgcaagcccaagtattccatggccccggcggcaaagcgtctctcgcggcttctgggcaaagaggtactcttggcgcccgactgcatcggcagcgaagtacggcagatgatcgatgccatgaaatccggcgacatcatcatgctggaaaacgtgcgcttttatgaaggtgaggagaaaaatgacgaaaactttgcccgagaactggccaacggctgtgagatctacgtaaacgatgcctttgccgtctcacaccgggctcatgcgtcggttgaagcgataacaaagttctttccggtagttgcggccggatttctcatgaagaacgagatgaattatttcgaaaaggcgatgcaaaagccgattcgccccctggtcgctatcttgggcggggccaaagtctcgggcaaactggaagttctcgaaagccttctcaacaaggtggacaaaatcatcatcggcggcggcatggcattcacctttctgaaggccctcggctacaacgtgggcaagtcgctggtggaggaagacctgatcgaaacggcccgctcaacctacgccaaagcccgtgaaaagggaatcaagttctatctccccgttgattgcgtggctgccgatcgattcaaccccgaggccgagaccaaggtaaccaccattcaggaaatccccgaagagtggatggctctcgatatcggtcctgccacggttgccctcttcaccgaggcactccagagcgccaagaccatcatctggaacggtcccatgggggttttcgagatggatgccttctcccgcggcacctttgccatggtgactgccgtggccaactcctacgcccttaccatcgtcggcggcggcgacaccgactctgcggtccaccgcgccggcgaatatgccaagatcagctacatctccaccggcggcggcgctttccttgagctcctcgaaggcaagaaacttccccggcatcaaggtgctggaagaaaacggaaaataggaggagcggccatgagaacacctgtgattgcaggaaactggaagctgttcaaaaaacgcgccgaggcccgtgagctggtcaatggacttgtttccctggtgaaggacgtccagggggtcgaaatcgtcgtagctccggtcttcaccgtactggccgccgtaaagggcgccctggacggctcagccatcaagctcgctggccaggactgcttctgggaagaggaaggggcttacaccggcgagatttccccgggcatgctcgtggatgccggatgcagccacgtcattatcggccattcggagcgccgtcagtatttcggcgaaactgatgaaaccgtgaatcgtaagatcaaggccgccctcaaagcaggactcgcggccattgcctgcatcggagaatccctggcagagcgcgaagcaggcacgacgttcgacgtgctgcggacgcagctgaacggcggactggccgggctatccgccgacgacctcaaagacgtcatcatcgcctatgagccggtatgggccataggcaccggaaaaaccgccacggacgcccaagcccaggaggctcacgccttcatcagaggggtggtgtccgaacttctcggcaaaccggcagcagaggcggttcgcatcctttacgggggcagcgtaaagccagagaacatcaaggggctcatgacccaacccgatatcgacggcgccctggtgggaggagccagcctcaaggcggactcttttgcggcgattgcctcgttcagcatgtaa

SEQ ID NO: 10563 - protein, 654 aa, Geobacter sulfurreducens
MAIRYIDEISELKDKKVFIRVDFNVPLDEHQNITEDTRIRAVLPTINFALDAGAKVVLASHLGRPKGERKPKYSMAPAAKRLSRLLGKEVLLAPDCIGSEVRQMIDAMKSGDIIMLENVRFYEGEEKNDENFARELANGCEIYVNDAFAVSHRAHASVEAITKFFPVVAAGFLMKNEMNYFEKAMQKPIRPLVAILGGAKVSGKLEVLESLLNKVDKIIIGGGMAFTFLKALGYNVGKSLVEEDLIETARSTYAKAREKGIKFYLPVDCVAADRFNPEAETKVTTIQEIPEEWMALDIGPATVALFTEALQSAKTIIWNGPMGVFEMDAFSRGTFAMVTAVANSYALTIVGGGDTDSAVHRAGEYAKISYISTGGGAFLELLEGKKLPRHQGAGRKRKIGGAAMRTPVIAGNWKLFKKRAEARELVNGLVSLVKDVQGVEIVVAPVFTVLAAVKGALDGSAIKLAGQDCFWEEEGAYTGEISPGMLVDAGCSHVIIGHSERRQYFGETDETVNRKIKAALKAGLAAIACIGESLAEREAGTTFDVLRTQLNGGLAGLSADDLKDVIIAYEPVWAIGTGKTATDAQAQEAHAFIRGVVSELLGKPAAEAVRILYGGSVKPENIKGLMTQPDIDGALVGGASLKADSFAAIASFSM

SEQ ID NO: 10564 - DNA, 1344 bp, Ashbya gossypii
  CDS (1)..(1344)
atgggccggtcgtggggtctgctctggatggcgtgcttgctgtacggcgtgttcacagagtgtcgcagatcttcacagcacgcacacacaggaaaaatgtcgctatcctctaagctaacagtcaaggacctgagccttgcgggcaaacgcgtgttcatccgcgtggacttcaacgtgccgctagacgggaagacgatcacgtcgaaccagcgcattgtggccgcgctacccacgatcaagtacgtgttggagcagggccccaaggcggtggtgttggcgtcgcacctagggcggcccaacggcgagcgcaacgagaagtactcgttggcgccggtggccgcggagctggagaagctgctgggccagaaggtgaactcctggacactgcgtgggcagcacgtgaccgctgcggtcaacggcgcggctgcggggtccgtgttcctgcttgagaacctgcggttccacatcgaggaggagggctcgcgcaaggtggacggcgagaaggtcaaggcgtctgcggaggacgtgcagaagttccgccagggcctcatgtcgctcgcggacgtctacgtcaacgacgccttcggcaccgcgcacagagcgcactcctcgatggtcggcttcgagctgcctgagagggccggcggcttcttgttgtcgcgcgagctggagtacttcagcaaggcgttggagaaccctacgagacccttcttggcgatcctgggcggtgccaaggttgccgacaagatccagttgatcgacaacttgttggacaaggtcgactcgattgtgatcggcggtggcatggccttcaccttcaagaaggtgcttgagaacatggagatcggtaactccatctacgacaaggcgggtgccgagatcgttcctaagctagcggagaaggccaagaagaacggcgtcaagatcgtgttgcctgtggacttcgtgatcggcgacgacttctcccaggacgccaacaccaagattgtctctgcctccgagggcattccatccggctgggagggtctagactgtggtcctgagtccagaaagctgttcagcgagaccatcgcgagcgcgaagaccatcgtgtggaacggcccaccaggtgtctttgagattccaaagttctccgagggtacccaggccatgcttgcggccgctgtcaaggcctccgaggctggcagcaccgtcatcatcggcggtggtgacaccgctaccgtggccaagaagtacggtgtggtcgagaagatctcccatgtgtccaccggtggtggtgcctccctagagctattggagggtaaggacctaccaggtgtcaccttcttgtccagcaagcagtag

SEQ ID NO: 10565 - protein, 447 aa, Ashbya gossypii
MGRSWGLLWMACLLYGVFTECRRSSQHAHTGKMSLSSKLTVKDLSLAGKRVFIRVDFNVPLDGKTITSNQRIVAALPTIKYVLEQGPKAVVLASHLGRPNGERNEKYSLAPVAAELEKLLGQKVNSWTLRGQHVTAAVNGAAAGSVFLLENLRFHIEEEGSRKVDGEKVKASAEDVQKFRQGLMSLADVYVNDAFGTAHRAHSSMVGFELPERAGGFLLSRELEYFSKALENPTRPFLAILGGAKVADKIQLIDNLLDKVDSIVIGGGMAFTFKKVLENMEIGNSIYDKAGAEIVPKLAEKAKKNGVKIVLPVDFVIGDDFSQDANTKIVSASEGIPSGWEGLDCGPESRKLFSETIASAKTIVWNGPPGVFEIPKFSEGTQAMLAAAVKASEAGSTVIIGGGDTATVAKKYGVVEKISHVSTGGGASLELLEGKDLPGVTFLSSKQ

SEQ ID NO: 10566 - DNA, 1230 bp, Giardia lamblia ATCC 50803
  CDS (1)..(1230)
atgtccttagcgaagctctccattgccgacgtagatctctctggaaagcgtgttttcgtgcgcacggattacaatgtcccccaggacaaggagggtaacatcaccaatttggcgagaatcgaggcttctttgccgaccttgaggcactgtcttgagaagggctgtaagtcccttgtcttggcctcccatcttggccgcccaaagggcaccggaccagaagcggcattcactctggctccagtcgccaaggctctcgaaagccttctgggaaagcctgtcacccttcttaaggattgctgtggacccgaggttgagagtgcctgtgccaaccctgcgcctggttccattttcctcttggagaatctgcgctttcataaggaggagaccaacgagaatgaggacaattctgaagtaaaggctttcagagcgtctctcgcgaagctcgctgacatctactgtaatgatgcattcggaaccgcgcaccgccctcactcttctatggtcggagaagggtattcgatccgttgcgctggcttcctgatgcagaaggagatcgactacttccgtatcgccctttctgagcccaagaagccatacttggctattcttggaggcgctaaggtagcagacaaaatcaagctcatcaagaacctacttccgaaggtcgacaagattatcatctgcggtggcatgtcgtttaccttcctcaagaagctcaaggggatgaacatcgcgaactcgctttacgacaaagagggtgcagagactgttgacacattgatggacatcgccaaggctcacaatgtggaagtgattcttcctgtcgattgcatcgcggcctcggagtttgacgacaacgccaagacgaaggttgttacatgcgaggagggtattcctgaaggttggatgggccttgattgtggccctgcctccaacgagctctttgcgaaggccatcatgtcttcaaagacagtcatctggaatggtccaccgggcgtctttgagatgaacagcttctgccgtggaaccatggccatggtagatgcagtggttaaggctactgaggcaggcgccatcaccattatcggtggcggagactctgcaactgcagccaaaaaggccaaagcaacgaacaagatctcccacgttagtaccggaggtggcgcgtctctcgagcttcttcagggcgacccgcttcctggagtcatcagactgtctgacaagaagtag

SEQ ID NO: 10567 - protein, 409 aa, Giardia lamblia ATCC 50803
MSLAKLSIADVDLSGKRVFVRTDYNVPQDKEGNITNLARIEASLPTLRHCLEKGCKSLVLASHLGRPKGTGPEAAFTLAPVAKALESLLGKPVTLLKDCCGPEVESACANPAPGSIFLLENLRFHKEETNENEDNSEVKAFRASLAKLADIYCNDAFGTAHRPHSSMVGEGYSIRCAGFLMQKEIDYFRIALSEPKKPYLAILGGAKVADKIKLIKNLLPKVDKIIICGGMSFTFLKKLKGMNIANSLYDKEGAETVDTLMDIAKAHNVEVILPVDCIAASEFDDNAKTKVVTCEEGIPEGWMGLDCGPASNELFAKAIMSSKTVIWNGPPGVFEMNSFCRGTMAMVDAVVKATEAGAITIIGGGDSATAAKKAKATNKISHVSTGGGASLELLQGDPLPGVIRLSDKK

SEQ ID NO: 10568 - DNA, 1251 bp, Plasmodium yoelii yoelii
  CDS (1)..(1251)
atgttaggaaacaaacttacaatatctgatatccccagtgtcaaaaacaaaaaggttttagtaagagcagattataatgtacctattgaaaatggggaagtaaaagataacacaagaattgttgcaacattaccaactattaattatttaaaaaaagaaggtgcttcaaaaataattttaatttcacattgtggtagaccagatggaatcaaaaatttaaaatatacattaaagccagtagctgatgttttatcaaaattattaggagagaatgtattatttttaaatgattgtgttggagatgatatagaaaaagaaataaataatgctaaagaacaatctattattttattagaaaacttaagatttcatattgaagaagaaggtaagggtgttgatgctgcagggaataaaataaaagcaaataaagaagatgttgaaaaatttcaaaatcaacttacaaaattaggagatgtatttattaatgatgcatttggaacagcacatcgtgcacatagtagtatggttggaatcaaattaaatgttaaagcatctggatttttaatgaaaaaagaattagaatattttagtaaagctttagaaaacccacaaagacctgtattagctattttaggtggtgcaaaagtatcagataaaattcaattaatcaaaaatttattagataaagttgatagaatgattattggtggtggtatggcatatacttttaaacgtgttttaaaaaatatggaaattggagattctttgtttgatgaggcaggaagtaaaattgtaaatgaaattatggagaaagcaaaaagtaaaaatgtacaaatttgtttaccaatagattttaaaattgctgataaatttgataataatgcaaatacaaaatttgtaacagatgaagaaggaatacctgataaatggatgggattagatgctggacctaaaagtattgaaagttataaagatgttattttaggctctaaaactattatatggaatggtccacaaggtgtttttgaaatggaaaattttgctaaaggaagtatacaatgtcttgaattagttattcaagcaacacaaaatggagctattacaattgtaggaggaggcgatacagcttctttagtagaacaacaaaaaaagaaagatcaaattagccacgtttcaactggtggtggagcatctctcgaattattagaaggaaaggagttacctggtgttgtagctttatcaaacaaataa

SEQ ID NO: 10569 - protein, 416 aa, Plasmodium yoelii yoelii
MLGNKLTISDIPSVKNKKVLVRADYNVPIENGEVKDNTRIVATLPTINYLKKEGASKIILISHCGRPDGIKNLKYTLKPVADVLSKLLGENVLFLNDCVGDDIEKEINNAKEQSIILLENLRFHIEEEGKGVDAAGNKIKANKEDVEKFQNQLTKLGDVFINDAFGTAHRAHSSMVGIKLNVKASGFLMKKELEYFSKALENPQRPVLAILGGAKVSDKIQLIKNLLDKVDRMIIGGGMAYTFKRVLKNMEIGDSLFDEAGSKIVNEIMEKAKSKNVQICLPIDFKIADKFDNNANTKFVTDEEGIPDKWMGLDAGPKSIESYKDVILGSKTIIWNGPQGVFEMENFAKGSIQCLELVIQATQNGAITIVGGGDTASLVEQQKKKDQISHVSTGGGASLELLEGKELPGVVALSNK

SEQ ID NO: 10570 - DNA, 1188 bp, Fritschea bemisiae
  CDS (1)..(1188)
atggataaactctctttgagagatttgaagctcaaccaaaaaagggtgctgatgcgggtcgattttaatgttcccttaaatgcagatggttcgattcgagatgcgacgcggatcattttaacccttccttcaattgaatatattttaaggcaaaaggggcgtttggttttaatcagccatttgggtcgacctaaggggtcttttgactcaaaggtttcattaaggccttgcgcgcaaaaattgggtgagcttctcgggaaagaggtcggattttgcttcgattgtattggagctgaagttcaaaaaagggttcaaaacttaaaccctggggaggttcttcttttagaaaaccttcggtttcacaaaggagaagagtctcctgaaaaagatccagggtttgcacaatctcttgctgagctcggggatgtttacattaatgacgcttttggagccgcccatcgctcgcacgcttcaatcgttccgattgcgcaattttttccagcaaattgtggggtaggatttttaatggaaaaagaaattgctgcattttcaaaaatatatttaaatccaaaccgtccgttctatgcaatggttggaggggccaaaattgggaataaaatagatattttacaggccctttctaaaagagtcgatggattgtttattggagggggaatggcttttaccttttttaaggcaaaagggcttgcaattggagagtccatttgcgatgaaagccggttaaaatttgctcgtgactttttgaaagagtgtgaaaggaaagggattcggctccaccttcccatagatgttgtggtgacaaatgggaaaaagattcaaacagttcaaataaaaggcggtgttcccgataaatgggaggggaaagatattgggcctcaaacagttgagctgtggtcgaaagagctcaatcgaggagctacccttttttggaatgggccgatgggggtttttgaggaaagggcgtttgcctcgggaacggagcggctggcgcactttttatccgaagtgcctggagatgtcacgatagggggaggggacttagttgccgctgtccaatctctgaatctggaaaaaaaattgagccacgtttcctcgggaggaggcgcctctttggaatttttagccaatggaaccttgcctggagtggaggcccttagtaataaataa

SEQ ID NO: 10571 - protein, 395 aa, Fritschea bemisiae
MDKLSLRDLKLNQKRVLMRVDFNVPLNADGSIRDATRIILTLPSIEYILRQKGRLVLISHLGRPKGSFDSKVSLRPCAQKLGELLGKEVGFCFDCIGAEVQKRVQNLNPGEVLLLENLRFHKGEESPEKDPGFAQSLAELGDVYINDAFGAAHRSHASIVPIAQFFPANCGVGFLMEKEIAAFSKIYLNPNRPFYAMVGGAKIGNKIDILQALSKRVDGLFIGGGMAFTFFKAKGLAIGESICDESRLKFARDFLKECERKGIRLHLPIDVVVTNGKKIQTVQIKGGVPDKWEGKDIGPQTVELWSKELNRGATLFWNGPMGVFEERAFASGTERLAHFLSEVPGDVTIGGGDLVAAVQSLNLEKKLSHVSSGGGASLEFLANGTLPGVEALSNK

SEQ ID NO: 10572 - DNA, 1680 bp, Chlorarachnion sp
  CDS (53)..(1513)
caacgccatcgttgatctcgagacccaggttgcgcccaagcgctcctccaacatgctcgtcaaggcactctctgtgtctgccgttgctctctccatggttctttgctaccaggcagtatccatggcaaatcagcaagttgctgtcgagcctctcgttggaggtgggttctccatggcaggtgtccgccctgtttcccgcatggctgttgctcctatgcactccgtttctcctatgaacgttggccgcttctccaagccttctgttaccaagttctctgcagtctcccgccctcagcagcttaaggttaacgttgaaaagaagatgtctgttggtgacttgaagaaggaagagctcgacggaaaggttgctctcgttcgttgcgacctcaacgttcctcttgacggaaagaccatcactgatgacacccgtatccgcgcttccatcccaaccatcaagcacctggttgagagcggcgctaaggttctccttacctcccaccttggacgtcctaaagacggacctgaggataagttctccctcgctcctgtcgctgctcgtctttccgagctcctcggacaggacgtgaccttcgtcaaggactgcattggagagcctgtcaaggaggctgttgccaccatgacacctggatccgtcgctctcctcgagaacgttcgtttctacaaggaagagaccaagaacgaaccagagttcgctaagaagctcgctgctaacgctgacctcttcgtgaacgatgctttcggaaccgctcaccgtgctcacggatccaccgagggagtaccgctcacctcaagccttccgtcgctggattccttcttcagaaggagctcgactaccttcaggcgctgtgcagaacctgctcgtcctttcgctgctatcgttggtggatccaaggtttcctccaagatcggtgttatcgagtccctcctcgagaaggttgacaagctcgtcatcggaggcggtatggttttcaccttcctcaaggctcgcggcctcgaagtaggaagctccctcgtcgaggaggacaagctcgagctcgctaaggaccttgagcgcatcgcaaaggagaagggcgttgaactcatcctccctaccgacgttgtcctcgctgatgcattcgccaaggatgctaacacccaggtcgctgatgctaccgcaatccctgagggatggatgggacttgaccaggggcctaaggctaccgaggagatcattgctgctctcaaggactgcaagactgttatctggaacggacctatgggtgtcttcgaattcgaggcgttctccaagggaaccttcggagttgctgacgctctcgctgatctcaccaagggaggcgcaaccaccatcatcggcggaggagactccgttgctgctgtagagcaggctggccttgctgaccagatgtcccacatctctaccggaggtggagcttccctcgagctcctcgaaggaaaggtccttcctggagttgctgcccttaacgcagcttaaacagtccatgtaccttattacctcgcgcgtgatgaagcttccaattaagagccgcacgagaacccatgttacgcatgagcgtttgtgtatgccaaagaagttgattctaagcgagattattaatctttaattaaaaaaatcaaaagaaaaaaaaaaaaaaaaaaaaa

SEQ ID NO: 10573 - protein, 486 aa, Chlorarachnion sp
MLVKALSVSAVALSMVLCYQAVSMANQQVAVEPLVGGGFSMAGVRPVSRMAVAPMHSVSPMNVGRFSKPSVTKFSAVSRPQQLKVNVEKKMSVGDLKKEELDGKVALVRCDLNVPLDGKTITDDTRIRASIPTIKHLVESGAKVLLTSHLGRPKDGPEDKFSLAPVAARLSELLGQDVTFVKDCIGEPVKEAVATMTPGSVALLENVRFYKEETKNEPEFAKKLAANADLFVNDAFGTAHRAHGSTEGVPLTSSLPSLDSFFRRSSTTFRRCAEPARPFAAIVGGSKVSSKIGVIESLLEKVDKLVIGGGMVFTFLKARGLEVGSSLVEEDKLELAKDLERIAKEKGVELILPTDVVLADAFAKDANTQVADATAIPEGWMGLDQGPKATEEIIAALKDCKTVIWNGPMGVFEFEAFSKGTFGVADALADLTKGGATTIIGGGDSVAAVEQAGLADQMSHISTGGGASLELLEGKVLPGVAALNAA

SEQ ID NO: 10574 - DNA, 1463 bp, Schistosoma japonicum
  CDS (5)..(1267)
cgtgatgggtttgtcgaagcttagtatctccgatgtagatttaaaggataaacttggcttactcctaatgctttgtagggttgattttaacgtccctatgaaagatggaaaagtcactaatacccaacggattgcagctgctataccaactattaaatatgccttggataagggagctaaaagcgtagtcctgatgtctcacttaggtagacctgatgggtataaagttgaaaaatattcgctgaaacccgtttgctctgaagtttccaagttgttaggcaaagaagttactttccttagtgactgtgttggtcctgatgtcattagtgcgtgttctaatcctgctcctggcagcgtcttcttacttgagaatttacgctttcatatagaagagaaaggaaaaggtgtctcaccatctgaagataaaacaaaggccactgctgatcaaatcaaagctttcagtgaaagtttaacaaaacttggggatgtttatgtcaatgatgccttcggaacagcacatcgtgctcatgcctctatggtcggctgccaattgccacaaaaagcttgtggatttctcatgaataaagagttgacatatttcgctaaagctctggaaaatcctgaacgtcctttcttagctattttgggcggcgctaaggttagcgataagatccagttgatcaataatatgctggacaaggttaacgaattgatcattgggggcggcatggcgtatactttccttaagcaaatacacaatatgcatataggagctagtttatttgacgcaccaggtgcagaaattgttcagaaggtaatggaaactgcaaaggctaaacacgtggcaattcacttacctgttgattttgtaactgctgataaatttgctgaagatgctaacaccggaacagcaactatagaatctggaattccagatggttggatggggctggatattggtccgaaaaccatagaggaattccgtaaagtgataagtcgtgccaaaacaatagtttggaatggtccgatgggtgtttttgaaatggataagtttgctgcagggacaaaagcagcaatggatgcggtagttgaagctactaaaaacggtgctacaactattattggtggcggtgatacagcgacttgttgtgccaagtggaacacagaagataaagtcagtcatgtcagtaccggtggtggtgctagccttgaacttttagaaggtaaacaactgccaggagtcgttgcacttacggatgctcactaatctatcagactatgatttcctagttaattgtcattagtactcctcttactttcataatgttcaaattatttacttggtattataacacgtttgatttgtcgtatatttttctctacctaatttcaatacgtgtagatctatttctgccatatgtgcattttcaggcaataaaaactcatagatttttgcacattta

SEQ ID NO: 10575 - protein, 420 aa, Schistosoma japonicum
MGLSKLSISDVDLKDKLGLLLMLCRVDFNVPMKDGKVTNTQRIAAAIPTIKYALDKGAKSVVLMSHLGRPDGYKVEKYSLKPVCSEVSKLLGKEVTFLSDCVGPDVISACSNPAPGSVFLLENLRFHIEEKGKGVSPSEDKTKATADQIKAFSESLTKLGDVYVNDAFGTAHRAHASMVGCQLPQKACGFLMNKELTYFAKALENPERPFLAILGGAKVSDKIQLINNMLDKVNELIIGGGMAYTFLKQIHNMHIGASLFDAPGAEIVQKVMETAKAKHVAIHLPVDFVTADKFAEDANTGTATIESGIPDGWMGLDIGPKTIEEFRKVISRAKTIVWNGPMGVFEMDKFAAGTKAAMDAVVEATKNGATTIIGGGDTATCCAKWNTEDKVSHVSTGGGASLELLEGKQLPGVVALTDAH

SEQ ID NO: 10576 - DNA, 1251 bp, Pichia pastoris
  CDS (1)..(1251)
atgtctctttcaaataaactttcagtcaaagatctcgatgttgccggaaagcgtgtcttcatccgtgtcgacttcaacgttcctctggatggtgacaagatcaccaacaaccagcgtatcgttgctgctttgccaactatccaatatgttttggatcacaagccaaaggtcgtcgttctggcttctcatttaggccgtccaaacggagaggtcaacccaaaattctctttaaaaccagttgctgctgaattgtcctccctactaggtaagaaggtgactttcttgaacgatagtgttggaccagaggttgagaaggctgtcaactctgcctccaatggagaggttattcttttggagaacttgcgtttccacattgaagaagaaggatctcaaaagaaagatggtcaaaagatcaaggccgacaaggaggctgttgccaggttcagaaagcaattgaccgcattggccgatgtctacgttaacgacgccttcggtaccgctcacagagcccactcttccatggttggatttgaattggagcaaagagctgctggtttcttgatggctaaggagttgacatacttcgctaaggccctggaaaaccctgtcagaccattcttggccatccttggtggtgctaaggtttctgacaagattcaattgattgacaatttgctggacaaggtcgattccatcatcattggtggaggaatggctttcacttttatcaaggttttggataacgttgccattggtaactctttgttcgacgaggctggtgccaagttagttcccggcttagttgagaaagccaagaagaacaatgtcaaactggttcttccagtcgacttcgtcactgccgacgccttctccaaggatgcaaaggtcggtgaagccacggttgagtctggtattccagacggattgcaaggattggacgctggtccaaaatccagagaattgttcgcagctaccatcgctgaggctaagacaatcgtctggaacggtcctccaggtgttttcgagtttgacaagtttgctgaaggtaccaagtctatgttggcagctgccatcaagaacgctcagaacggtggaactgtcatcgttggtggtggtgacacggctaccgttgctaagaagttcggtggtgctgacaagctatcccacgtttccactggaggaggagcttctttggaattattggagggaaaggagcttccaggtgtagtttacttgtccaaaaaggcttaa

SEQ ID NO: 10577 - protein, 416 aa, Pichia pastoris
MSLSNKLSVKDLDVAGKRVFIRVDFNVPLDGDKITNNQRIVAALPTIQYVLDHKPKVVVLASHLGRPNGEVNPKFSLKPVAAELSSLLGKKVTFLNDSVGPEVEKAVNSASNGEVILLENLRFHIEEEGSQKKDGQKIKADKEAVARFRKQLTALADVYVNDAFGTAHRAHSSMVGFELEQRAAGFLMAKELTYFAKALENPVRPFLAILGGAKVSDKIQLIDNLLDKVDSIIIGGGMAFTFIKVLDNVAIGNSLFDEAGAKLVPGLVEKAKKNNVKLVLPVDFVTADAFSKDAKVGEATVESGIPDGLQGLDAGPKSRELFAATIAEAKTIVWNGPPGVFEFDKFAEGTKSMLAAAIKNAQNGGTVIVGGGDTATVAKKFGGADKLSHVSTGGGASLELLEGKELPGVVYLSKKA

SEQ ID NO: 10578 - DNA, 1480 bp, Populus tremuloides
  CDS (63)..(1268)
cacattctcacctaaagcccaagtctttgttctcctctctcgcttcgatttggttttgaaaaatggctactaagaagagtgttagcagtttaaaggaagcagatttgaagggaaaaagagtttttgtaagagtagatctgaatgttcctttggatgataactttaatattaccgatgatactaggatccgtgctgctgtccccactatcaagtacttgatgggtcatggcgccagagttattctttcctctcacttgggacgcccaaagggtgtcacacctaaatacagcttgaagcctcttgtaccaaggctatctgaacttcttggtgttgatgttaagatggcaaatgattgtattggtgtggaggttgagaaaattgtggctgagattccagaagggggtgttttgctccttgaaaatgtaaggttttataaggaggaagagaagaatgaccctgaatttgcaaagaagctcgcttctctagcagaaatctatgtgaatgatgcattcggcactgctcacagagcccatgcttccactgagggcgtggctaaatacttgaagcctgctgttgctggtttccttatgcagaaggaactcgattatcttgttggagctgtggcaaatcccaaaaagccatttgctgcaattgttggtggctcaaaggtatcttctaagattggagttatcgaatcactcttggagaaggttgacctcctcttcttgggtggaggaatgatctatactttttacaaagcacaagggcactcagttgggtcctcccttgttgaggaagacaagcttgatcttgcaacttcacttattgagaaggccaaggtcaagggggtaaaactgctgctgcctgcagatgtggttgttgctgacaagtttgctccagatgccaacagcaaggtggtcgcagcttctgagataccagatggctggatgggtttggacataggacctgattccatcaagacattcaacgaggcattggatacaaccaagaccattatttggaatggaccaatgggtgtctttgagttcgagaagtttgcagcgggaactgaggcaattgccaggaagcttgccgagctcagtggcaagggagtgactaccatcattggaggaggtgactctgtggctgctgtggagaaggctggactcgctgacaagatgagccacatctcaacaggaggtggtgccagcttagagcttctagagggcaaaccattacctggagtcctggctcttgatgatgcttaacccgaaattttcctcgtgttacttcttaagaacatgcgcggtaaatgtttggtattacaatcagagtggactagatgagtgctgatctttgggggctgtagagtgactaaataaatcttctctcaagtatattcaaccatggaatggtttcggattggatcctttccgggttttttttttattattattttgatgatccaaaaaaaaaaaaa

SEQ ID NO: 10579 - protein, 401 aa, Populus tremuloides
MATKKSVSSLKEADLKGKRVFVRVDLNVPLDDNFNITDDTRIRAAVPTIKYLMGHGARVILSSHLGRPKGVTPKYSLKPLVPRLSELLGVDVKMANDCIGVEVEKIVAEIPEGGVLLLENVRFYKEEEKNDPEFAKKLASLAEIYVNDAFGTAHRAHASTEGVAKYLKPAVAGFLMQKELDYLVGAVANPKKPFAAIVGGSKVSSKIGVIESLLEKVDLLFLGGGMIYTFYKAQGHSVGSSLVEEDKLDLATSLIEKAKVKGVKLLLPADVVVADKFAPDANSKVVAASEIPDGWMGLDIGPDSIKTFNEALDTTKTIIWNGPMGVFEFEKFAAGTEAIARKLAELSGKGVTTIIGGGDSVAAVEKAGLADKMSHISTGGGASLELLEGKPLPGVLALDDA

SEQ ID NO: 10580 - DNA, 1548 bp, Chondrus crispus
  CDS (252)..(1508)
atgtactattggttgattagtttctcttcgcaagtccattgggctagcagccaaccgaaaaatctgaccatcccattggatcacatcaaaaccatctcgtacaagtccaaacaccgcagccaaccctatcagacgaatctaaaaccagtcctttttaatagtcgaggttagcccttccagcctaggtactaacctacatcgccattgacccacccattcttttccaactcgcagctcaaattcccactaccatgtctttctccaagctctgtatcgacgctctcgatctcgctggcaagcgcgtcttcatccgtgtcgacttcaacgtccccttcgacaaggagaccggcaagaccatcaccaacacccagcgtatcgacgccgccctccccaccatcaaatacgctctggaaaagggcgccaagtccgtcgtcctcgcttcgcatctcggacgcccgtccggccgtgttaaccccaagttctcgctcaagcccgtggcagacgtcgtctcggagaagatcggcaagacggtcaccttcctcgaagatgccgtcggctccgctactgaggaggcttgcaaggaccccgagaccggatccgtcttcttgctcgagaatttgcgcttccacatcgaggaggagggcaagggcgttgatgctgatggcaacaagatcaaggctgatgctgctaaggtgacggagtttcggaagagtctcagcactttggctgatgtttacgttaacgacgcctttggcactgctcaccgcgctcactcgtccatggtcggcgtggatctcccacaaaaggcctctggctttctcatgaagaaggagcttgagtattttggaaaggccctgcaggaaccccaacgcccgtttcttagcattttaggaggatccaaggtgtccgataagatccaactcattgagaacttacttgataaggtcgatgagatgatcattggaggaggtatggcattcacattcaagaaagccgtcgagggaatggccattggacagtcgcttttcgacgaagccggtgcaaagatcgcgcaggaaattgtggacaaagctaaggcgaagaatgtcaagcttcatttccccgtcgacttcacgattgctgacaagtttgccccagtggctaacacaagagttgcgacggactcagagggcattccggatgaatggatgggtctcgatgcaggtccgaagagccaagaggcaatgcgcgaggtcgtgttgcgggcgaagacagtcgtgtggaacggtcctgtcggcgtgtttgagtttgaagcgtttgcaaaaggaacaaaggccgtggtcgatgctgtcgtggaagctacttcatctggagctgtgacgatcattggtggaggtgacacggccactgcagtaaaagagatgggtgcagcggattctgtgtctcacgtttccacgggcggtggtgcgagcctcgaactgctcgaaggaaagactctacccggcgtggccgcattgacagacgcatgaaactgtcgtcgcaccgcaaaagtgcaatgttttcctcgag

SEQ ID NO: 10581 - protein, 418 aa, Chondrus crispus
MSFSKLCIDALDLAGKRVFIRVDFNVPFDKETGKTITNTQRIDAALPTIKYALEKGAKSVVLASHLGRPSGRVNPKFSLKPVADVVSEKIGKTVTFLEDAVGSATEEACKDPETGSVFLLENLRFHIEEEGKGVDADGNKIKADAAKVTEFRKSLSTLADVYVNDAFGTAHRAHSSMVGVDLPQKASGFLMKKELEYFGKALQEPQRPFLSILGGSKVSDKIQLIENLLDKVDEMIIGGGMAFTFKKAVEGMAIGQSLFDEAGAKIAQEIVDKAKAKNVKLHFPVDFTIADKFAPVANTRVATDSEGIPDEWMGLDAGPKSQEAMREVVLRAKTVVWNGPVGVFEFEAFAKGTKAVVDAVVEATSSGAVTIIGGGDTATAVKEMGAADSVSHVSTGGGASLELLEGKTLPGVAALTDA

SEQ ID NO: 10582 - DNA, 2154 bp, Chondrus crispus
  CDS (618)..(1988)
caccaaccaacatgcacaaatgttcgcacgggatccccaattccacacgtgtaaaattgatatatccaatcattgtagtacacggtggcatgctggacaaggcatgctggacacgtacgagttttccccatcgtaggacgtgcagtacaggagtaagtttagtcttgtgctcgactgctggagcaggcaacggagacgaatcggataggatcacttttttgactctgttggctctgcgccacacacctggtgcggtttcattggatgtattaatgaacccggtcccattagcgctcctcattggctctttaggaatggatggccctcgttcccaagcatttcctccgagattcacattcccaccccgtacaggggcacaacccttgatctccaacgcgctctctctagccgtcaaccaccacaaatgcccgacttcccttcgcattcgccattcatactgttctcccgttcccaatccaaccatcccttcgcccctcctataaactctacctgctccaacactagtttccccgccgcttctctcgcccatcggttttcccacaccccactcctgatcacttctcattccccatatccacactaaccaacccttcaccatggtcaccggcttcgtaccctgcgccgctcccctgcgcgccaccacccgccagacggccgccgtgtccgttgtctcccgctctgccagcaccttcgttgccccctcgcgccgcgtcacggcccctgccgcccccgtccccaccgtccgcatgaccactgccgccgccaccaccaagaagtccattaaggacctcagccccgcggacatcgccggcaaacgcgtccttgtccgctgcgatctcaacgtcccgctcgatggcaagaccatcaccgacgacacacgcatccgcgcatctgtccccaccatcaagttcctcatggaagccggcgcaaaggtcctcctctcctcccatctcggccgccccaaggatggtccggaggataagttctccctcagccccgtcgccgcccgccttacccaactgctgggcaaggacgttaccatggctccagattgcattggtgacggagtcacaaaaatcgtgtccggcatggctaacggtgatgtcactcttctcgagaacgttcgcttctacaaggaggagacgaagaacgaccctgactttgctaagaaacttgctgctaacgctgattttttcgtcaacgatgcttttggtaccgcccatcgcgcccatggctcgaccgccggtgttacggcgcatcttaagccctctgttgccggcttacttctggagaaggagcttgcatacctcgcaggcactgtgtcggaccccgcgcgcccgtttgctgcaattgttggtggttccaaggtatcttccaagattggcgttatcgactcgcttctccagaaggttgacaagctcatcattggaggcggtatggtcttcaccttcctcaaagcaaagggcctcaacgttggttcttcccttgttgaggatgataagctcgagcttgcgagggagcttgtcaaaacggccgaagccaagggtgtctccatcatccttcccactgacgtcgtcctcgctgacaagttcgccgctgatgccaacactcaggtgacctctgttgactctatccccgatggatggatgggtctggaccaaggagaagacagcacaaagctcattcagaatgagcttaaggagtgcaagaccgtaatctggaacgggccgatgggtgtgtttgagatggagaagttcgcgaagggtacgttcgccattgctgacacattagccgatctcactgaatccggctgcattaccatcatcggtggtggtgactctgtcgcagctgtcgagaaggctggtctggctgagaagatgtcccatatctctactggtggtggtgcctcgctcgagcttttggaaggaaaggtgcttcctggcgtggctgctttggatgacaattagatagaagtaataaacttttctaatcattttgcacagaccttgttacctcttgacatctatgtgaagtatcccgtcgaaacatatcctaatccgacacaagatatttgaactaaaactcgtatcttagttccacaactattttagaaaagaccagctttcagttcca

SEQ ID NO: 10583 - protein, 456 aa, Chondrus crispus
MVTGFVPCAAPLRATTRQTAAVSVVSRSASTFVAPSRRVTAPAAPVPTVRMTTAAATTKKSIKDLSPADIAGKRVLVRCDLNVPLDGKTITDDTRIRASVPTIKFLMEAGAKVLLSSHLGRPKDGPEDKFSLSPVAARLTQLLGKDVTMAPDCIGDGVTKIVSGMANGDVTLLENVRFYKEETKNDPDFAKKLAANADFFVNDAFGTAHRAHGSTAGVTAHLKPSVAGLLLEKELAYLAGTVSDPARPFAAIVGGSKVSSKIGVIDSLLQKVDKLIIGGGMVFTFLKAKGLNVGSSLVEDDKLELARELVKTAEAKGVSIILPTDVVLADKFAADANTQVTSVDSIPDGWMGLDQGEDSTKLIQNELKECKTVIWNGPMGVFEMEKFAKGTFAIADTLADLTESGCITIIGGGDSVAAVEKAGLAEKMSHISTGGGASLELLEGKVLPGVAALDDN

SEQ ID NO: 10584 - DNA, 1374 bp, Phytophthora infestans
  CDS (21)..(1265)
cgataagtaacaccataaccatggccaagctcagcatcaagaacgtggacgtcaagggcaagcgcgtgctcatccgcgtggatttcaacgttcctttcgcacaggacggctccatctccaacacgcagcgcatcgacgccgcgctgcccactgtgcagtacgtgctggaccagggtgctaaggctgtggtgctcatgtcccatttgggccgccccgagggcaagcccaaggccaaggactcgctggcccctgtggctgtggctgtggaacagaagctcggtcgtaaggtgacgttcctgaaggactgtgttggccccgaggttgaggctgcctgcgccaacccgactgagggcagcattattctgcttgagaaccttcgttttcacgtcgaagaggagggtaagggcaaggatgccgagggcaacaagaccaaggcgtcgtctgaggctgtggcagctttccgcgcctcgctgagcaagcttggcgacgtgtacgtcaacgacgcgttcggtacggcccaccgcgctcacagctccatggtgggcgtggatctccctattaaggccgctggctttctgctggacaaggagctagtgtacttcgccaaggctctggacgcccctcagcgccccttcgtgtcgattctgggtggtgccaaggttgctgacaagatccagctcatcatgaatatgctggacaaggtggacgagatggtcatcggtggcggcatggcctacacgttcaagaaggtgatcaacaacatggagatcggtggatcgctgtacgacgaggaaggcgccaagatcgtgcctcagatcgtggagaaggccaaggccaagggcgtgacgcttcacctgcctgtggacttcgtcatcgccgacaagttcgccgcggatgctgctacgaagatctcgacggaagaggagggcatccctgctggctggatgggtctggacgtcggccccaagtcgcaggaagcgttcagcgccgctgtggcgaaggccaagaccgtcgtctggaacggacccatgggcgtgttcgagttcgatgcttttgctgacggcacgaaagttgtcatggacgctgtggtcaaggccaccgagtcgggcgccactacgatcattggcggcggcgacacggccacgtgctgcgtcaagttcaacacggaggacaaggtctctcatgtgagcacgggcggcggtgccagtctggagcttctggagggcaagattctgcctggtgtggacgccctgtcctcggcgtgaattgcacggtcatccgatcctatcaggagcgggctgtagtaattgtccctttatcccagcaaatacaaatagcattctaaaagggtaaaaaaaaaaaaaaaaaaaaaaa

SEQ ID NO: 10585 - protein, 414 aa, Phytophthora infestans
MAKLSIKNVDVKGKRVLIRVDFNVPFAQDGSISNTQRIDAALPTVQYVLDQGAKAVVLMSHLGRPEGKPKAKDSLAPVAVAVEQKLGRKVTFLKDCVGPEVEAACANPTEGSIILLENLRFHVEEEGKGKDAEGNKTKASSEAVAAFRASLSKLGDVYVNDAFGTAHRAHSSMVGVDLPIKAAGFLLDKELVYFAKALDAPQRPFVSILGGAKVADKIQLIMNMLDKVDEMVIGGGMAYTFKKVINNMEIGGSLYDEEGAKIVPQIVEKAKAKGVTLHLPVDFVIADKFAADAATKISTEEEGIPAGWMGLDVGPKSQEAFSAAVAKAKTVVWNGPMGVFEFDAFADGTKVVMDAVVKATESGATTIIGGGDTATCCVKFNTEDKVSHVSTGGGASLELLEGKILPGVDALSSA

SEQ ID NO: 10586 - DNA, 1537 bp, Arabidopsis thaliana
  CDS (148)..(1353)
agattccgattgttttcttcgattaagttttgagctagattctctagatctgtttcaccgatttggttgatttctccgtcaatctgaactcgcggtgtgcatcttgttgtttgcagtgtttttagtttgttttacgaagaatcaactatggcgacgaagagaagcgttggaactttgaaggaagcggatctgaagggaaagagtgtgttcgtgagggttgatctcaacgttcctttggatgataactctaacatcaccgatgacaccaggattcgtgccgctgttcccaccatcaagtacttgatgggtaatggatctagggttgttctctgcagtcacttgggccgcccaaaaggtgttactcctaagtacagcttaaagcctcttgtgcccagattgtctgaacttcttggtgttgaggttgtaatggcaaatgactctattggtgaggaagtccagaagttggttgcaggactacctgaaggtggtgttttgctcttggagaatgtgaggttctacgccgaggaagagaagaatgatcctgaatttgcaaagaagcttgctgctcttgccgatgtttacgttaatgatgccttcggaactgctcacagagctcatgcttccactgagggagttgccaaatacttgaagccttcagttgctggtttcctcatgcagaaggaacttgattaccttgtcggagctgtggcaaaccccaagaagccttttgctgccattgttggaggctcaaaggtttcaacaaagattggtgtcattgagtctctcttgaacacagttgacatcctccttctcggtggaggtatgatttttactttctacaaggcacaaggactctcagtcggatcttcccttgtggaggaggacaagcttgacttggcaaagtcactcatggagaaagcaaaggccaaaggtgtctctctcttgctcccaaccgatgtggttattgctgacaagtttgctcccgatgctaacagcaagatagtgccagccactgccatccctgatggctggatgggtctagatattggtccagactccatcaagacattcagcgaagctctggacacaaccaaaaccatcatctggaatggtcccatgggtgtgtttgaattcgataagtttgctgctggaactgaggccgtagcaaagcagcttgcagaactaagcggaaagggagtaaccacaatcattggaggaggtgactctgttgctgccgtcgagaaggttggtttggcagacaagatgagccacatctctaccggaggcggtgctagtttggagcttattgagggtaagccacttccaggagtcctcgctctcgacgaagcttgaaaatcctcacgttggatttcatcgctattttgtgttgttatatgtataagtcgtctggttatcttgtgaccagacgagcaagccattatttatcagcttgagattttcgtctacggctctctttttatgagttttttagtttggagcctttttttaataataagagatgaaactctgattgacg

SEQ ID NO: 10587 - protein, 401 aa, Arabidopsis thaliana
MATKRSVGTLKEADLKGKSVFVRVDLNVPLDDNSNITDDTRIRAAVPTIKYLMGNGSRVVLCSHLGRPKGVTPKYSLKPLVPRLSELLGVEVVMANDSIGEEVQKLVAGLPEGGVLLLENVRFYAEEEKNDPEFAKKLAALADVYVNDAFGTAHRAHASTEGVAKYLKPSVAGFLMQKELDYLVGAVANPKKPFAAIVGGSKVSTKIGVIESLLNTVDILLLGGGMIFTFYKAQGLSVGSSLVEEDKLDLAKSLMEKAKAKGVSLLLPTDVVIADKFAPDANSKIVPATAIPDGWMGLDIGPDSIKTFSEALDTTKTIIWNGPMGVFEFDKFAAGTEAVAKQLAELSGKGVTTIIGGGDSVAAVEKVGLADKMSHISTGGGASLELIEGKPLPGVLALDEA

SEQ ID NO: 10588 - DNA, 1254 bp, Equus caballus
  CDS (1)..(1254)
atgtctctttctaagaagttaactttggacaaactagatgttaaagggaaacgaatcatcatgagagtagacttcaacgttcccatgaagaagaaccagattacaaacaaccagagaatcaaggcttccatcccaagcatcaagtactgcctggataatggagccaggtcagtagttcttatgagtcatttaggtcgacctgatggtgttcccatgcctgataaatactctttagagcctgttgctgctgagctcaaatccttgctgggcaaggatgttctgttcctgaaggactgtgtgggctcagaagtggagaaagcctgtgccaacccagctactggttcagttatcctgctggagaacctgcgctttcatgtggaggaagaagggaagggccaagatccttctggaaataagcttaaagctgaggcaggtaaaatagaagccttccgggcatcactgtccaagctcggggatgtctatgtcaatgatgcttttggcactgctcaccgagcccacagttccatggtgggaataaatctgccccagaaggcatctggatttctgatgaagaaggagctggagtactttgccaaagccttggaaaacccagagagaccctttctggctatacttggtggagccaaagtggcagacaagatccaactcatcaaaaatatgctggacaaggtcaatgagatgattattggtggtggaatggcttataccttccttaaggtacttaacaacatggagattggtgcttccctgtttgatgaagagggagccaagattgtcaaagatatcatggccaaagccaataagaatggtgtgcgcattacatttcctgttgattttgttactgctgacaagtttgaggagaatgctaaggttggccaagccactgtagcatcaggcatacctgccggctggatgggtttggactgcggtcctgagactaataagaagtatgctcaagtgatggcccaagccaaactaattgtgtggaatggacctgtaggggtatttgaatgggatgcctttgctaagggaaccaaagccctcatggatgaaattgtgaaagccacttccaggggctgtatcaccattataggaggtggagacactgctacttgctgtgctaaatggaacaccgaagataaagtcagtcatgtgagcactggaggaggtgccagtctagagcttctggaaggtaaaatccttcctggagtggatgctctcagcaacctgtag

SEQ ID NO: 10589 - protein, 417 aa, Equus caballus
MSLSKKLTLDKLDVKGKRIIMRVDFNVPMKKNQITNNQRIKASIPSIKYCLDNGARSVVLMSHLGRPDGVPMPDKYSLEPVAAELKSLLGKDVLFLKDCVGSEVEKACANPATGSVILLENLRFHVEEEGKGQDPSGNKLKAEAGKIEAFRASLSKLGDVYVNDAFGTAHRAHSSMVGINLPQKASGFLMKKELEYFAKALENPERPFLAILGGAKVADKIQLIKNMLDKVNEMIIGGGMAYTFLKVLNNMEIGASLFDEEGAKIVKDIMAKANKNGVRITFPVDFVTADKFEENAKVGQATVASGIPAGWMGLDCGPETNKKYAQVMAQAKLIVWNGPVGVFEWDAFAKGTKALMDEIVKATSRGCITIIGGGDTATCCAKWNTEDKVSHVSTGGGASLELLEGKILPGVDALSNL

SEQ ID NO: 10590 - DNA, 1197 bp, Streptococcus agalactiae
  CDS (1)..(1197)
atggctaaattgactgttaaagacgttgatttgaaggtaaaaaaagtcctcgttcgtgttgactttaatgtgcctttgaaagacggcgttatcactaacgacaaccgtatcactgcggctcttccaacaatcaagtatatcatcgaacaaggtggtcgtgctatcctcttctctcaccttggacgtgttaaagaagaagctgacaaagaaggaaaatcacttgcaccggtagctgctgatttagctgctaaacttggtcaagatgttgtattcccaggtgttactcgtggtgcaaaattagaagaagcaatcaatgctttggaagatggacaagttcttttggttgaaaacactcgttttgaagatgttgacggtaagaaagaatctaagaatgacgaagaacttggtaaatactgggcttcacttggagatggaatcttcgttaacgatgcatttggtacagcacaccgtgctcatgcatcaaacgtaggtatttcagcaaacgttgaaaaagctgtagctggtttccttcttgaaaacgaaattgcttacatccaagaagcagttgaaactccagaacgcccattcgtagctattcttggtggctcaaaagtttctgataagattggtgttatcgaaaaccttcttgaaaaagctgataaagttcttatcggtggtggtatgacttacacattctacaaagctcaaggtatcgaaatcggtaactcacttgtagaagaagacaaattggatgttgctaaagacctccttgaaaaatcaaacggtaaattgatcttgccagttgactcaaaagaagcaaacgcatttgctggttatactgaagttcgcgacactgaaggtgaagcagtttcagaagggttccttggtcttgacatcggtcctaaatcaatcgctaaatttgatgaagcacttactggtgctaaaacagttgtatggaacggacctatgggtgtctttgaaaaccctgacttccaagctggtacaatcggtgtaatggacgctatcgttaaacaaccaggcgttaaatcaatcatcggtggtggtgattcagcagcagctgctatcaaccttggtcgtgctgacaaattctcatggatctctactggtggtggagcaagcatggaattgctcgaaggtaaagtattaccaggtttggcagcattgactgaaaaataa

SEQ ID NO: 10591 - protein, 398 aa, Streptococcus agalactiae
MAKLTVKDVDLKVKKVLVRVDFNVPLKDGVITNDNRITAALPTIKYIIEQGGRAILFSHLGRVKEEADKEGKSLAPVAADLAAKLGQDVVFPGVTRGAKLEEAINALEDGQVLLVENTRFEDVDGKKESKNDEELGKYWASLGDGIFVNDAFGTAHRAHASNVGISANVEKAVAGFLLENEIAYIQEAVETPERPFVAILGGSKVSDKIGVIENLLEKADKVLIGGGMTYTFYKAQGIEIGNSLVEEDKLDVAKDLLEKSNGKLILPVDSKEANAFAGYTEVRDTEGEAVSEGFLGLDIGPKSIAKFDEALTGAKTVVWNGPMGVFENPDFQAGTIGVMDAIVKQPGVKSIIGGGDSAAAAINLGRADKFSWISTGGGASMELLEGKVLPGLAALTEK

SEQ ID NO: 10592 - DNA, 1167 bp, Encephalitozoon cuniculi GB
  CDS (1)..(1167)
atgaaaacaattagcaatgcggagattgagggaaaacgggtatttctccgggtggacttcaatgtgccgatattggactctgtggttctgaacgacttcaaaataacttctgtgcttccaacaatcagacttcttcattctaggaatcccaggagagtgattattggaagtcaccttggaagacccaaggggaagtattccaaggagctttccctgaggcctgtctactcagtactaaaggcgcgcctctgggaggaacttggcgtagagttggatttctgcgacctgtgggatgttgggaatgtgcaaagtccatggatactcctggagaacctcaggttttattccgcagaggaagacgccggcgacaaggatgctgttgatcagtacagaaatgtattcgtagacaatatggatgttgctgttatagatgcattcggatgtctgcatagagaatgcgggtctatacagagaaccgggcttccttcattctctgggcttctggtccagaaagagttgaactttactaaggaaatcatggaggaaagggtggatcttatgatactgggaggaaagaaagtgtccgacaagatcaagctgctggaatctcttggacagaaaacaggaagcttatttgttaccggaggactggcatttccattcattagatacatattgggaaaggaggttggaaagagcataggagaaagtgtttctgaagaggaagtaaagaggatacataagatctgtgaggagcacaaaacaaggattatccttccatctgacttcacggttgtttgcaacgacagcgtacaaacaactagcaacatcccccctgaggggagtgcaatggacataggcccggaaactatagaaatgctaaggagagaagtttctaaggcaaaggccgtgttttggaatggccctcccggaatgtatgaagaacaaagtttctcgaggggaacggaggctttggtgagtgccttggagagtcttaaaggagaagggaagaagtctttctgcggaggaggggagactgcaggcgcaatcagattgtttggtagctatgatgcctttacttatgtatctaccggaggaggggtgctgatgaagctgctgggtggaaaaaggcttcctgggctagacttcctctccatgcagccctga

SEQ ID NO: 10593 - protein, 388 aa, Encephalitozoon cuniculi GB
MKTISNAEIEGKRVFLRVDFNVPILDSVVLNDFKITSVLPTIRLLHSRNPRRVIIGSHLGRPKGKYSKELSLRPVYSVLKARLWEELGVELDFCDLWDVGNVQSPWILLENLRFYSAEEDAGDKDAVDQYRNVFVDNMDVAVIDAFGCLHRECGSIQRTGLPSFSGLLVQKELNFTKEIMEERVDLMILGGKKVSDKIKLLESLGQKTGSLFVTGGLAFPFIRYILGKEVGKSIGESVSEEEVKRIHKICEEHKTRIILPSDFTVVCNDSVQTTSNIPPEGSAMDIGPETIEMLRREVSKAKAVFWNGPPGMYEEQSFSRGTEALVSALESLKGEGKKSFCGGGETAGAIRLFGSYDAFTYVSTGGGVLMKLLGGKRLPGLDFLSMQP

SEQ ID NO: 10594 - DNA, 1560 bp, Aedes aegypti
  CDS (99)..(1346)
aagaagcactcggtggagaataatctgttaaagtgtgatctccccctaaaattctttttaaacttaagtcacttgtgcgaatttactgcaaagcaacgatggctctcaataaactcagcatcgagaatgttgatttgaagggcaaacgagtttttatgcgtgtggatttcaatgtccctatcaaagagggaaagatcaccagcaaccagcgtatcgtagctgccctggacagtattaaatatgccttggaaaagggtgccaagtccgttgtccttgcctcccaccttggacgtccggacggcaacaagaatgccaaatacaccctagccccggtggccgaggagatgacgaagctgttgggtcgtgatgtgaccttcctgaacgactgtatcggtgctgaggttgaagccgcatgcaaagaccctgcacccggttcgatcattttgttggagaatgtccgattctacgttgaagaggagggcaagggcgttgacgcctccggcaataaggttaaggctgataaggacaaggtcaaggccttccgcgaaagtcttgctaaattgggagatttgtatgtcaacgatgctttcggaactgctcatcgtgcgcatagttccatgatgggtgagggatacgcccagcgtgctgctggtttgttgttgaacaaggaattgcgttacttctcgcaagctctggataacccgccacgaccattccttgccattctgggtggagctaaggttgctgacaaaatccagctcattgaaaatctcctcgacaaggtgaacgaaatgatcattggaggtggaatggcatttacgttccttaaggtattgaacaatatgcaaattggaggatcattgttcgacgaggagggttcaaagaccgttcagaagctggtggacaaagccaaggccaacaacgtgcaactgcatttaccagtggatttcgtaactggcgataaatttgccgaagatgctgccgttggagctgctaccgtcgagagcggaattcccgctggacacatgggtctcgacgttggaccgaagtctcgtgaggcattcgctgctccgattgcccgctccaagatcattgtttggaacggtccacccggcgtttttgagttccccaatttcgccaacggaacgaaagctcttatggatgccgttgtcgctgcaacaaaggcaggcactgtatctattattggcggtggagataccgcttcgtgtcgcgccaagtggggaacagaatctcaggtatcacacgtttctactggtggtggagcgtctttggaactgttggaaggcaaggttctacctggtgtcgacgccttgagcagcgcttaaataatcgaaaacatgttccagcataagagttatttagctgatgttccgagctggcttatctaatcactaaagtttaagctttgttagagtcaaaaagaaagtcgaaactcgtcataaaataatcaatgtgcacctagcgctaagatgtaagtgtagactacaccatgtgctgttatcaggagagaaaataaagtcatgtgttacgattagagag

SEQ ID NO: 10595 - protein, 415 aa, Aedes aegypti
MALNKLSIENVDLKGKRVFMRVDFNVPIKEGKITSNQRIVAALDSIKYALEKGAKSVVLASHLGRPDGNKNAKYTLAPVAEEMTKLLGRDVTFLNDCIGAEVEAACKDPAPGSIILLENVRFYVEEEGKGVDASGNKVKADKDKVKAFRESLAKLGDLYVNDAFGTAHRAHSSMMGEGYAQRAAGLLLNKELRYFSQALDNPPRPFLAILGGAKVADKIQLIENLLDKVNEMIIGGGMAFTFLKVLNNMQIGGSLFDEEGSKTVQKLVDKAKANNVQLHLPVDFVTGDKFAEDAAVGAATVESGIPAGHMGLDVGPKSREAFAAPIARSKIIVWNGPPGVFEFPNFANGTKALMDAVVAATKAGTVSIIGGGDTASCRAKWGTESQVSHVSTGGGASLELLEGKVLPGVDALSSA

SEQ ID NO: 10596 - DNA, 1560 bp, Aedes aegypti
  CDS (99)..(1346)
aagaagcactcggtggagaataatctgttaaactgtgatctccccctaaaattctttttaaacttaggtcatttgtgcgaatttactgcaaagcaacgatggctctcaataaactcagcatcgagaatgttgatttgaagggcaaacgagtttttatgcgtgtggatttcaatgtccctatcaaagagggaaagatcactagcaaccagcgtatcgtagctgccctggacagtattaaatatgccttggaaaagggtgccaagtccgttgtccttgcctcccaccttggacgtccggacggcaacaagaatgccaaatacaccctagccccggtggccgaggagatgaagaagctgttgggtcgtgatgtgaccttccttaacgactgtatcggtgctgaggttgaagccgcatgcaaagaccctgcaccgggttcgatcattttgttggagaatgtccgattctacgttgaagaggagggcaagggcgttgacgcctccggcaataaggttaaggctgataaggacaaggtcaaggctttccgcgaaagtcttgccaaattgggagatgtgtatgtcaacgatgctttcggaactgctcatcgtgcgcatagttccatgatgggtgagggatacgcccagcgtgctgctggtttgttgttgaacaaggaattgcgttacttctcgcaagctctggataacccgccacgaccattccttgccattctgggtgcagctaaggttgctgacaaaatccagctcattgaaaatctcctggacaaggtgaacgaagtgatcattggaggtggaatggcatttacgttccttaaggtattgaacaatatggaaattggaggatcattgttcgacgaggagggttcaaagatcgttcagaagctggtagacaaagccaaggccaacaacgtgcaactgcatttaccagtggatttcgtaactggtgataaatttgccgaagatgctgccgttggagctgctaccgtcgagagcggaattcccgctggacacatgggtctcgacgttggacccaagtctcgtgaagcattcgctgctccgattgcccgctccaagatcattgtttggaacggtccacccggcgtttttgagttccccaatttcgccaacggaacgaaagctcttatggatgccgttgtcgctgcaacaaaggcaggcactgtatctattattggcggtggagataccgcttcgtgttgcgccaagtggggaacagaatctcaggtatcacacgtttctactggtggtggagcgtctttggaactgttggaaggcaaggttctacctggtgtcgacgccttgagcagcgcttaaataatcgaaaacatgttccagcataagagttatttagctgatgttccgagctggcttatctaatcactaaagtttaagctttgttagagtcaaaaagaaagtcgaaactcgtcataaaataatcaatgtgcacctagcgctaagatgtaagtgtagactacaccatgtgctgttatcaggagagaaaataaagtcatgtgttacgattagagag

SEQ ID NO: 10597 - protein, 415 aa, Aedes aegypti
MALNKLSIENVDLKGKRVFMRVDFNVPIKEGKITSNQRIVAALDSIKYALEKGAKSVVLASHLGRPDGNKNAKYTLAPVAEEMKKLLGRDVTFLNDCIGAEVEAACKDPAPGSIILLENVRFYVEEEGKGVDASGNKVKADKDKVKAFRESLAKLGDVYVNDAFGTAHRAHSSMMGEGYAQRAAGLLLNKELRYFSQALDNPPRPFLAILGAAKVADKIQLIENLLDKVNEVIIGGGMAFTFLKVLNNMEIGGSLFDEEGSKIVQKLVDKAKANNVQLHLPVDFVTGDKFAEDAAVGAATVESGIPAGHMGLDVGPKSREAFAAPIARSKIIVWNGPPGVFEFPNFANGTKALMDAVVAATKAGTVSIIGGGDTASCCAKWGTESQVSHVSTGGGASLELLEGKVLPGVDALSSA

SEQ ID NO: 10598 - DNA, 1248 bp, Aedes aegypti
  CDS (1)..(1248)
atggctctcaataaactcagcatcgagaatgttgatttgaagggcaaacgagtttttatgcgtgtggatttcaatgtccctatcaaagagggaaagatcaccagcaaccagcgtatcgtagctgccctggacagtattaaatatgccttggaaaagggtgccaagtccgttgtccttgcctcccaccttggacgtccggacggcaacaagaatgccaaatacaccctagccccggtggccgaggagatgaagaagctgttgggtcgtgatgtgaccttcctgaacgactgtatcggtgctgaggttgaagccgcatgcaaagaccctgcacccggttcgatcattttgttggagaatgtccgattctacgttgaagaggagggcaagggcgttgacgcctccggcaataaggttaaggctgataaggacaaggtcaaggccttccgcgaaagtcttgctaaattgggagatttgtatgtcaacgatgctttcggaactgctcatcgtgcgcataggtccatgatgggtgagggatacgcccagcgtgctgctggtttgttgttgaacaaggaattgcgttacttctcggaagctctggataacccgccacgaccatcccttgccattctgggtggagctaaggttgctgacaaaatccagctcattgaaaatctcctcgacaaggtgaacgaaatgatcattggaggtggaatggcatttacgttccttaaggtattgaacaatatggaaattggaagatcattgttcgacgaggagggttcaaagatcgttcagaagctggtagacaaagccaaggccaacaacgtgcaactgcatttaccagtggatttcgtaactggcgataaatttgccgaaaatgctgccgttggacctgctaccgtcgagagcggaattcccgctggacacatgggtctcgacgttggaccgaagtctcgtgaggcattcgctgctccgattgcccgctccaagatcattgtttggaacggtccacccggcgtttttgagttccccaatttcgccaacggaacgaaagctcttatggatgccgttgtcgctgcaacaaaggcaggcactgtatctattattggcggtggagataccgcttcgtgtcgcgccaagtggggaacagaatctcaggtatcacacgtttctactggtggtggagcgtctttggaactgttggaaggcaaggttctacctggtgtcgacgccttgagcagcgcttaa

SEQ ID NO: 10599 - protein, 415 aa, Aedes aegypti
MALNKLSIENVDLKGKRVFMRVDFNVPIKEGKITSNQRIVAALDSIKYALEKGAKSVVLASHLGRPDGNKNAKYTLAPVAEEMKKLLGRDVTFLNDCIGAEVEAACKDPAPGSIILLENVRFYVEEEGKGVDASGNKVKADKDKVKAFRESLAKLGDLYVNDAFGTAHRAHRSMMGEGYAQRAAGLLLNKELRYFSEALDNPPRPSLAILGGAKVADKIQLIENLLDKVNEMIIGGGMAFTFLKVLNNMEIGRSLFDEEGSKIVQKLVDKAKANNVQLHLPVDFVTGDKFAENAAVGPATVESGIPAGHMGLDVGPKSREAFAAPIARSKIIVWNGPPGVFEFPNFANGTKALMDAVVAATKAGTVSIIGGGDTASCRAKWGTESQVSHVSTGGGASLELLEGKVLPGVDALSSA

SEQ ID NO: 10600 - DNA, 1215 bp, Mycoplasma capricolum subsp
  CDS (1)..(1215): transl_table=4
atgaattataataacaaaaaaacattaaaagacatagatgttaaaaataaaactgtactagttcgtgtggattttaatgtaccaattcaaaatggagttattactgatgataatcgtataattgctgctcttcctactataaattacttaatagaaaatgatgccaaaatagtattattttcacatttatcaagaattaaaactaatgaagataaattaaaaaaatctttagctccagttgcaaaaagattagaagaattattgaataaaaaagttaaatttattaaccaaactagaggaaaagaattagaacaagctgttagtttattgcaaactaaagaaattattttagttgaaaatactagatttgaagatgttttagatgatcaagttgttaagtatgaatcaaaaaatgatcctgaattaggaaagtattgagcaagtttaggtgaagtatttgtaaatgatgcttttggaacagcacatagatcacatgcttcaaatgttggaattgcttcaaatattaaaatttcagctattggttttttagttgaaaaagaattaaaaatgttatctcaagcagttaatgactctaaaaaaccatttattgcaattttaggtggagcaaaagtttcagataaaattggtgttattgaaaatttattaccaaaagttgataaattactaattggtggtggaatgagctatacttttttaaaagctcaaggtcgtagcattggtaaatcattattagaagaagataaaattgatttagctaaacattatttagaagttggaaaagataaaattgttttaccagttgatacagcatgtgcaaaagaatttgctgatgtaaagccaactatttttgaaactaatattcctgatgaatgagatggattagatgctggaccaaaaacaattgaaatgtataaagaagaaattaaaaaagctaaaactattgtttgaaatggtcctgttggtgtatttgaattcaaaaattttgaaactggtacaaaatctatatgtcaagcaattgctgaacaaactaaaactggagcctttactttaattggtggtggagatagtgcttctgctgctattaatatggggtttaaagataatttttcatgaatttcaacaggtggaggagcctcacttgaatttatggaaggaaaagaattacgaggaatttcggcaattcaaaataaataa

SEQ ID NO: 10601 - protein, 404 aa, Mycoplasma capricolum subsp
MNYNNKKTLKDIDVKNKTVLVRVDFNVPIQNGVITDDNRIIAALPTINYLIENDAKIVLFSHLSRIKTNEDKLKKSLAPVAKRLEELLNKKVKFINQTRGKELEQAVSLLQTKEIILVENTRFEDVLDDQVVKYESKNDPELGKYWASLGEVFVNDAFGTAHRSHASNVGIASNIKISAIGFLVEKELKMLSQAVNDSKKPFIAILGGAKVSDKIGVIENLLPKVDKLLIGGGMSYTFLKAQGRSIGKSLLEEDKIDLAKHYLEVGKDKIVLPVDTACAKEFADVKPTIFETNIPDEWDGLDAGPKTIEMYKEEIKKAKTIVWNGPVGVFEFKNFETGTKSICQAIAEQTKTGAFTLIGGGDSASAAINMGFKDNFSWISTGGGASLEFMEGKELRGISAIQNK

SEQ ID NO: 10602 - DNA, 1696 bp, Trypanosoma cruzi
  CDS (94)..(1605)
gggagcaattctttctatttgatttgattttgtttttgacataacagcagtggaagaaatagaagcgaaaaagggagtaaaggagtcgctttgatgcaaagcactttaattcttaaaaagaccgttgacgacgtctggccgctcacggccaaacgtgtgctcatcagcgtcgacttcatcgtccctattcataatgggaccatcacgaacgattatcgcatccgcgctgccatccctacaatccgtcgtgtgattgatcaagggggcatatgtatcttgatgagccaccttggccgccccaaaggcgtgtcatacacctctgcgaagaaagacattcaaaagaggtaccatggagggctgtttaacgacagcagagggaagaccgccttttttgccgtacttccgggtgaggagaaggcaaagattttggcactctccagtgcaaaggatgaggcttccagactttcactcagcgaggggtctggtaagactgctgtcttttcacggttgtcggaagaggagaagcaaacgttgctagtgcggtacatttctgaaaataaagaacaaatctttccgcagctcagcctcagttcaggatatgaagaaaaacttactctacgaccaattgccgtgcgacttgctgagttgcttaatcaacacgtttactttgctcacgattgtatggatgccaagatggaaatcagtcttctcaggagaggcgaggttatgctgctcgagaacgtgcgcttctacgtggaggagggaagtaagaaggaggaggagcgtgacgcaatggcgcgcgtactggcgtcgtacggcgacgtgtacatcagcgacgcttttggcacagcccaccgcgagagtgcgacgatgacgggcattccaaaggtgcttggccacggtgccgccggctacttgatggagaaggagatctcgtacttcgcgaaggtgctgggcagcccagcgcggccgctggtggcgattgtgggcggcgcgaaagtgagcgacaagatccagctgctggacaacatgctgcagcgcattgaccacctgatcattggtggcgcgatggcgtacacgtttctgaaggcgcagggccacaagattgggagctcgatgtgcgaggaggacaagctggacctcgcacgctcgctgctgaaaaaggccgaggaccgcaaggtgactgtgctgctgcccgtggaccacgtgtgccacaccgaattcaaggctgtggaggcaccgttggtgacggagggatgtggacatcctgacggctacatggcgctggacatcggcccgaggacgattgagaaatacgttgagattgtggcgaagtgcaagagtgcgatctggaacggtccgatgggtgtgtttgagatggcgccgtactcgaagggcacgtttgcgatcgcgaaggtgatgggcgacagcacgcagaaccatgggctgatgagcatcatcggtggcggtgacagtgcgagcgcagcggagctgagtggcgaggcgccgcgcatgtcccacgtgtcgacgggtggtggcgcgtcgctggagctgctggaaggcaagactcttcctggcgttgccgtgctggacgacaaggagtaacgcgacctgtgtgttgtgtggattaaaaaaaaagaaaaaagaaaaaggcaacgttattttcgttggcgcacaatgcgtgcacattctcttt

SEQ ID NO: 10603 - protein, 503 aa, Trypanosoma cruzi
MQSTLILKKTVDDVWPLTAKRVLISVDFIVPIHNGTITNDYRIRAAIPTIRRVIDQGGICILMSHLGRPKGVSYTSAKKDIQKRYHGGLFNDSRGKTAFFAVLPGEEKAKILALSSAKDEASRLSLSEGSGKTAVFSRLSEEEKQTLLVRYISENKEQIFPQLSLSSGYEEKLTLRPIAVRLAELLNQHVYFAHDCMDAKMEISLLRRGEVMLLENVRFYVEEGSKKEEERDAMARVLASYGDVYISDAFGTAHRESATMTGIPKVLGHGAAGYLMEKEISYFAKVLGSPARPLVAIVGGAKVSDKIQLLDNMLQRIDHLIIGGAMAYTFLKAQGHKIGSSMCEEDKLDLARSLLKKAEDRKVTVLLPVDHVCHTEFKAVEAPLVTEGCGHPDGYMALDIGPRTIEKYVEIVAKCKSAIWNGPMGVFEMAPYSKGTFAIAKVMGDSTQNHGLMSIIGGGDSASAAELSGEAPRMSHVSTGGGASLELLEGKTLPGVAVLDDKE

SEQ ID NO: 10604 - DNA, 1440 bp, Leishmania major
  CDS (1)..(1440)
atgtctctcgtgctgaagaagagcatcgatgacgccaccgtcagggacaagaaggtgctcatccgcgtggacttcaacgtccccgtgaagaacggtaagatcacgaatgacttccgcattcgctccgcccttccgacgatccaaaaggtgctgaaggagggcggctcctgcatcctgatgagccaccttggtcggccgaagggtgcgagaatgagtgacccaagtccggagaagggtgtgcgcgggtacgaggaggccgccacgctgcgcccggttgctgcacgcatcgcggagctgctggggcagaaggtggagtttgcaccggactgcctggacgctgcggcgtacgcgtcgaagctgaagaacggcgacgtgctgttgctggagaacgtgcgtttctacgcggaggagggcagcaagaaggaggaggagcgcgacgcgatggcgaaggtactggcgtcgtacgcggacctgtatgtcagtgacgcctttggcactgcgcaccgcgacagcgcgacgatgacgggcatccccaaggtgctgggtgcgggctacgccgggtacctgatggagaaggagatcaactacttctcgcgagtgctgaacaacccgccgcggccgctggttgcgattgtcggcggtgcgaaggtcagcgacaagatcgagctgcttgacaacatgctgggccgcatcaactaccttgtgattggtggcgcgatggcgtacacgttccagaaggcgcagggccgcaagatcggcatctcgatgtgcgaggaggataagctggaccttgccaagtcgctgctgaagaaggcgcaagagcgcggtgtgcaggtgtttctgccagttgaccacgtgtgcaacaaggaatttaaggccgcggactcgccgctggtgacggagagcgtggacgtcccggacggctacatggcgctcgacattggcccaaggacgatccacatgtacgaggaagtgattggccgctgcaagagcgcgatctggaacggcccgatgggcgtgttcgagatgccgtgctactcgaagggcacatttgccgttgcgaaggcgatggggactggaacgcagaagaacgggctgctgagcatcatcggcggtggtgacagcgcgagcgctgcggagctgagcggcgaggcgaagaacatgtcgcatgtgtccaccggcggcggtgcgtccctggagctgctggagggcaagacgctgcctggcgtcgccattctgacggacaaggacgtgaaggagcggggagcttcgtgcaagttcgctttcggggtcgggagcccgagcagggaggcttgtccgctccgttgtgggcatatctttggcggtgcctccatcgtaagagagatagttaagatcgtcgtcgcgctgctgatcggcatttttattggtcgccgcatgagcaccaagctgatccggtaa

SEQ ID NO: 10605 - protein, 479 aa, Leishmania major
MSLVLKKSIDDATVRDKKVLIRVDFNVPVKNGKITNDFRIRSALPTIQKVLKEGGSCILMSHLGRPKGARMSDPSPEKGVRGYEEAATLRPVAARIAELLGQKVEFAPDCLDAAAYASKLKNGDVLLLENVRFYAEEGSKKEEERDAMAKVLASYADLYVSDAFGTAHRDSATMTGIPKVLGAGYAGYLMEKEINYFSRVLNNPPRPLVAIVGGAKVSDKIELLDNMLGRINYLVIGGAMAYTFQKAQGRKIGISMCEEDKLDLAKSLLKKAQERGVQVFLPVDHVCNKEFKAADSPLVTESVDVPDGYMALDIGPRTIHMYEEVIGRCKSAIWNGPMGVFEMPCYSKGTFAVAKAMGTGTQKNGLLSIIGGGDSASAAELSGEAKNMSHVSTGGGASLELLEGKTLPGVAILTDKDVKERGASCKFAFGVGSPSREACPLRCGHIFGGASIVREIVKIVVALLIGIFIGRRMSTKLIR

SEQ ID NO: 10606 - DNA, 1368 bp, Dictyostelium discoideum
  CDS (53)..(1315)
ggcacgaggttttttttatttttttttaatttttaacaaatcattaatcaaaatgtcttcaaataaaattggtaataaattaagtcttgacaaggtagatgtaaaaggtaaaagagttttaattagagttgattataatgtaccattagataaaaataataatattacaagtactcaaagaattgatgcatcaattccaacattagaatattgtttaaagaatggtgctaaatcaattgtattgatgtcacatttaggtcgtccagatggtttggttaaaccagagtatagtttgaaaccagtggttaaagtattggaagatcaattaaaaagaccaattaaattcttatcagattgtgttggtgaacaagttgaaaaagaatgtgcaaatccagaggaaggtaccgttattttattggagaatctccgtttccacattgaagaggaaggttcaggtgttgatgcagagggtaaaaaggtcaaagccaacccagagaaagttaaagaattccgtgaatcactcaccaagctcggtgatgtctatgtgaacgatgcctttggtactgctcatagagcacatagttcaatggttggtattaatctcccacaaaaagccgctggtttcctcatgaaaaaagaattggaatactttgccaaggctttagagtcaccatcaaaaccattcttggcaattcttggcggtgcaaaggttagtgataaaattaaactcattgaaaaccttttgtataaagtcgatgaaatgatcattggtggtggtatggccttcactttcaagaaattcattgataacaaagagattggttcatcattgtttgagaaaacagccgaacaaatcaccaaagatatcattgccaaagccgctaaaaataatgtaaaattacatttcccagtcgattatgtcattgccgataaatttgataatgatgccaacatcaaaaccgtcactcaagatcaaggtatcccagaaggttggatgggtttagattgtggtccagagactatcaaagaaaacagagataccatctcaagagcaaaaaccatcgtttggaatggtcctatgggtgtatttgaaaagagcaatttcgaagccggtacaaaagctgccatggatgatgttgtcaatgccacaaccaatggtgctatcactatcattggtggtggtgataccgccacttgtgctgccaaatacaacactgaagataaagttagtcatgtctcaactggtggtggtgcttcattagaattattagaaggtaaagaattaccaggtgttactgctttatctgatttatgaattttaaaaaataaattataaaaaaataataataataataataataataatac

SEQ ID NO: 10607 - protein, 420 aa, Dictyostelium discoideum
MSSNKIGNKLSLDKVDVKGKRVLIRVDYNVPLDKNNNITSTQRIDASIPTLEYCLKNGAKSIVLMSHLGRPDGLVKPEYSLKPVVKVLEDQLKRPIKFLSDCVGEQVEKECANPEEGTVILLENLRFHIEEEGSGVDAEGKKVKANPEKVKEFRESLTKLGDVYVNDAFGTAHRAHSSMVGINLPQKAAGFLMKKELEYFAKALESPSKPFLAILGGAKVSDKIKLIENLLYKVDEMIIGGGMAFTFKKFIDNKEIGSSLFEKTAEQITKDIIAKAAKNNVKLHFPVDYVIADKFDNDANIKTVTQDQGIPEGWMGLDCGPETIKENRDTISRAKTIVWNGPMGVFEKSNFEAGTKAAMDDVVNATTNGAITIIGGGDTATCAAKYNTEDKVSHVSTGGGASLELLEGKELPGVTALSDL

SEQ ID NO: 10608 - DNA, 1685 bp, Arabidopsis thaliana
  CDS (84)..(1529)
aaatggctaataaataagaacattgtgagtcactctctctgtttctcatctcctcatctttttatcttctttgattgatccacatggcttccgctgccgcaagttccgccttttcactccttaagtccaccggcgctgttgcttcctccgccggaactcgcgcacgtgcctcccttctgccaattccctctacctctgtttccgcgcgtcctctaggcttctccgccactctagattcccgtcgtttctctctccacgttgcttccaaagttgaatcggtgcgtgggaagggaagcagaggagtggtttctatggcgaagaagagcgtcggagatctgacctcagctgatttgaaggggaagaaggttttcgtgagagctgatctcaatgtacctctcgatgataatcagactatcactgacgataccagaatccgtgccgccattccaacgatcaagtatttgattgaaaatggtgctaaagttatcctctccactcatctgggaaggccaaagggagtcaccccaaagtttagtttggctcctcttgtccctaggctctccgagcttcttggtattgaggtcacgaaagctgatgattgtattggcccagaagtggaaagcttggtggcttctctacctgaaggtggagttttgcttcttgagaacgtcaggttttacaaggaggaagagaagaacgatcctgagtttgctaagaagcttgcttctctagctgacctttatgtcaatgatgctttcggaactgctcacagagctcatgcttctaccgaaggagtcactaagttcttgaagccttcagttgctggtttccttttgcaaaaggaactggactacctagttggtgctgtttcaaacccaaagagaccatttgcagccatagtgggtggttccaaagtctcatccaagattggagttattgaatcgcttctggagaagtgtgatattcttcttcttggtggtggaatgatcttcacattctacaaggcacagggtctttcagttggttcgtcccttgttgaagaagacaagcttgaattggctacagaactccttgccaaagctaaggccaaaggagtctctcttttgttgccaacagatgttgtagttgctgacaagtttgctcctgatgccaacagcaagattgtgcctgcatcaggcattgaggacggatggatgggactggacattggtccagactctatcaaaactttcaacgaagctctggacacaacacaaacagtcatttggaatggacctatgggagttttcgagatggaaaagtttgcggctggaacagaggcgatagcgaataaactagcagagctaagtgaaaaaggagtgacaacgataataggaggaggagactcagtggctgcagtggagaaagtaggagtagcaggagtcatgagtcacatctccactggtggtggagccagcttggagctgttggaaggaaaagtacttcccggtgtgatcgcccttgatgaagcaatcccagtcactgtttagaaactcttaccatctataaggcaaacgctgtatacttaaaagagtttctttcgctttaaatctacctatgcaaaactttactatgtatcagagtctcattccccggaaaagaaaactcacatattaaaattctgaaaaaaaatatcaagagataag

SEQ ID NO: 10609 - protein, 481 aa, Arabidopsis thaliana
MASAAASSAFSLLKSTGAVASSAGTRARASLLPIPSTSVSARPLGFSATLDSRRFSLHVASKVESVRGKGSRGVVSMAKKSVGDLTSADLKGKKVFVRADLNVPLDDNQTITDDTRIRAAIPTIKYLIENGAKVILSTHLGRPKGVTPKFSLAPLVPRLSELLGIEVTKADDCIGPEVESLVASLPEGGVLLLENVRFYKEEEKNDPEFAKKLASLADLYVNDAFGTAHRAHASTEGVTKFLKPSVAGFLLQKELDYLVGAVSNPKRPFAAIVGGSKVSSKIGVIESLLEKCDILLLGGGMIFTFYKAQGLSVGSSLVEEDKLELATELLAKAKAKGVSLLLPTDVVVADKFAPDANSKIVPASGIEDGWMGLDIGPDSIKTFNEALDTTQTVIWNGPMGVFEMEKFAAGTEAIANKLAELSEKGVTTIIGGGDSVAAVEKVGVAGVMSHISTGGGASLELLEGKVLPGVIALDEAIPVTV

SEQ ID NO: 10610 - DNA, 1501 bp, Pisum sativum
  CDS (61)..(1266)
acgcggggagtgtccgaactccgatctcaaccatccattatttgtgtaaagttgaagaaaatggcgacaaagagaagcgttggaacattgaaggaagctgatttgaagggaaagagggtttttgttagggttgatctaaacgttcctttggatgataacttgaacatcaccgatgataccagaatccgtgctgctattcctaccatcaagtacttgactggttatggtgctaaagtcatcctctcctcccatctgggacgtccaaagggtgtaacacctaagtacagtttgaagccccttgtaccaaggttgtctgaacttcttggatccgaggttacgattgctggtgacagtattggtgaggaggttgagaagttggttgcacaaattccagaaggtggtgttttgcttttagagaatgtgaggttccacaaggaagaggagaagaatgatcctgaatttgccaagaagttggcttcccttgccgatctttatgtgaatgatgcatttggcactgcccatcgtgctcatgcttctacagaaggtgttgctaaatacttgaagccctctgttgcaggattcctcatgcagaaggagcttgattatctagttggagctgtgtcaaaccccaagaaaccgtttgctgccattgttggtggttctaaggtgtcttccaagattggagttattgaatccttgttggagaaggttgacattctcttgcttggtggaggaatggtgtttaccttttacaaagctcaaggttattcagttgggacctctcttgtggaggaagacaagcttggtcttgcaacttcacttattgagaaagccaaggctaaaggagtttcccttttgcttccaactgatgtggttatagctgacaagttttctgctgatgctaacgacaagattgtaccagcatcaagcatccctgatggttggatgggattggatattggacctgattccatcaaaacatttaacgaagcattggacaagagtcaaaccgtaatttggaatgggccaatgggtgtttttgagtttgataagtttgccgcaggaacagaggccatagccaagaaactggcagaaataagtggcaaaggagtaacaaccatcattggaggaggtgactctgtagccgccgtggagaaggctggactagcagacaagatgagccacatctctaccggcggaggtgcgagcttagagcttcttgaggggaagccactacctggagtccttgctcttgatgatgcttaaacatgttgtattttgtgttatattataatggttgggtttcaaccaatgttggtttaattgaggttgtcactaaagagctgctcttttagaaggcttaatataggatagttttcaaaaataaaaatgtttttgcggcatccatggtgcttgatcaaattgttactggataatgttcatttttaaagagtgcttatttagttgttaaagaaaaaaaaaaaaaaaaaaaaaaaaaaaa

SEQ ID NO: 10611 - protein, 401 aa, Pisum sativum
MATKRSVGTLKEADLKGKRVFVRVDLNVPLDDNLNITDDTRIRAAIPTIKYLTGYGAKVILSSHLGRPKGVTPKYSLKPLVPRLSELLGSEVTIAGDSIGEEVEKLVAQIPEGGVLLLENVRFHKEEEKNDPEFAKKLASLADLYVNDAFGTAHRAHASTEGVAKYLKPSVAGFLMQKELDYLVGAVSNPKKPFAAIVGGSKVSSKIGVIESLLEKVDILLLGGGMVFTFYKAQGYSVGTSLVEEDKLGLATSLIEKAKAKGVSLLLPTDVVIADKFSADANDKIVPASSIPDGWMGLDIGPDSIKTFNEALDKSQTVIWNGPMGVFEFDKFAAGTEAIAKKLAEISGKGVTTIIGGGDSVAAVEKAGLADKMSHISTGGGASLELLEGKPLPGVLALDDA

SEQ ID NO: 10612 - DNA, 1350 bp, Phaeodactylum tricornutum
  CDS (1)..(1350)
atgttgttccgtatgttgacttcaacggctttgcggcgttcaccagtaaccaccagcttgacctgttgctgtaaagcaaatgcttttgcagtccgaattcgtagctttcacgctgccccagtgatccaagccaaaatgacggtcgagcaactggcccagcaagtccatatgaaagggaccaatgttctcgtgcgcgttgatttgaatgcccccctggccacggatgatgtaacggtgacggatgacacacgcctgcgcgccattgttccaaccacgaaattcttgctcgagcagggagccaacgtgattctctgcagccattttggccgacccaagggtgaaattatcgaaactggcaagaatggtcggctcaacccagtggtgaagccgctcgaagtactgctggggcagacgattaccaaacttgatgattgcatgggaccggatgttgaagccgcaacgaaaaatttgggtgagggaaaggttgtcttgttggaaaacacccgtttttacagcggagaaaccaagaacgatccggaactcgcagccgggctcggaaaacttgctgattatttcgtcatggacgcctttggcacggctcaccgagcacattcttcgactgccggtgtgaccacccatatgaagttcaacgctgctggaaaacttatggagaaggaattgcaatacttgcaaggtgccgtggaagagcccaaacgccccatgatggctattgtcggtggtgccaaagtatccaccaaaattccggtcatcgaatcgcttttggacaagtgcgatgtcattttgattggcggcggtatgatctttaccttttacaaggctctcggttacgacattggcgcatcgctcgtggaagacgacattgtggaattggcgagttcattgatgaaaaaggccgaagaaaagggtgtcaaactgattctgcctgttgacgttgtcctggctgataagtttgacaatgatgcaaactcggccgtggcgaaggtcaccgacatttccggagactggatgggactggacattggaccggaaacgatcgatttgtttcgtagcgaaattgccgaagccaatacaattgtttggaacggtccgatgggcgtctttgaatttagcaactttgcggctggcaccaacgatgttgcccagatgctcgcccaagccactgccgaacggggcgccgtcaccataattggtggtggcgactctgtggccgccgtcaacaaagcgggtttgggtgacaaggtttctcacatttcgacgggcggtggcgccagtttggagcttctggagggcaaggtattgcccggcgttgcggctttgacagaagtgtaa

SEQ ID NO: 10613 - protein, 449 aa, Phaeodactylum tricornutum
MLFRMLTSTALRRSPVTTSLTCCCKANAFAVRIRSFHAAPVIQAKMTVEQLAQQVHMKGTNVLVRVDLNAPLATDDVTVTDDTRLRAIVPTTKFLLEQGANVILCSHFGRPKGEIIETGKNGRLNPVVKPLEVLLGQTITKLDDCMGPDVEAATKNLGEGKVVLLENTRFYSGETKNDPELAAGLGKLADYFVMDAFGTAHRAHSSTAGVTTHMKFNAAGKLMEKELQYLQGAVEEPKRPMMAIVGGAKVSTKIPVIESLLDKCDVILIGGGMIFTFYKALGYDIGASLVEDDIVELASSLMKKAEEKGVKLILPVDVVLADKFDNDANSAVAKVTDISGDWMGLDIGPETIDLFRSEIAEANTIVWNGPMGVFEFSNFAAGTNDVAQMLAQATAERGAVTIIGGGDSVAAVNKAGLGDKVSHISTGGGASLELLEGKVLPGVAALTEV

SEQ ID NO: 10614 - DNA, 1326 bp, Phaeodactylum tricornutum
  CDS (1)..(1326)
atgaaattcgttcaagctgccatcttcgccctcgctgcctcggccagtactactgctgcttttgcccctgccaaaacctttggtgtccgtagctttgccccggtttctctgatcgagctcgaagccaaggcctccattgaagacctcagcgatgccgagcttaagggaaagaaggttctcgtccgttgcgacgtcaacgtccccctggacggtaagaagatcaccgacgatacccgaattcgttcctccatccctaccattgagtacttgaagaacaagggtgccatcgtcagtgtctgctcacatttgggacgccccaaggacggccccgaagataagttctccctcggaccttgcgccgagcgcatgggggaactcctcggacaaactgtaaccctcgcacccgactgcatcggtgaagaagtcgccaagattgtcaatgatgccaaggaaggcgatgttatcatgctcgagaacacccgcttctacaaggaagagaccaagaacgacccggaattcgtcgaaaagcttgccgctccctttgacctgtacgtcaacgacgcctttggaacggcccaccgtgcccatgcctccaccgaaggtgtgaccaagttcctcaaaccttccgttggaggattcttgctcgccaaggaactcgaataccttgatggtgccattagcaacggaaagaaacccatggccgccattgtcggtggatccaaggtctcttccaagatcaccgtcctcgaagccctgctcgataaatgcgacaaggtcatcatcggaggtggtatggtattcaccttcctcaaggcaaagggattcaatgttggtacctccctcgtcgaggatgactttgtggataccgccaaggaagtcttggccaaggccgaaaagttgggcaaggaaatccttcttcccattgatatcgtgattgccgacaagttcgacgcggaagccgagaccaaggtcgtaagtgccgaagaaatccctgatggctggatgggtctggacaacggtcccgaaaccaccgcacagcagaaggaagcactttccgactgcaagactatcatcatgaacggtcccatgggagtctttgagttcgaaaagttcgccaagggaacttttgaccttgtcaacatccttgccgatctttccaaagacaagggtgccattactattatcggaggaggtgattccgttgccgccactgaacagagcggacgtgccggtgacatgtcacacatctccaccggcggtggtgccagtttggagctgttggaaggaaaggtcctccccggtgtggccgcgctcaacgacaaataa

SEQ ID NO: 10615 - protein, 441 aa, Phaeodactylum tricornutum
MKFVQAAIFALAASASTTAAFAPAKTFGVRSFAPVSLIELEAKASIEDLSDAELKGKKVLVRCDVNVPLDGKKITDDTRIRSSIPTIEYLKNKGAIVSVCSHLGRPKDGPEDKFSLGPCAERMGELLGQTVTLAPDCIGEEVAKIVNDAKEGDVIMLENTRFYKEETKNDPEFVEKLAAPFDLYVNDAFGTAHRAHASTEGVTKFLKPSVGGFLLAKELEYLDGAISNGKKPMAAIVGGSKVSSKITVLEALLDKCDKVIIGGGMVFTFLKAKGFNVGTSLVEDDFVDTAKEVLAKAEKLGKEILLPIDIVIADKFDAEAETKVVSAEEIPDGWMGLDNGPETTAQQKEALSDCKTIIMNGPMGVFEFEKFAKGTFDLVNILADLSKDKGAITIIGGGDSVAATEQSGRAGDMSHISTGGGASLELLEGKVLPGVAALNDK

SEQ ID NO: 10616 - DNA, 1530 bp, Trypanosoma brucei
  CDS (1)..(1530)
atgtccactgcaccgaatgcgaagaacaacataagcctgaagaagtctgtgggcgatgtttggccgttaacggcgaagcgagtgcttatgcgtgtcgatttcaacgttcctatgcaaaatggccatattactaacgattatcgaatccgtgcggcgattccaacgatacggcgggttattgatcagggtggtatttgtattctcctgagccatcttggacggcccagaggcgtttcaatggttgcgggtgtgcgagatataagacggcgatatcacgaggctcagtttcacgacaacaaaggtaaaacagcgttttttagtgttctaccgggagaggagaaagttaaaatattagcgaaatccagtgcacgggaagaggcaacgcacatatcacctgaggtgaaatctggaaaaacaatgctgtttgcgcgccttcctgaggacgagaagaaatctttgcttatgcagtacttaaacgaaaacaaagacagtgcgttaccgcagatgagtgttagtgcaggctacgaagagcaatacagtcttcgtccagttgctgtaaggcttgccgaattactcggccaacatgtatattttgctcacgactgcttggatgccagagtagaggtttcgcggttaaagcgtggaaatgttatgttacttgaaaatgtacggttctacagcgaagaaaacggtgaaaatgctgaggaacgtgaagccatggccaagatccttgcgtcatatggtgatgtttacatcagtgatgcttttggtgcagctcaccgtgacagtgctaccatgaccggaattccaaagattttgggtcacggtgctgccggttatttgatggagaaggagatttcatacttcgctaaggtacttggtaacccgccgcgtccgctggttgctatcgttggtggagcgaaagtgagcgaaaagatccaacttctggataacatgttgcagcgcatcgattatctcttaattggtggtgcaatggcatacacatttctgaaggctcagggttacagcattggaaaatcgaagtgcgaggaaagtaaacttgaatttgctcgatccctgctgaagaaggcggaggaccgcaaggtgcagattattcttccaattgatcatgtttgccacacggaattcaaagctgtggattctccattgataactgaggatcaaaacatccctgaaggacatatggctctggatattggtcccaagactattgaaaaatatgttcagacgattgggaagtgtaagagcgccatttggaacggtcccatgggtgtatttgaaatggttccttattccaaaggtacatttgcaattgcgaaagccatgggtcgaggaactcagaaacgtggactcatgagtatcatcggtggtggtgagagtgcgggtgcggctgaactctgtggtgaagctgcacgtatttctcatgtttcaactggtggtggtgcgtctttggaactcctcgagggcaaaacgcttcccggtgttgcagtattggatgataaggagtaa

SEQ ID NO: 10617 - protein, 509 aa, Trypanosoma brucei
MSTAPNAKNNISLKKSVGDVWPLTAKRVLMRVDFNVPMQNGHITNDYRIRAAIPTIRRVIDQGGICILLSHLGRPRGVSMVAGVRDIRRRYHEAQFHDNKGKTAFFSVLPGEEKVKILAKSSAREEATHISPEVKSGKTMLFARLPEDEKKSLLMQYLNENKDSALPQMSVSAGYEEQYSLRPVAVRLAELLGQHVYFAHDCLDARVEVSRLKRGNVMLLENVRFYSEENGENAEEREAMAKILASYGDVYISDAFGAAHRDSATMTGIPKILGHGAAGYLMEKEISYFAKVLGNPPRPLVAIVGGAKVSEKIQLLDNMLQRIDYLLIGGAMAYTFLKAQGYSIGKSKCEESKLEFARSLLKKAEDRKVQIILPIDHVCHTEFKAVDSPLITEDQNIPEGHMALDIGPKTIEKYVQTIGKCKSAIWNGPMGVFEMVPYSKGTFAIAKAMGRGTQKRGLMSIIGGGESAGAAELCGEAARISHVSTGGGASLELLEGKTLPGVAVLDDKE

SEQ ID NO: 10618 - DNA, 1263 bp, Trypanosoma brucei
  CDS (1)..(1263)
atgtcactaaaagagaggaagagcattaatgaatgcgatcttaagggaaagaaggttcttatccgtgttgactttaatgttcctctggatgatggtaatattaccaacgactaccgaatccgatcagctcttccagccgtccaaaaagttctcacagaaggcggcagttgtgttctcatgagccacctcgggaggccgaaaggcgtttctatggctgaaggcaaagaactgcggagcactggcggtattcccgggttcgagcagaaggcaacactcaaaccggtagccaagcgcctcagcgaattgttatcgagacccgtcacattcgcacctgactgcctgaatgctgcagatgtcgtctctaagatgtctccgggcgatgttgttctgcttgaaaatgtacgcttctacaaagaagagggcagcaagagcactgaggaacgtgaagccatggccaagatccttgcgtcatatggtgatgtttacatcagtgatgcttttggtacagctcaccgtgacagtgctaccatgaccggaattccaaagattttgggtcacggtgctgccggttatttgatggagaaggagatttcatacttcgctaaggtacttggtaacccgccgcgtccgctggttgctatcgttggtggagcgaaagtgagcgacaagatccaacttctggataacatgttgcagcgcatcgattatctcttaattggtggtgcaatggcatacacatttctgaaggctcagggttacagcattggaatatccatgtgcgaggaaagtaaacttgaatttgctcgatccctgctgaagaaggcggaggaccgcaaggtgcaggttattcttccaattgatcatgtttgccacacggaattcaaagctgtggattctccattgataactgaggatcaaaacatccctgaaggacatatggctctggatattggtcccaagactattgaaaaatatgttcagacgattgggaagtgtaagagcgccatttggaacggtcccatgggtgtatttgaaatggttccttattccaaaggtacatttgcaattgcgaaagccatgggtcgaggaactcacgagcatggactcatgagtatcatcggtggtggtgacagcgcaagtgcagctgagttgagcggtgaggcgaagcgcatgtctcatgtttcaactggtggtggtgcgtctttggaactcctcgagggcaaaacgcttcccggcgttacagtattggacgaaaaggagtaa

SEQ ID NO: 10619 - protein, 420 aa, Trypanosoma brucei
MSLKERKSINECDLKGKKVLIRVDFNVPLDDGNITNDYRIRSALPAVQKVLTEGGSCVLMSHLGRPKGVSMAEGKELRSTGGIPGFEQKATLKPVAKRLSELLSRPVTFAPDCLNAADVVSKMSPGDVVLLENVRFYKEEGSKSTEEREAMAKILASYGDVYISDAFGTAHRDSATMTGIPKILGHGAAGYLMEKEISYFAKVLGNPPRPLVAIVGGAKVSDKIQLLDNMLQRIDYLLIGGAMAYTFLKAQGYSIGISMCEESKLEFARSLLKKAEDRKVQVILPIDHVCHTEFKAVDSPLITEDQNIPEGHMALDIGPKTIEKYVQTIGKCKSAIWNGPMGVFEMVPYSKGTFAIAKAMGRGTHEHGLMSIIGGGDSASAAELSGEAKRMSHVSTGGGASLELLEGKTLPGVTVLDEKE

SEQ ID NO: 10620 - DNA, 1323 bp, Trypanosoma brucei
  CDS (1)..(1323)
atgacccttaacgagaagaagagcattaatgaatgcgatcttaagggaaagaaggttcttatccgtgttgactttaatgttcccgtgaaaaacggtaagatcaccaacgactaccgaatccgatcagctctgccaacgctcaagaaggttctcacagaaggcggcagttgtgttctcatgagccacctcgggaggccgaaaggtattcccatggcgcaagctgacaaaatacggagcactggcggtgttcccgggttccaacagaaggcaacactcaaaccggtagccaagcgcctcagcgaactgctattgaggcccgtcacattcgcacctgactgcctgaatgctgcagatgtcgtctctaagatgtctccgggcgatgttgttctgcttgaaaatgtacgcttttacaaagaagagggcagcaagaaggcaaaagaacgtgaagccatggccaagatccttgcgtcatatggtgatgtttacatcagtgatgcttttggtacagctcaccgtgacagtgctaccatgaccggaattccaaagattttgggcaacggtgctgccggttatttgatggagaaggagatttcatacttcgctaaggtacttggtaacccgccgcgtccgctggttgctatcgttggtggagcgaaagtgagcgacaagatccaacttctggataacatgttgcagcgcatcgattatctcttaattggtggtgcaatggcatacacatttctgaaggctcagggttacagcattggaaaatcgaagtgcgaggaaagtaaacttgaatttgctcgatccctgctgaagaaggcggaggaccgcaaggtgcaggttattcttccaattgatcatgtttgccacacggaattcaaagctgtggattctccattgataactgaggatcaaaacatccctgaaggacatatggctctggatattggtcccaagactattgaaaaatatgttcagacgattgggaagtgtaagagcgccatttggaacggtcccatgggtgtatttgaaatggttccttattccaaaggtacatttgcaattgcgaaagccatgggtcgaggaactcacgagcatggactcatgagtatcatcggtggtggtgacagcgcaagtgcagctgagttgagcggtgaggcgaagcgcatgtctcatgtttcaactggtggtggtgcgtctttggaactcctcgagggcaaaacgcttcccggcgttgcagtattggacgaaaagtcggcggttgtgtcgtatgcctctgcaggtactggaactctttctaaccggtggagctctctttaa

SEQ ID NO: 10621 - protein, 440 aa, Trypanosoma brucei
MTLNEKKSINECDLKGKKVLIRVDFNVPVKNGKITNDYRIRSALPTLKKVLTEGGSCVLMSHLGRPKGIPMAQADKIRSTGGVPGFQQKATLKPVAKRLSELLLRPVTFAPDCLNAADVVSKMSPGDVVLLENVRFYKEEGSKKAKEREAMAKILASYGDVYISDAFGTAHRDSATMTGIPKILGNGAAGYLMEKEISYFAKVLGNPPRPLVAIVGGAKVSDKIQLLDNMLQRIDYLLIGGAMAYTFLKAQGYSIGKSKCEESKLEFARSLLKKAEDRKVQVILPIDHVCHTEFKAVDSPLITEDQNIPEGHMALDIGPKTIEKYVQTIGKCKSAIWNGPMGVFEMVPYSKGTFAIAKAMGRGTHEHGLMSIIGGGDSASAAELSGEAKRMSHVSTGGGASLELLEGKTLPGVAVLDEKSAVVSYASAGTGTLSNRWSSL

SEQ ID NO: 10622 - DNA, 1908 bp, Pseudomonas sp
  CDS (213)..(1376)
cacgccagctgtgatttcaacaatgacccgcactcggcgattgttgacgccagccagacccgcgtttccggcccccggctggtgaacctgctggcgtggttcgacaacgaatgggggtttgccaatcgaatgatcgatgtggctgagcactatctgcacgtaactcacccaaaacccgctctctaacattagaaactcaggaactgcgacccatgaccgtgttgaagatgaccgacctcgatctgcaaggtaagcgcgtgctgatccgcgaagacctcaacgtcccagtcaaggacggtgttgtcaccagcgatgcgcgcatccttgcttcgctgccgaccatcaagctggcgttggaaaaaggcgcggcagtcatggtctgctcgcacctgggccgtccgactgaaggcgagttttcagcagaaaacagcctcaagcctgttgctgattacttgagcaaggcgctgggccgtgaagtgccgctggtgagcgactacctcaatggcgtggacgttaaagccggcgacatcgtgctgttcgaaaacgtgcgcttcaacaaaggcgaaaagaaaaacgctgacgaattggccaagcaatacgcggccctgtgcgacgtgtttgtgatggatgcctttggcactgcacaccgcgccgaaggtccgacccacggcgtggccaagttcgccaaagtggcggctgcgggcccgttgctggcggcggaactggacgcactgggcaaagccctgggtgctccggccaagccaatggctgcgattgttgcaggctccaaggtgtcgaccaaacttgacgtactcaacagcctgagccagatctgcgacctgctgatcgttggcggtggcattgccagcacgttcctcgcggcggccggtcatccggtgggcaagtcgctgtacgagcctgatttgctggacaccgcgcgtgccatcgccgccaaggtcaacgtgccgttgcctaccgatgtggtcgtggccaaggaatttgctgaaagcgccgaagccaccgtcaagctgattgctgacgtggcagcagacgacatgattctggatatcggcccacaaacagccgagcacttcgcgcagctgttgaagacctcgaagactatcctgtggaacggacctgtcggcgtgttcgagttcgatcagttcggcaacggtaccaaagtgctggccaaggccatcgccgacagcgctgcattttctattgcaggcggcggcgacacattggcggccatcgacaagtacggtgtggccgatcaaatttcctacatctccaccggtggcggtgcattccttgagttcgttgaaggcaaagtgctgcctgctgtagaagtgctggaaagccgcgccaaagcctgaaaatgattcaggccctgaaaggtagcatggacatggtcaacgttgttaccgctgttgatgatcgcgggcttgttggccggttgcgccggttcaagcgagtcagtacctgaagcggctacgcctgaagagagcggctgctatcaggccgactggcaggcgcagagcttgccattggtcaataaacgatcagggccgcaagcgctggaaaaatacgagtcacccacgccttcaaaagtacgcgggtgcccatgatttgaacacgccagctcctacagagcggcgtgtagctatggctggagctgtaacgtttcagcgaaaacgaattcgcagtaaagggctaaaccccgatctgcaaaaacttgaatagcagctgccgctacggcaggcttgcacgattaacgaccctcgtccgggagagagacacacaatggcacttatcagcatgcgtcaggtgctggaccacgccgccgaattcggctacggcgttccagctttcacgtcaccaaccttgagccagatgcgcgccattatt

SEQ ID NO: 10623 - protein, 387 aa, Pseudomonas sp
MTVLKMTDLDLQGKRVLIREDLNVPVKDGVVTSDARILASLPTIKLALEKGAAVMVCSHLGRPTEGEFSAENSLKPVADYLSKALGREVPLVSDYLNGVDVKAGDIVLFENVRFNKGEKKNADELAKQYAALCDVFVMDAFGTAHRAEGPTHGVAKFAKVAAAGPLLAAELDALGKALGAPAKPMAAIVAGSKVSTKLDVLNSLSQICDLLIVGGGIASTFLAAAGHPVGKSLYEPDLLDTARAIAAKVNVPLPTDVVVAKEFAESAEATVKLIADVAADDMILDIGPQTAEHFAQLLKTSKTILWNGPVGVFEFDQFGNGTKVLAKAIADSAAFSIAGGGDTLAAIDKYGVADQISYISTGGGAFLEFVEGKVLPAVEVLESRAKA

SEQ ID NO: 10624 - DNA, 1449 bp, Drosophila melanogaster
  CDS (11)..(1357)
tttatttaatatgcttccaattcggcagagtttataccaaagagctcaaactcgatttacaaaattaagatttccaagattttttagcaaagacgattgcaatggaaagcaagtaaagaagttgagcttaaaaaatgtagatgtggctgggaaaagggtttttatgagagtggactttaatgtacccatgaaagatggcaaaataaccaacaaccaacgaattgtttccgcacttcccagtattaaatatgccttggacaagaaatgtaagtccttggttttggcatcccacttggggcgtccggatggcaaaaagaacaaaaagtttagcctggaacccgtggccaaggagctggagagtgtgctgggccagccggttcaattcctggacgactgcgtgggtgatagcaccctgagagctttgaaggatccctccgacggcactgtgttcctgttggagaatcttcgtttctatgccgaggagacgggcagcagcaaggacgataacaagaagaaggtcaaagcagatcccgcgaaggtgaaggaattccgagccaagttggcgcagctgggcgagatctatgtgaacgatgcctttggaacagcacatcgtccgcatagttccatgatgggcgatggctacaaggtgcgagcggctggtttcctgctggacaaggaactggagtactttgccaaggttctccacgatccggccaagccctttttggccattctgggtggcgccaagatagccgataaaattccactgataacgaacctcctgaacaatgtaacggccatgatcatatccggtggcatggccttcacctttctcaaagtgctcaatggcatggagattggaaagtccctcttcgacgagaagggatccgagttggtcaacgacatagtctgcaaggcgaaggagaaggacgtgaatatactatttccgattgactttgtcatagccaataagatcgacaaggagccggataaagtggaacatgtggatgccacacagggcataccggaggacatgatgggtctggaccacggccaggcatccagtcagatgtttgctggcgctatttgtgcatccaaaaccatcgtctggaacggaccgccaggcttgttcgaaaacgagctattctccaaaggcaccgagtccatgctggaggcagtaatcggggccactaaccgaggagccaccacaatcgttggtggtggggatacggccaccgcttgcttgaagttcggaggcgccgacaaggtctcgcatgtgtccaccggtggaggagcttccctggagttgctggagggtaaggttctgcctggagtggctgctctttcggatgcctaaacgcactgctttacaatggttattccacttatatgtacatgtatcttaaattcaatttggacaatttaaacaatcagtctctcaaaatacaa

SEQ ID NO: 10625 - protein, 448 aa, Drosophila melanogaster
MLPIRQSLYQRAQTRFTKLRFPRFFSKDDCNGKQVKKLSLKNVDVAGKRVFMRVDFNVPMKDGKITNNQRIVSALPSIKYALDKKCKSLVLASHLGRPDGKKNKKFSLEPVAKELESVLGQPVQFLDDCVGDSTLRALKDPSDGTVFLLENLRFYAEETGSSKDDNKKKVKADPAKVKEFRAKLAQLGEIYVNDAFGTAHRPHSSMMGDGYKVRAAGFLLDKELEYFAKVLHDPAKPFLAILGGAKIADKIPLITNLLNNVTAMIISGGMAFTFLKVLNGMEIGKSLFDEKGSELVNDIVCKAKEKDVNILFPIDFVIANKIDKEPDKVEHVDATQGIPEDMMGLDHGQASSQMFAGAICASKTIVWNGPPGLFENELFSKGTESMLEAVIGATNRGATTIVGGGDTATACLKFGGADKVSHVSTGGGASLELLEGKVLPGVAALSDA

SEQ ID NO: 10626 - DNA, 1239 bp, Methanosarcina acetivorans
  CDS (1)..(1239)
atgtctcagaaaactgctggaaaggattatttaactatggatgatgttgaactggataacaaaagaatacttttaagagtggactttaattcacctatggatgctaatggaaacatcctggatgatagaaaaattaagagccatttgtatacattgcggtccttggagaactcaagagtagttatgatgtctcatcagggtagacccggagataaggactatacaactctggaagctcatgcaaagctggcgacagaacttctgggcaggaaagtaacctatgaggatgacatattcagcgcttgcgcaaggaatgccataaaatcccttgagaaaggagatatcttgctccttgagaacacacgtttctatgccgaagagaacatgaatcgtgctcctgaagaacaggccagaacccagatggtacggaagctgtatcctttatttgatgtatttataaatgatgccttttcagtttctcacaggtctcaatgttctgtggtagggtttacagaggttttgcccagtgttgccggtatcctcatggatagggaaattacaggcctggacaaaggcttgaaatgtcatgaacatccggcagtcttcgcgctgggaggaacaaaagccaaagatatcgttaaggtcatttctgatattctcaagcggggtggcgctgacagaatccttactaccggggttgtagctacagtattcatgatggctataggcatcgaggtaggcgaggtcaacaggaaattcattgaggaccataaatatctggaccaggtttctatcgcttccaggctgctcaaggaatattcaggcaagatcatagtgcctaaggatatagcgctaaacaatgacggaaaacgtgaggaagtcaaagtggacaagataaagggagatcttccaatagctgatattggcccggagacaatatcagattattctaagtttcttaaagaagcaaagttaagcgtttttcacggcccggctggtattttcgagttagagagtttcaggctaggcaccgaagaacttcttaaagctgcagctcaatcaaattactctattgcaggaggagggcataccctagccgccattgatcaacttggcctggaatcaaaatattcccacttaagcatgggtggaggtgcgagcataacctatctctctggcgagcacatgccaggaattgaggctctaaaaaattatgcatccaggtgctgtaaagattaa

SEQ ID NO: 10627 - protein, 412 aa, Methanosarcina acetivorans
MSQKTAGKDYLTMDDVELDNKRILLRVDFNSPMDANGNILDDRKIKSHLYTLRSLENSRVVMMSHQGRPGDKDYTTLEAHAKLATELLGRKVTYEDDIFSACARNAIKSLEKGDILLLENTRFYAEENMNRAPEEQARTQMVRKLYPLFDVFINDAFSVSHRSQCSVVGFTEVLPSVAGILMDREITGLDKGLKCHEHPAVFALGGTKAKDIVKVISDILKRGGADRILTTGVVATVFMMAIGIEVGEVNRKFIEDHKYLDQVSIASRLLKEYSGKIIVPKDIALNNDGKREEVKVDKIKGDLPIADIGPETISDYSKFLKEAKLSVFHGPAGIFELESFRLGTEELLKAAAQSNYSIAGGGHTLAAIDQLGLESKYSHLSMGGGASITYLSGEHMPGIEALKNYASRCCKD

SEQ ID NO: 10628 - DNA, 1263 bp, Trypanosoma congolense
  CDS (1)..(1263)
atgacgctgaacgagaagaagagcattaacgagtgtgaccttaaggggaagaagacccttgtccgcgttgacttcaatgtccccgtgaaaggcggggtgatcaccaacgactatcgcatccggtcagcacttccaacaattcaaaaggtactgaatgagggtggcagctgcatcctgatgagccacctgggcaggccgaaggggatttcgatctctgaggccgccgcggtgcgcagcgctggtaaggtgcccggctacgaggaggcggctaccctacggcctgttgcacaaaggctcggcgagcttctgtcgaagcctgtcgtgttcgcacccgactgtttggacgccgctgatgtcgtcaagaagatgtctcctggagatgttgtactgttggagaatgtgcgcttctaccgcgaggagggcagcaagaaggaggaggagcgcgaggccatggccaaggtcctcgcgtcctacggtgatatcttcgtgagcgacgcctttggcaccgcgcaccgtgacagcgccacgatgacgggcatcccgaaggtgcttgggcacggcgctgctggttacctgatggagaaggagatctcgtacttctccaaggtgcttggcaacccgccgcgtccactggtggcgattgttggcggctcgaaggtgagcgataagattcagctgcttgacaatatgctgcagcgaatcgactacctgttgattggcggggcgatggcgtacaccttcttgaaggcacaaggccaccgcattggcacctcgatgtgtgaggaggacaggctggacctcgcacggtcgctgctgaagaaggctgaggaccgcaaagtgcaggtgctgctgccggtggaccacgtgtgccacacggagttcaaggcagttgatacgcctgtggtgacggctgatgccgatatcccggatggccacatggcactggacattggccccaagacaattgcgaattatgttgagacgattggtaaatgcaagagtgcgatttggaatggccccatgggcgtgtttgaaatgacgccgtactcgaagggcacgtttgctgttgccaaggcgatgggcgactgcactcaaaagaacggactgatgagcatcatcggtggcggtgacagtgcgagtgctgctgagcagagcggtgaagcgacgcgcatgtcacacgtgtccactggtggcggtgcctcactggagctgcttgagggcaaaacgctcccaggcgtcgccatattggatgagaaagtatga

SEQ ID NO: 10629 - protein, 420 aa, Trypanosoma congolense
MTLNEKKSINECDLKGKKTLVRVDFNVPVKGGVITNDYRIRSALPTIQKVLNEGGSCILMSHLGRPKGISISEAAAVRSAGKVPGYEEAATLRPVAQRLGELLSKPVVFAPDCLDAADVVKKMSPGDVVLLENVRFYREEGSKKEEEREAMAKVLASYGDIFVSDAFGTAHRDSATMTGIPKVLGHGAAGYLMEKEISYFSKVLGNPPRPLVAIVGGSKVSDKIQLLDNMLQRIDYLLIGGAMAYTFLKAQGHRIGTSMCEEDRLDLARSLLKKAEDRKVQVLLPVDHVCHTEFKAVDTPVVTADADIPDGHMALDIGPKTIANYVETIGKCKSAIWNGPMGVFEMTPYSKGTFAVAKAMGDCTQKNGLMSIIGGGDSASAAEQSGEATRMSHVSTGGGASLELLEGKTLPGVAILDEKV

SEQ ID NO: 10630 - DNA, 1251 bp, Methanosarcina acetivorans
  CDS (1)..(1251)
atgctgagggtaatgacttccagaaactttcttacgatcgatgactttgacatacgcggaaagacgattcttttaagggtcgacatgaactctcctatggacacacagggccacattctggacgatatgaggattaaaagccatattgcgaccttgaaagaccttgagagcgcaaaagtcgttctgcttgctcaccagagcaggcccgggaaaaaagatttcactactatgaaacctcatgcccacctgctgtcaagatatctgggcaagcaagttacttatgtggatgacattttcgggacatttgcaaaaacccatatagcctctatggaggacggggacgtaatcatgctcgaaaacgtccggttttattcggaagaaagccttgaaagaacacctgcagagcaggctaatacctatatggttaaaaaactggcaccttttgttgatattttcctgaacgacgcctttgcagtagctcacaggtctcatctctcggttgtaggctttaccgaggtccttccgtcaggcgcgggtagggtaatggaaaaagagcttgtttctctggatcggggagtaaaaggaggagaaaggccaagcattttcgtgctgggtggggcaaaggtagacgattctctgagagtgaccgaaaacgtccttacaagtggcggggctgacagggtgctgcttacaggtgtggttgcaaatgttgctcttgctgcttcgggagtaaacatcgggaaagtcaacatggatttcatcaaatctcagggttacgaaaaccagattgaaaaagcaagaggcttgcttgcgaagtttaaagacaggatcggccttccaaaagacgtagccttaaacgataacagggaacgcgttgaagttcatatctccgagctaaactccgattctctgcctattaatgatattgggctcgaaactattgtggactatacaaatgaaatccagaactccaaaaccgttgtcttaaacggtcctgcaggagtttccgagattgaagattttgccctcgggacccacgaaattataaaagctgccattaaatccgatttctcgatcattggcggcggtcacatctcagttgaggttgcacatctaggccttgaacaccgcttctcgcatatcagcacaggtgggggagcctgtattgattatcttgcaggagaaaagctgccgggagtcgagtctctgaaagctgcctacataaaatatcaggaagctaaaaagctttaa

SEQ ID NO: 10631 - protein, 416 aa, Methanosarcina acetivorans
MLRVMTSRNFLTIDDFDIRGKTILLRVDMNSPMDTQGHILDDMRIKSHIATLKDLESAKVVLLAHQSRPGKKDFTTMKPHAHLLSRYLGKQVTYVDDIFGTFAKTHIASMEDGDVIMLENVRFYSEESLERTPAEQANTYMVKKLAPFVDIFLNDAFAVAHRSHLSVVGFTEVLPSGAGRVMEKELVSLDRGVKGGERPSIFVLGGAKVDDSLRVTENVLTSGGADRVLLTGVVANVALAASGVNIGKVNMDFIKSQGYENQIEKARGLLAKFKDRIGLPKDVALNDNRERVEVHISELNSDSLPINDIGLETIVDYTNEIQNSKTVVLNGPAGVSEIEDFALGTHEIIKAAIKSDFSIIGGGHISVEVAHLGLEHRFSHISTGGGACIDYLAGEKLPGVESLKAAYIKYQEAKKL

SEQ ID NO: 10632 - DNA, 1254 bp, Rhizopus niveus
  CDS (1)..(1254)
atgtctttatctaacaaactttctatccgtgaccttgacctcaagaataagcgtgtccttattcgtgttgacttcaacgttcccatgaaggatggtgctatcaccaacaacaaccgtattgttcaagctcttcctactgtcaagtatgctcttgacaatggtgcttctgctgtcatcttgatgtctcacttgggtcgtcctaacggtgaagctgttgccaagtactctcttaagcccgttgctgctgaagtggagaagcttttgggtaagcccgtcgaattcctcaacgactgtgtaggtcccgatgtcgaaaaggcctgtcaatctgctactggtggtaaggtcatccttttggaaaaccttcgtttccacatcgaagaagaaggttctgccaaggtccgatggtcaaaggtcaaggcagatgctgaagctgtcaaaaagttccgtgcatctttgactgctcttgctgatatctatgtcaatgatgccttcggtaccgctcaccgtgctcactcttctatggtcggtgttgacctttctcaacgtgctgctggtttccttatgcaaaaagaactcgagtactttgccaaggctctcgaaaatcccgctcgtcctttccttgctatcctcggtggtgccaaggtctccgataagatccaattgattgaaaacatgcttgacaaggtaaacgctttgattgtctgtggtggtatggctttcactttcaagaagacgcttgataacgtcaagcagattggtaagtctctctttgatgaagctggttccaagttggtacgaaaccttgtcaagaaggccgccgaaaagaacgtcaaactcgttttccctgttgactttgtcactgctgataaattcgctcctgatgctaacactggttatgcaaccgatgctgatggtattcctgatgaatgggaaggccttgactgtggtaaaaaatcctccgagttgttccgtgaagaaatcttgaagtccaagaccatcgtctggaacggtccctctggtgtattcgaattcgatgcttttgctaatggtaccaagtctgttcttaatgctgtcatcgaagctacaaaggaaggtgctactacaatcattggtggtggtgacactgctactgctgctctcaagtggggtgctgaaggtaaagtttctcacatctctactggtggtggtgcctctcttgaactcctcgaaggcaaagaacttcctggtgtcaccgctctttctagcaagaattaa

SEQ ID NO: 10633 - protein, 417 aa, Rhizopus niveus
MSLSNKLSIRDLDLKNKRVLIRVDFNVPMKDGAITNNNRIVQALPTVKYALDNGASAVILMSHLGRPNGEAVAKYSLKPVAAEVEKLLGKPVEFLNDCVGPDVEKACQSATGGKVILLENLRFHIEEEGSAKVRWSKVKADAEAVKKFRASLTALADIYVNDAFGTAHRAHSSMVGVDLSQRAAGFLMQKELEYFAKALENPARPFLAILGGAKVSDKIQLIENMLDKVNALIVCGGMAFTFKKTLDNVKQIGKSLFDEAGSKLVRNLVKKAAEKNVKLVFPVDFVTADKFAPDANTGYATDADGIPDEWEGLDCGKKSSELFREEILKSKTIVWNGPSGVFEFDAFANGTKSVLNAVIEATKEGATTIIGGGDTATAALKWGAEGKVSHISTGGGASLELLEGKELPGVTALSSKN

SEQ ID NO: 10634 - DNA, 1750 bp, Leishmania major
  CDS (166)..(1419)
gtgtgcaatatcctttattggtcttcgctaatatgtctcgctacatcgagtacgccgcacgcacaatacgtgtctcacatgaacttgcccatcagcgcgtcagcagcaaaacatttctcttgtccctcgcctccaataaccttacgtatccccctccgccgagccatgtctctcgtgctgaagaagagcatcgatgacgccaccgtcagggacaagaaggtgctcatccgcgtggacttcaacgtccccgtgaagaacggtaagatcacgaatgacttccgcattcgctccgcccttccgacgatccaaaaggtgctgaaggagggcggctcctgcatcctgatgagccaccttggtcggccgaagggtgcgagaatgagtgacccaagtccggagaagggtgtgcgcgggtacgaggaggccgccacgctgcgcccggttgctgcacgcatcagcgagctgctggggcagaaggtggagtttgcaccggactgcctggacgctgcgtcgtacgcgtcgaagctgaagaacgcggacgtgctgttgctggagaacgtgcgtttctacgcggaggagggcagcaagaaggaggaggagcgcgacgcgatggcgaaggtactagcgtcgtacggcgacgtgtatgtcagtgacgcgtttggcactgcgcaccgcgacagcgcgacgatgacgggcatccccaaggtgctgggtgcgggctacgccgggtacctgatggagaaggagatcaactacttctcgcgagtgctgaacaacccgccgcggccgctggttgcgattgtcggcggtgcgaaggtcagcgacaagatccagctgcttgacaacatgctgggccgcatcaactaccttgtgattggtggcgcgatggcgtacacgttccagaaggcgcagggccgcaagatcggcatctcgatgtgcgaggaggataagctggaccttgccaagtcgctgctgaagaaggcgcaagagcggaatgtgcaggtgtttctgccagttgaccacgtgtgcaacaaggaatttaaggccgcggactcgccgctggtgacggagagcgtggacgtcccggacggctacatggcgctggacattggcccaaggacgatccacatgtacgaggaagtgattggccgctgcaagagcgcgatctggaacggcccgatgggcgtgttcgagatgccgtgctactcgaagggcacatttgccgttgcgaaggcgatggggactggaacgcagaagaacgggctgatgagcatcatcggcggtggtgacagcgcgagcgctgcggagctgagcggcgaggcgaagaacatgtcgcatgtgtccaccggcggcggtgcgtccctggagctgctggagggcaagacgctgcctggcgtcgccattctgacggacagagaatgagtgttgccctcatacgcaaagtgagccgtaaatcctttgataagctcttctctcagcttccgtcgaatcttgtcatgggtggccgcgacggcagcgtgtcgctacagacttctgtcttctattcgtattgtgacctacagatgtgcctctagctgtttctttcatacctctgtaacggtttctcttgtctcttgcactgtcctctacatacacacacatatatatatatatatgtatggtttgtgctcctcctgtttctcgatgaggggagaagtctcgacgacttcagagtcggcgacgccctccgctgtcatttggtctccctctctct

SEQ ID NO: 10635 - protein, 417 aa, Leishmania major
MSLVLKKSIDDATVRDKKVLIRVDFNVPVKNGKITNDFRIRSALPTIQKVLKEGGSCILMSHLGRPKGARMSDPSPEKGVRGYEEAATLRPVAARISELLGQKVEFAPDCLDAASYASKLKNADVLLLENVRFYAEEGSKKEEERDAMAKVLASYGDVYVSDAFGTAHRDSATMTGIPKVLGAGYAGYLMEKEINYFSRVLNNPPRPLVAIVGGAKVSDKIQLLDNMLGRINYLVIGGAMAYTFQKAQGRKIGISMCEEDKLDLAKSLLKKAQERNVQVFLPVDHVCNKEFKAADSPLVTESVDVPDGYMALDIGPRTIHMYEEVIGRCKSAIWNGPMGVFEMPCYSKGTFAVAKAMGTGTQKNGLMSIIGGGDSASAAELSGEAKNMSHVSTGGGASLELLEGKTLPGVAILTDRE

SEQ ID NO: 10636 - DNA, 1440 bp, Leishmania mexicana
  CDS (1)..(1440)
atgtcgctcgtgctgaagaagagtatcgatgatgtcgccttgaaggataagaaggtgctcatccgcgtggacttcaacgtccctgtgaaaaatggcgaaatcacgaatgacttccgcatccgttccgccttgccgacgatccagaaggtgctgaaggagggcggctcctgcatcctgatgagccaccttggcaggccgaagggtgcgaggatgagtgacccgaaaccagagaaaggtgtgcgcgggtacgaggaggctgcgacgcttcgcccggtcgctgcggccctctcggagcttctggagaagaaggtggcgtttgcgccggactgcctgaacgcttctatatacgtgtcgaagctgaagcgcggcgacgtgctgctgctggagaacgtgcgcttctacacggaggagggcagcaagaaggaggaggaggccgatgcgatggcgaaggtgctggcgtcatacgcggacctgtacgtcagcgatgcctttggcactgcgcaccgtgacagcgcgacgatgacgggcatccccaaggtgctgggctctggctatgcggggtacctgatggagaaggagatcaattacttctcgcgggtgctgaacaacccgccgcggccactggttgcgattgtcggcggcgcgaaggtgagcgacaagatcgagctgcttgacaacatgctgggccgcatcaattaccttgtgattggtggcgcgatggcgtacacgtttcagaaggcgcagggccgcaagatcggcatctcgatgtgcgaggaggataagctggatcttgccaagtcgctgctgaagaaggcgcaggagcgcggtgtgcaggtgcttctgccggtcgaccacgtgtgcaacaaagaattcaaggccgtggactcgccactggtgacggaggacgtggacgtaccggatggctacatggcgctggacattggcccaaagacgatccacatgtacgaggaggtgattggtcgctgcaagagtgccatctggaacggcccgatgggcgtgtttgagatgccgtgctactcgaagggcacatttgctgtcgcgaaggcgatggggactggaacgcagaaggacgggcttctgagcatcatcggcggtggcgacacggcgagtgctgcagagctgagcggcgaggcaaagaacatgtcgcatgtatccaccggcggcggtgcgtcgctcgagctgctggagggcaaaacgcttcctggcgttgctattctgacagacaaggaagtgaaggggcgtggacctttgttgaagtgcgcgtgtggtggtgcgagtccgagcaatgagtcttgtccgcgtaggagggagggtatctggggaggcggcttcatcgtaactgagattgtcaaacttgttggtgcgctgctgattggcatttttattggacgtcgcctgaacactaagcttatccggtaa

SEQ ID NO: 10637 - protein, 479 aa, Leishmania mexicana
MSLVLKKSIDDVALKDKKVLIRVDFNVPVKNGEITNDFRIRSALPTIQKVLKEGGSCILMSHLGRPKGARMSDPKPEKGVRGYEEAATLRPVAAALSELLEKKVAFAPDCLNASIYVSKLKRGDVLLLENVRFYTEEGSKKEEEADAMAKVLASYADLYVSDAFGTAHRDSATMTGIPKVLGSGYAGYLMEKEINYFSRVLNNPPRPLVAIVGGAKVSDKIELLDNMLGRINYLVIGGAMAYTFQKAQGRKIGISMCEEDKLDLAKSLLKKAQERGVQVLLPVDHVCNKEFKAVDSPLVTEDVDVPDGYMALDIGPKTIHMYEEVIGRCKSAIWNGPMGVFEMPCYSKGTFAVAKAMGTGTQKDGLLSIIGGGDTASAAELSGEAKNMSHVSTGGGASLELLEGKTLPGVAILTDKEVKGRGPLLKCACGGASPSNESCPRRREGIWGGGFIVTEIVKLVGALLIGIFIGRRLNTKLIR

SEQ ID NO: 10638 - DNA, 1530 bp, Trypanosoma congolense
  CDS (1)..(1530)
atgtcacacgttaccggcgtgacaagcaacatccgtatcaagaaaactatcgatgacatatggccgttaacagcgaagcgagtcctcgttcgcgttgactttaacgttcctatccaaaacggccacatcaccaatgactaccgcattcgtgccaccatccccaccattcagcgcatcattgatcagggcggcatttgtattcttctcagccaccttggaaggccggcaggcatttccatgacaacggcggtgcgggacgtcaggcgccgttaccacgaagctcatttccatgacaacaagggcaaaactgcgttcttcagtgtcctaccacccgaagagaaaataaagattttagctcagtctagtctcagggaggaggcaacacacataatgccgggggttaaatccgggaagacaatcctctttgcgcgactgccagaagacgagaagaaacagctcctgatgcagtacctcgatgaaaagaaagacaatggcctaccgcagcttagcgttagtgctggatatgaagagcagtacagtcttcgaccagtcgccgtacgattagccgaactacttggtcaacatgtctattttgcgcatgattgtatggacgctaaaatggagctgtctcgtttaaagaggggaaacgtcatgcttttggagaatgtgcgcttctaccgcgaggaggacagcaagaaggaggaggagcgcgaggccatggccaaggtcctcgcgtcctacggtgatatcttcgtgagcgacgcctttggcaccgcgcaccgtgacagtgccacgatgacgggcatcccgaaggtgcttgggcacggcgctgctggttacctgatggagaaggagatctcgtacttctccaaggtgcttggcaacccgccgcgtccactggtggcgattgttggcggctcgaaggtgagcgataagattcagctgcttgacaatatgctgcagcgaatcgactacctgttgattggcggggcgatggcgtacaccttcttgaaggcacaaggccaccgcattggcacctcgatgtgtgaggaggacaggctggacctcgcacggtcgctgctgaagaaggctgaggaccgcaaagtgcaggtgctgctgccggtggaccacgtgtgccacacggagttcaaggcagttgatacgcctgtggtgacggctgatgccgatatcccggatggccacatggcactggacattggccccaagacaattgcgaattatgttgagacgattggtaaatgcaagagtgcgatttggaatggccccatgggcgtgtttgaaatgacgccgtactcgaagggcacgtttgctgttgccaaggcgatgggcgactgcactcaaaagaacggactgatgagcatcatcggtggcggtgacagtgcgagtgctgctgagcagagcggtgaagcaacgcgcatgtcacacgtgtccactggtggcggtgcctcactggagctgcttgagggcaaaacgctcccaggcgtcgccatattggatgataaggagtaa

SEQ ID NO: 10639 - protein, 509 aa, Trypanosoma congolense
MSHVTGVTSNIRIKKTIDDIWPLTAKRVLVRVDFNVPIQNGHITNDYRIRATIPTIQRIIDQGGICILLSHLGRPAGISMTTAVRDVRRRYHEAHFHDNKGKTAFFSVLPPEEKIKILAQSSLREEATHIMPGVKSGKTILFARLPEDEKKQLLMQYLDEKKDNGLPQLSVSAGYEEQYSLRPVAVRLAELLGQHVYFAHDCMDAKMELSRLKRGNVMLLENVRFYREEDSKKEEEREAMAKVLASYGDIFVSDAFGTAHRDSATMTGIPKVLGHGAAGYLMEKEISYFSKVLGNPPRPLVAIVGGSKVSDKIQLLDNMLQRIDYLLIGGAMAYTFLKAQGHRIGTSMCEEDRLDLARSLLKKAEDRKVQVLLPVDHVCHTEFKAVDTPVVTADADIPDGHMALDIGPKTIANYVETIGKCKSAIWNGPMGVFEMTPYSKGTFAVAKAMGDCTQKNGLMSIIGGGDSASAAEQSGEATRMSHVSTGGGASLELLEGKTLPGVAILDDKE

SEQ ID NO: 10640 - DNA, 2014 bp, Volvox carteri
  CDS (23)..(1411)
gcagttccacacagtaaatacaatggccctctcgatgaagatgcgcgccaacgcgcgtgtggtctctggccgccgcgttgccgctgttgccccgcgcgttgtgcctttctcgtcggtcgcgcgtccagtcctgcgcagcacctttgcccctgaggtctccattgatattcgccgtgctggtcgcagccgcattgttgtcgaggcggttaagaagtcggtcggcgatctcggcaaggctgatttggagggcaagcgcgtcttcgtccgcgccgatctgaacgtgccgcttgataagaagaccctggccattaccgatgacacccgcatccgcgcggcggtcccaaccttgaagtacctgttggacaatggtgccaaggttctcctgacctcgcacctgggccgcccgaagggaggccccgaggacaagtaccgcctcacccctgtggtggcgcgactgtcggagctgctgggcaaggaggtgaagaaggtcgacgactgcattggcccgtccgttgagcaggctgtggcttccctgaagagcggcgagctcctgctgctcgagaacgtccgcttctacaaggaggaggagaagaacgaccccgagttcgccaagaagcttgcctccaacgctgacttgtacgtcaacgacgccttcggcactgcccaccgcgcccacgcctccactgagggtgtcaccaagttcctgaagccctccgtggcaggcttcctgctgcagaaggagctggactacctagacggcgccgtgtccgcccccaagcgccccttcgtggccattgttggaggctctaaggtgtcctccaagatcaccgtcattgagaagctcatggagaagtgcgacaagattatcattggtggtggcatgatcttcaccttctacaaggctcgcggcctgaaggtcggctcctcgctggtcgaggaggacaagctggagctggccaagaacctggaggccattgctaaggccaagggcgtgcagctcctcctgccgtctgacgtcgtggtggcggacaagttcgacgccaacgccaacacacagaccgtcagcgtggaggccatccccgacggctggatgggtctggacatcggccccgactccatcaagacgttccaggatgccctggctgacgccaagactgtcgtctggaacggccccatgggtgtgttcgagttccccaagttcgccgtcggcactgtggccattgccaacactctgtctgagctgacgccaaagggcgccatcaccatcatcggcggtggtgactcggtggccgccgttgagcaggctggtgtggctgagaagatgagccacatttccactggtggcggtgcctctctggagctgctggagggcaaggtcctgccgggcgttgctgctttggatgagaagtaattgcggcttgagtaaggtgtcgacagtcttttcgcgttggttgctgttctttttggaggcgattcgtctcgaggatgtgccccggggaaccgatcctggcgaaagtggctctccttggcgtgagtgtgcacctatctgctgggaggcactgcatgcgggtcggtgtgtgcgttggcgctatggatgtactgtgcggatctgttctgcgacatgctgcgacatgcctgtgctaaaccagaaatggttgggctctagctgaaaaataacatctgtgcggtgctctgcaacggcaatctacggatagttggttgtttttgaattttcggagtttagtaaccggcgacgctgaggtggtcatcgcatgcatttgctttttcgctgtggcataattcgcggttgcaataggaggttcaggaggagaagtgatgtgctgcacgtgtgcacggctctatttttggttggcaaaagcaaaagttttgttatgtttcgttgctttatcggccttgatgaagacatgaaatgtcggctatatgcccgttgtcgcccacagcgctcacttttctcggacctcgggaggtaaaatgttgtgtaacgccaaaaggc

SEQ ID NO: 10641 - protein, 462 aa, Volvox carteri
MALSMKMRANARVVSGRRVAAVAPRVVPFSSVARPVLRSTFAPEVSIDIRRAGRSRIVVEAVKKSVGDLGKADLEGKRVFVRADLNVPLDKKTLAITDDTRIRAAVPTLKYLLDNGAKVLLTSHLGRPKGGPEDKYRLTPVVARLSELLGKEVKKVDDCIGPSVEQAVASLKSGELLLLENVRFYKEEEKNDPEFAKKLASNADLYVNDAFGTAHRAHASTEGVTKFLKPSVAGFLLQKELDYLDGAVSAPKRPFVAIVGGSKVSSKITVIEKLMEKCDKIIIGGGMIFTFYKARGLKVGSSLVEEDKLELAKNLEAIAKAKGVQLLLPSDVVVADKFDANANTQTVSVEAIPDGWMGLDIGPDSIKTFQDALADAKTVVWNGPMGVFEFPKFAVGTVAIANTLSELTPKGAITIIGGGDSVAAVEQAGVAEKMSHISTGGGASLELLEGKVLPGVAALDEK

SEQ ID NO: 10642 - DNA, 1587 bp, Agaricus bisporus
  CDS (276)..(1526)
cagagcacgagtgacggatgtgacagtggggtcgacgcctagatcaatctttgcgcgagacttgacgatagactaatgccgcccgggcagcgctggcctgggggtatctgggaaatgcgcgtgcaggtggtctgcacttgtggtctgcagaaaatccgtcatcctggggctggacgcgggacggtggaggctggagacgggcgtgactgtgaccggactagaaagatatcttatctgctatatatactgggctcatactggcttatactgcagccatgtctctctccaacaaactctccatcactgacctcgccctcaccggcaagcgtgtccttatccgcgtcgacttcaactcccccatccaagacggaaagataaccaaccccgcccgtatcaatgccgccctccccactatcaaatatgccctcgacaatggcgcctccaaggtcatcttaatgtcgcatctcggcaggcccgatggcaaggcgatctccaaatactcactcaaacctgtggcctcagagctggaaaagctcttgaagaaaccggtcttcttcttgcatgactgcgtcggccctgacatcgaaaaggcagtcctggaggcacccgagggtgctgtcgttctgctcgagaaccttcgcttccacattgaggaagaaggctctgccaagaacgaggaaggaaaaaaaatcaaagctgatccttccaaggtcacccagttccgcgagcagctcaccaggctcggcgatgtttatgtgaacgatgcctttggtacggctcatcgcgctcactccagcatggttggcatcaagcttcctcgaagggcttctgggtttttggtcaagaaagaactagactactttgcaaaggcactggaaaaccccgaacgacccttccttgctatccttggtggtgccaaagtgtctgacaagatccagctgattgaaaacatgctcgacaaggtcaactgtctcgtcatcggaggtggtatggcattcactttcaagaagacaatgcaaaatgttgcgattggcaactctctctttgacaaaccagggtctgaaaaagtggccgggatcgtcgaaaaggccaagaagaacaatgtcgaaattgtgttccccgtcgactatgttgtcggagacaagtttgatgcaaacgccaaccacaagatagtcacggatgacgaaggcgttccggatggttggatgggtctcgacgttggtccaaagtctaatgagctcttccgtgaagcggtcctgaaagccaagacgattctctggaacggtcctcccggagtgttcgaatttcctgcgtttgccaagggatcaaaggtgcttttggatgccacggtagaggcggtacaaaagggggctactgttatagttggtgggggtgatacagctacggtagttgcgaatcatgacgcagaagagaagctgagccacgtcagcactggtgggggtgcgagtctggagctgctggagggcaagacgctgcctggagtggcagaattgagcaacaaatgacggtgtagctacttgtagatagaattcccacagtaaacatgtgactgggagtgaatgtgtc

SEQ ID NO: 10643 - protein, 416 aa, Agaricus bisporus
MSLSNKLSITDLALTGKRVLIRVDFNSPIQDGKITNPARINAALPTIKYALDNGASKVILMSHLGRPDGKAISKYSLKPVASELEKLLKKPVFFLHDCVGPDIEKAVLEAPEGAVVLLENLRFHIEEEGSAKNEEGKKIKADPSKVTQFREQLTRLGDVYVNDAFGTAHRAHSSMVGIKLPRRASGFLVKKELDYFAKALENPERPFLAILGGAKVSDKIQLIENMLDKVNCLVIGGGMAFTFKKTMQNVAIGNSLFDKPGSEKVAGIVEKAKKNNVEIVFPVDYVVGDKFDANANHKIVTDDEGVPDGWMGLDVGPKSNELFREAVLKAKTILWNGPPGVFEFPAFAKGSKVLLDATVEAVQKGATVIVGGGDTATVVANHDAEEKLSHVSTGGGASLELLEGKTLPGVAELSNK

SEQ ID NO: 10644 - DNA, 1295 bp, Aplysia californica
  CDS (55)..(1293)
gcacgagccttagtctcgagttattttctctcattttagattgcattcgcaaagatgaacaagctcagtattaacgacgtggatgtgagggacaagagagtcctgatcagagtcgatttcaacgtccccttgaaaaatggacagatctcaaacaaccagagaatcgctgcagccctgcctacgatcaagcttgccttggagaagggtgccaagtcagtggtgctcatgtctcatctcggtcggccagacgggcgcccaatccatgcggccagtatgaagccggtggtggcagagctggagaacctgttgggaaagaaaatcatgtttctggaagactgcgtgggttccaaggtagaggccgcctgtgccaacccggagcccggcagcgtgatcctgctggaaaatctccgcttccacgtggagaaggaggggaagggcaaggacgctcagggcaacaaggctaaggcagatgatgctgctgtggctgccttcagggcctccttgtccaaactgggagacgtctacgtgaacgacgcttttggcacagctcatagagctcacagctccatggtgggtgtggatctgccggtcaaggcctgcggtctgctcatgaagaaagagttggactactttgccaaagccctggagaaccccgctcgtccgttcctggctatcctgggaggagctaaagttgctgacaaaatccagctgattgagaaccttatggacaaagtcaatgagatgatcattggtggtggaatggctttcacattcttgaaagtactcaacaatatggacatcggaggttctctgtttgacgagggggccaagatcgttggccgtctggtggacaaggcgaaggagaagggagtgaagctccacctgccctccgacttcatcaccggcgacaagtttgccgacgtcgccaagtccgccacggcgtctgttgcgtctggcatcccagaaggttggatgggtctggatgttgggaccaaaaccaacgaagtattccagaaggtgattgaaggagcaaagacaattgtgtggaacgggccccccggagtgtttgagtttgagaacttcagcacgggctccaagcagatgatggactctgtggtcagggccaccgaggcaggaaccatcactatcattggtggatgtgacactgccacgtgtgccaagaattcaaacgccacggagaaggtgagccatgtgagcacaggaagcggaaccagcctggagctgttggaaggcaaaatccttcctggcgtggctgccctgtcccagccgtgatg

SEQ ID NO: 10645 - protein, 412 aa, Aplysia californica
MNKLSINDVDVRDKRVLIRVDFNVPLKNGQISNNQRIAAALPTIKLALEKGAKSVVLMSHLGRPDGRPIHAASMKPVVAELENLLGKKIMFLEDCVGSKVEAACANPEPGSVILLENLRFHVEKEGKGKDAQGNKAKADDAAVAAFRASLSKLGDVYVNDAFGTAHRAHSSMVGVDLPVKACGLLMKKELDYFAKALENPARPFLAILGGAKVADKIQLIENLMDKVNEMIIGGGMAFTFLKVLNNMDIGGSLFDEGAKIVGRLVDKAKEKGVKLHLPSDFITGDKFADVAKSATASVASGIPEGWMGLDVGTKTNEVFQKVIEGAKTIVWNGPPGVFEFENFSTGSKQMMDSVVRATEAGTITIIGGCDTATCAKNSNATEKVSHVSTGSGTSLELLEGKILPGVAALSQP

SEQ ID NO: 10646 - DNA, 1254 bp, Aspergillus oryzae
  CDS (1)..(1254)
atgtctctctccaacaagcttgccatcaccgatgtcgaccttaaggacaagcgcgtcttgatccgtgtcgacttcaacgttcctctcgatgccgacaagaagatcaccaacaatcagcgtatcgtcggtgctctgcctaccatcaagtacgccattgagaatggtgctaaggccgttgtcctcatgtcccacctcggccgtcccgatggcaaggccaatcccaagtacagcctgaagcctgttgctactgagctggagaagctgcttagcaagtctgtcatcttcgccgagaactgcgtcggcaaggagactgaagagattgtgaacaaggccactggtggccagatcatcctccttgagaacctgcgtttccacgccgaggaggagggcagctctaaggatgccgagggcaagaaggtcaaggctgacaaggagaaggtcgaagagttccgcaagggactgactgctcttggtgacgtctacatcaacgacgctttcggaactgcccaccgtgctcacagctcgatggttggtgttgacctgccccagaaggcttccggcttcttggtgaagaaggaacttgagtactttgctaaggctttggaaagcccccagcgccccttcctggccattctgggaggtgccaaggtctctgacaagatccagctgatcgacaacctgttgcccaaggtcaacagcttgatcatcactggtgctatggccttcaccttcaagaagaccctcgagaacgtcaagattggcaacagtttgttcgatgaggccggtagcaagattgtcggcgatatcgttgagaaggccaagaagaacaatgtcaagattgttctgcccgttgactacgtgaccgctgacaagttcgccgccgatgccaagactggctatgccaccgatgctgacggtattcccgatggatacatgggcctggatgtcggtgagaagagtgttgagctgtacaagaagactattgccgaggccaagaccatcctctggaacggtcctcctggtgtcttcgagctggagcccttcgccaacgctaccaagaagacccttgatgctgctgttgcggctgctcagtctggttctattgtcatcatcggcggtggtgacactgcaaccgtcgctgccaagtacggtgctgaggccaagctcagccatgtctccaccggtggtggtgcatccctggagctccttgagggcaaggttctccctggtgttgatgctctgtcaagtaagtaa

SEQ ID NO: 10647 - protein, 417 aa, Aspergillus oryzae
MSLSNKLAITDVDLKDKRVLIRVDFNVPLDADKKITNNQRIVGALPTIKYAIENGAKAVVLMSHLGRPDGKANPKYSLKPVATELEKLLSKSVIFAENCVGKETEEIVNKATGGQIILLENLRFHAEEEGSSKDAEGKKVKADKEKVEEFRKGLTALGDVYINDAFGTAHRAHSSMVGVDLPQKASGFLVKKELEYFAKALESPQRPFLAILGGAKVSDKIQLIDNLLPKVNSLIITGAMAFTFKKTLENVKIGNSLFDEAGSKIVGDIVEKAKKNNVKIVLPVDYVTADKFAADAKTGYATDADGIPDGYMGLDVGEKSVELYKKTIAEAKTILWNGPPGVFELEPFANATKKTLDAAVAAAQSGSIVIIGGGDTATVAAKYGAEAKLSHVSTGGGASLELLEGKVLPGVDALSSK

SEQ ID NO: 10648 - DNA, 1260 bp, Bacteroides thetaiotaomicron
  CDS (1)..(1260)
atgcagacaattgacaaattcaattttgccggtaaaaaggcatttgttcgcgtggacttcaatgtacccctggacgaaaacttcaacattacagatgacactcgtatgcgtgcagctcttcctactttgaagaagattttggctgacggcggtagcatcatcatcggttctcacctgggccgtccgaaaggcgttgccgacaaattctctttgaaacatatcatcaaacatctgtctgaactgctgggcgttgaagttcagtttgctaacgactgcatgggcgaagaagccgctgtaaaagctgctgctctgcaaccgggagaagttctgttgctcgaaaaccttcgcttctatgctgaggaagaaggcaaaccaagaggtttggctgaagatgccacagacgaagaaaaggctgctgcaaagaaggctgtcaaagaaagccagaaagaattcaccaagaaattggcttcttacgctgactgctacgtaaacgacgcattcggtacagctcaccgtgcacacgcttctacagctctgatcgctaaatacttcgacactgacaacaagatgttcggttacctgatggagaaagaagtaaaagctgttgataaagtattgaacgacatccaacgtccgttcactgctatcatgggtggttctaaagtttcttctaaaatcgaaatcatcgaaaacctgttgaataaggtagacaacctgatcatcgcaggtggtatgacttatacattcaccaaagcaatgggtggtaaaatcggtatctctatctgtgaggacgacaaacttgacctggctttggatctgatcaagaaagcaaaagaaaagggtgtaaaccttgtactggctgttgacgctaagatcgctgacgctttctctaacgacgctaacactcagttctgcgctgttgatgaaattcctgacggatgggaaggtcttgacatcggtcctaagactgaagaaatcttcgctaacgtaatcaaagaatccaaaactattctttggaacggtcctacaggtgtattcgaatttgaaaacttcactcacggttcacgtacagtaggtgaagctatcgttgaagcaactaagaacggtgcattctcacttgtggggggtggtgactctgtagcttgtgttaacaagttcggtctggctagcggcgtatcttatgtttctacaggtggtggcgcattgctcgaagcaatcgaaggaaaagttcttccgggtatcgctgccattaatgaataa

SEQ ID NO: 10649 - protein, 419 aa, Bacteroides thetaiotaomicron
MQTIDKFNFAGKKAFVRVDFNVPLDENFNITDDTRMRAALPTLKKILADGGSIIIGSHLGRPKGVADKFSLKHIIKHLSELLGVEVQFANDCMGEEAAVKAAALQPGEVLLLENLRFYAEEEGKPRGLAEDATDEEKAAAKKAVKESQKEFTKKLASYADCYVNDAFGTAHRAHASTALIAKYFDTDNKMFGYLMEKEVKAVDKVLNDIQRPFTAIMGGSKVSSKIEIIENLLNKVDNLIIAGGMTYTFTKAMGGKIGISICEDDKLDLALDLIKKAKEKGVNLVLAVDAKIADAFSNDANTQFCAVDEIPDGWEGLDIGPKTEEIFANVIKESKTILWNGPTGVFEFENFTHGSRTVGEAIVEATKNGAFSLVGGGDSVACVNKFGLASGVSYVSTGGGALLEAIEGKVLPGIAAINE

SEQ ID NO: 10650 - DNA, 1194 bp, Bartonella henselae
  CDS (1)..(1194)
atgggttttcgtacacttgatgatgttgatgtcacaggaaaacgtgttcttgtgcgggtggattttaatgtaccaatggcgcaaggaaaagtttgtgatgatacgcgtcttaaacgacataaagaaacgctccttgaattgcaaaagcgtggtgctaagcttattcttctttcccattgtgggcgccctaaaggacaagtggagccagaattttcactccatcctgttgtgcaagtgctggaaaaaataatcaaccaacccgtgaattttgcatcagattgtattggtgtagctgtacagacagcggttgaagcattgcaaaatggtggtattttactgcttgaaaatgttcgttttcattcaggtgaagaaaagaatgcgggctcttttgctgaggctctagcccataatggagatctctatgtcaatgatgctttttcagtctctcatcgtgcccatgcttcggtagaggggataacacattttttgccttcctatgcggggcgttctttacaatgtgagttgcaagcattggaaaaagggcttggtaagccagagcgtccggtgatcgcaattgttggaggggcgaaggtttccagtaagctttttgtgctcaatcatttggttaaaaaggtcgattatttggtcattggtggtggcatggccaatagttttttagcagcgcaaggtgtgtgtgttggaaagtcattgtgtgaacatgcgctgatcgaaacggtaaaaaaagttattgaaaaagcacgggagtgccaatgtacgcttctgctccctgtggatgcaatcgttggatttcgctttgaaaaagatgcgccacatcgtctctatgatattggagatattcctgaggatgggatgattttggatgttggtacgcgctccattgcgcatatcaatgccgtgatcgataaagccgctacccttgtgtggaatggacctcttggtgtttttgagatgtctccttttgatcaaggaacgattgcagtggcacgccatgcagcagaacttagtttgacagggaaattggtttcaattgctggagggggagatacggtgtttgcacttaatcatgctggtgttgctgatgattttacttatctttcaaccgcgggtggagcctttttggaatggatggaaggcaagatgctgcctggtattctagccctcacgcaggcttga

SEQ ID NO: 10651 - protein, 397 aa, Bartonella henselae
MGFRTLDDVDVTGKRVLVRVDFNVPMAQGKVCDDTRLKRHKETLLELQKRGAKLILLSHCGRPKGQVEPEFSLHPVVQVLEKIINQPVNFASDCIGVAVQTAVEALQNGGILLLENVRFHSGEEKNAGSFAEALAHNGDLYVNDAFSVSHRAHASVEGITHFLPSYAGRSLQCELQALEKGLGKPERPVIAIVGGAKVSSKLFVLNHLVKKVDYLVIGGGMANSFLAAQGVCVGKSLCEHALIETVKKVIEKARECQCTLLLPVDAIVGFRFEKDAPHRLYDIGDIPEDGMILDVGTRSIAHINAVIDKAATLVWNGPLGVFEMSPFDQGTIAVARHAAELSLTGKLVSIAGGGDTVFALNHAGVADDFTYLSTAGGAFLEWMEGKMLPGILALTQA

SEQ ID NO: 10652 - DNA, 1206 bp, Bdellovibrio bacteriovorus
  CDS (1)..(1206)
atggctaacggtcttaaaggcatcaagacagttcgtgatttcgagttggcgggaaaagttgttttcctgcgcttggatttgaacgttccaatggagaacggcaagatcacggatgaaaatcgcatcacggcatctttgccgacaatcaagtattgcatggagcagggagcgaagctggtaatggcttctcacctgggccgtccaaaaaccaaagacgacacagagttttctttggagccagtggcaaaacgcctgcaggaccttttgaatgccgaagtgattctggtggaagaaccggactctgacgctccaaaacacctgcttccatctttgaagcctcatcagctgatccttcttgaaaacgtgcgttttgaagaaggggagacgaaggactctgttgagttcgcgcaaaagatcgccaactacagcgacatttacatcaatgacgctttcggcgcttctcaccgcgctcacgcgaccattcacgctttgccttcagtgatgaaggacaaaggtatcggcttcctgattgaaaaggaaatcacgatgctggattcccttctgcaaaacccaaaacgcccgtacatcgcggtgatgggtggcgcgaaggtttctgacaagatcgcggttattgaacgccttatggacgttgttgacggtttcatcgtgggtggcgcgatggcgtacactttcctgaaagctcaaggcctgccagttggtaagtctttggttgaaaatgacaaattgaaatacgccaaagaaatgatcgagcgtatcgaagcccgcaacaaaaccattttgttgccggtggatcacgtggcgaccaaaggcatcacagacacagcgcacgcgcatgtgaccaatgatgtggcgattgcggaagacgaattgggtgtggacatcggtcctaaatccatcaagaacttctctgcggctttgcgtgaagcaggcactattttctggaacggtcctatgggcatctttgaaaatccggcttttgcaaaaggcaccttcggcgtggctcaggccattgctgacagcgaagcgatcaaaatcgtgggtggtggtgattctgcagcggcagcggaagcttccggctttgcaggtaaaatgacccacatctccactggtggtggcgcatccttggaatacttgcagggcgataaattgccaggacttgaaattttaagaactcgcatccgctaa

SEQ ID NO: 10653 - protein, 401 aa, Bdellovibrio bacteriovorus
MANGLKGIKTVRDFELAGKVVFLRLDLNVPMENGKITDENRITASLPTIKYCMEQGAKLVMASHLGRPKTKDDTEFSLEPVAKRLQDLLNAEVILVEEPDSDAPKHLLPSLKPHQLILLENVRFEEGETKDSVEFAQKIANYSDIYINDAFGASHRAHATIHALPSVMKDKGIGFLIEKEITMLDSLLQNPKRPYIAVMGGAKVSDKIAVIERLMDVVDGFIVGGAMAYTFLKAQGLPVGKSLVENDKLKYAKEMIERIEARNKTILLPVDHVATKGITDTAHAHVTNDVAIAEDELGVDIGPKSIKNFSAALREAGTIFWNGPMGIFENPAFAKGTFGVAQAIADSEAIKIVGGGDSAAAAEASGFAGKMTHISTGGGASLEYLQGDKLPGLEILRTRIR

SEQ ID NO: 10654 - DNA, 1206 bp, Bifidobacterium longum
  CDS (1)..(1206)
atgaagacactcaaggaccttggagatctcaagggcaagcgcgttctggttcgcgctgatttcaatgttccgctggacggcaccaccatcaccgatgacggtcgaatcaaggctgctctgccgaccatcaagaccctgcgcgaagaaggcgccaaggtcatcctcatggcccaccttggccgcccgaagggcaaggtcgttcctgagctgagcctggccccggttgccgcccgcctcggcgagctgctcggcgccaacgtgccgctggccaaggacacctacggcgaggacgctcaggccaaggtcgccgccatgaacgatggcgacgttgtgctgcttgagaacgttcgtttcaacccggaggagacctctaaggacgccgacgaacgcgccgcttacgccaagaagatcgccgccctcggcgaggccttcgtttccgatggcttcggcgtggtccaccgcgctcagggctccaactacgacgttgccgccgatctgccggccgccgcaggcctgctggtcgagaaggaagtcaaggccttgtccaaggccaccgagaacccggagcgtccgttcaccgtggtgctcggcggttccaaggtctccgacaagctcggcgtcatcgagaacctgctcgacaaggccaaccgtctggtcatcggcggtggcatggtgttcaccttcctcaaggccaagggctacgaggtcggcacctccctgcttgaagaggaccagcttgagaaggtcaagggctacatcgagaccgccgagaagaacggcgttgagctcgtgctgccgaccgacgtcgtcgtgaacgccggcttcccggccggtgacaccccggttgctccggaagtcgttgccgccgacgccatcccggccgacaagatgggtctggacatcggcccggagtcccagaagctcttccacgacaagatcgtcgactccaagaccgtcgtgtggaacggcccgatgggcgtgttcgaggttcctgagttcgccgccggcaccaaggccgtggcccagggtctggtcgacgccaccgcagtcggtgcgttcaccatcgtcggtggcggcgactccgcctccgccgtgcgcaacctcggcttcccggaggacggcttctcccacatctccaccggtggtggcgcttccctcgagttcctcgaaggcaaggagctccctggcctgaaggtgcttgagtaa

SEQ ID NO: 10655 - protein, 401 aa, Bifidobacterium longum
MKTLKDLGDLKGKRVLVRADFNVPLDGTTITDDGRIKAALPTIKTLREEGAKVILMAHLGRPKGKVVPELSLAPVAARLGELLGANVPLAKDTYGEDAQAKVAAMNDGDVVLLENVRFNPEETSKDADERAAYAKKIAALGEAFVSDGFGVVHRAQGSNYDVAADLPAAAGLLVEKEVKALSKATENPERPFTVVLGGSKVSDKLGVIENLLDKANRLVIGGGMVFTFLKAKGYEVGTSLLEEDQLEKVKGYIETAEKNGVELVLPTDVVVNAGFPAGDTPVAPEVVAADAIPADKMGLDIGPESQKLFHDKIVDSKTVVWNGPMGVFEVPEFAAGTKAVAQGLVDATAVGAFTIVGGGDSASAVRNLGFPEDGFSHISTGGGASLEFLEGKELPGLKVLE

SEQ ID NO: 10656 - DNA, 1194 bp, Bordetella pertussis
  CDS (1)..(1194)
atgtccaacgtcaatacgctttccgcgctggccaagagcggcgctctgtccggcaagcgcgttttcatccgcgccgacctcaacgtgccgttcgacgacgccggccgcatcagcgaagacacccgcatccgcgcctcggtgcccggcatccgcctggcgttagacgccggcgcggcggtcatggtcacctcgcacctgggccgccccaaggagggcgcgctgaccgaggcggactcgctggccccggtcgcgcagcgcctgtccgaactgctgggcatgcaggtgcgcctggtgcccgactgggtcgacggcgtttccgtcgagccgggcgaagtcgtgctgctggagaactgccgcggcaacgtgggcgagaaaaaggacgacgaaggcttgtcgcgcaagatggcggcgctgtgcgatgtgtacgtcaacgacgccttcggcaccgcgcaccgcgccgaggccaccacgcacggcatcgcgcgcttcgcgccggtggcctgcgccggcccgctgctggaggccgagctcgacgcgctggggcgcgcgctgcatgatcccaagcggccgctggtggcgatcgtgggcggctccaaggtgtcgaccaagctgtccatcctgcaatcgctggccgacaaggtcgaccagctggtggtcggcggcggcatcgccaacaccttcatgctggccgccggcctgcccatcggcaagtcgctggccgagcccgagcaggtcgagcaggcgcgcgccgtgatcgaaatcatgaagcgccgcggcgccgaggtgccgattcccaccgacgtggtttgcgccaagtcgttcggcgcggacgccgcggccaccgtcaaggcggccgccgacgtggccgaggacgacatgatcctcgacatcggaccgcagaccgcgcagcgcctggccgatatcctcaagacggccggcaccatcgtctggaacggtccggtcggcgtgttcgagttcgaccagttcgcccacggcaccgaggtggtggcgcgcgccatcgccgactcggcgggcttttcgattgccggcggcggcgatacgctggcggccatcgccaagtacggcatcgccgaccagaccggctatatctcgaccggcggcggcgctttcctggagttcctggaaggcaaggcgctgccggccgtggccgtgctgcaggcgcgcgccgcgtaa

SEQ ID NO: 10657 - protein, 397 aa, Bordetella pertussis
MSNVNTLSALAKSGALSGKRVFIRADLNVPFDDAGRISEDTRIRASVPGIRLALDAGAAVMVTSHLGRPKEGALTEADSLAPVAQRLSELLGMQVRLVPDWVDGVSVEPGEVVLLENCRGNVGEKKDDEGLSRKMAALCDVYVNDAFGTAHRAEATTHGIARFAPVACAGPLLEAELDALGRALHDPKRPLVAIVGGSKVSTKLSILQSLADKVDQLVVGGGIANTFMLAAGLPIGKSLAEPEQVEQARAVIEIMKRRGAEVPIPTDVVCAKSFGADAAATVKAAADVAEDDMILDIGPQTAQRLADILKTAGTIVWNGPVGVFEFDQFAHGTEVVARAIADSAGFSIAGGGDTLAAIAKYGIADQTGYISTGGGAFLEFLEGKALPAVAVLQARAA

SEQ ID NO: 10658 - DNA, 1197 bp, Bradyrhizobium japonicum
  CDS (1)..(1197)
atggcgaacaaattccgcaccctcgacgacgtcgacgtgaagggcaaacgcgtgctgctgcgcgtcgacctcaacgtgcccatggagaacgggcgcgtcaccgacgcaacccggctcgagcgcgtcgcgccgaccatcaccgagctcgccgacaagggcggcaaggtgatcctgctcgcgcatttcggccggccgaagggacgcgatgccaaggagtcgctcaagcccgtcaccgaggcgctgtcgaaggtcctgaacaagcccgtcgcgtttgccgacgactgcatcggcgagcccgcggccacggccgtggcggcactcaaggacggcgacatcctgtgcctggaaaacacccgcttccacaaggaagaggaaaagaacgatcccgccttcgtcgcggaattggccaagctcggcgacatctgggtcaatgacgcgttctcggccgcgcaccgcgcccacgcctcgaccgaaggcctcggccacaagctgccggcctatgccggccgcaccatgcaggccgagctcgatgcgctggagaaggcgctgggctcgccgaccaagccggtcatcgcgatcatcggcggcgccaaggtctcgaccaagatcgacctgctcgaaaacctcgtcagcaaggtcgacgcgctggtgatcggcggcggcatggccaacaccttcctgcacgcccagggcgtcggcatcggcaagtcgctggccgagaaggatctcgcgccgaccgcgctgcgcatcatcgagaaggcggaagccgccaactgcgccatcatcctgccggtcgacgccaccgtcgcctatcatttcgcggccaacgcgccgtcccacgcctacggcctcgatgcgatcccggccgacggcatgatcctcgacgtcggcccgcaatcggtcgcgcgcgtgcacgcggcgatcgacgacgcggcgacgctggtctggaacgggccgctcggcgccttcgagatgcagccgttcgaccgcggcacggtcgcggccgccaagcacgccgccgagcgcaccaaggcgaaaaagttgatctcgatcgcgggcggcggcgacaccgtcgcggccctcaaccaggcccacgtggccggtgacttcacctatgtctcgaccgccggtggcgcatttcttgaatggatggaaggcaagccactgcccggcgtcgaggtcctgcgcatcaagtag

SEQ ID NO: 10659 - protein, 398 aa, Bradyrhizobium japonicum
MANKFRTLDDVDVKGKRVLLRVDLNVPMENGRVTDATRLERVAPTITELADKGGKVILLAHFGRPKGRDAKESLKPVTEALSKVLNKPVAFADDCIGEPAATAVAALKDGDILCLENTRFHKEEEKNDPAFVAELAKLGDIWVNDAFSAAHRAHASTEGLGHKLPAYAGRTMQAELDALEKALGSPTKPVIAIIGGAKVSTKIDLLENLVSKVDALVIGGGMANTFLHAQGVGIGKSLAEKDLAPTALRIIEKAEAANCAIILPVDATVAYHFAANAPSHAYGLDAIPADGMILDVGPQSVARVHAAIDDAATLVWNGPLGAFEMQPFDRGTVAAAKHAAERTKAKKLISIAGGGDTVAALNQAHVAGDFTYVSTAGGAFLEWMEGKPLPGVEVLRIK

SEQ ID NO: 10660 - DNA, 1191 bp, Brucella abortus
  CDS (1)..(1191)
atgatgttccgcacccttgacgatgccaatgtccaatccaagcgcgtgctggtccgtgttgacctcaacgtgccgatggcaaacggcgaagtcaccgaccttacccgcatcgaacgcatcgttccgaccatcgcggaactgtcaaggaagggcgcgaaggtcatcctgctcgcccatttcggtcgcccgaagggggttgcctcggatgaaaattcgctgaagcatgtcgtgaagccgctctccaaggttctggatcacagtgttcattttgccgaagactgcatcggcgacaaggcgaaaccggccgtcgatgcgctgaaggacggcgacgtcctgcttctggaaaatacccgtttccacaagggcgaggaaaagaacgatcctgaattcgtgcaggcgctggccgccaatggggatctctatgtgaacgatgccttttccgccgctcaccgcgcccatgcctcgactgaaggtctggccaatgtcctgcctgccttcgcgggccgcgccatgcaggctgagcttgaagcacttgaaaagggcctcggcaatccggcccgcccggtggtcgccatcgtcggcggtgcaaaggtttcgaccaagctcgacctcctgtccaacctgatcgaaaaggtcgatgcgcttgtcatcggcggcggcatggccaacacgttccttgcagccaagggtcttgatgtcggcaaatcgctctgcgagcatgagctggcctcgaccgcacgcgaaatcatggccaaggccgaaaccaccaaatgcgccatcatcctgccggtggacgcggtcgtgggctggcacttcgccgccgatacgccacaccagacctatggcgtggattcggttccgggcgacgccatgatccttgacgcaggcgagctttcgaccgacctcattgcttcggccatcgatgatgccgcaacattggtctggaacggcccgcttggggctttcgagttgagcccctttgacacagcaacggtgaaggtcgcaaggcatgtcgcaaagcgcacaaaggaaggcaagcttgtttcggtcggcggcggcggcgatacggtggcagccctcaaccatgcgggcgtggccgacgacttcacctatatctcaaccgctggcggcgctttcctcgaatggatggaaggcaaaccgcttccgggcgtcgatgtattgaagaagtga

SEQ ID NO: 10661 - protein, 396 aa, Brucella abortus
MMFRTLDDANVQSKRVLVRVDLNVPMANGEVTDLTRIERIVPTIAELSRKGAKVILLAHFGRPKGVASDENSLKHVVKPLSKVLDHSVHFAEDCIGDKAKPAVDALKDGDVLLLENTRFHKGEEKNDPEFVQALAANGDLYVNDAFSAAHRAHASTEGLANVLPAFAGRAMQAELEALEKGLGNPARPVVAIVGGAKVSTKLDLLSNLIEKVDALVIGGGMANTFLAAKGLDVGKSLCEHELASTAREIMAKAETTKCAIILPVDAVVGWHFAADTPHQTYGVDSVPGDAMILDAGELSTDLIASAIDDAATLVWNGPLGAFELSPFDTATVKVARHVAKRTKEGKLVSVGGGGDTVAALNHAGVADDFTYISTAGGAFLEWMEGKPLPGVDVLKK

SEQ ID NO: 10662 - DNA, 1188 bp, Brucella suis
  CDS (1)..(1188)
atgttccgcacccttgacgatgccaatgtccaatccaagcgcgtgctggtccgtattgacctcaacgtgccgatggcaaacggcgaagtcaccgaccttacccgcatcgaacgcatcgttccgaccatcgcggaactgtcaaggaagggcgcgaaggtcatcctgctcgcccatttcggtcgcccgaagggggttgcctcggatgaaaattcgctgaagcatgtcgtgaagccgctctccaaggttctggatcacagtgttcattttgccgaagactgcatcggcgacaaggcgaaagcggccgtcgatgcgctgaaggacggcgacgtcctgcttctggaaaatacccgtttccacaagggcgaggaaaagaacgatcctgaattcgtgcaggcgctggccgccaatggcgatctctatgtgaacgatgccttttccgccgctcaccgcgcccatgcctcgactgaaggtctggcccatgtcctgcctgccttcgcgggccgcgccatgcaggctgagcttgaagcacttgaaaagggcctcggcaatccggcccgcccggtggtcgccatcgtcggcggtgcaaaggtttcgaccaagctcgacctcctgtccaacctgatcgaaaaggtcgatgcgcttgtcatcggcggcggcatggccaacacgttccttgcagccaagggtcttgatgtcggcaaatcgctctgcgagcatgagctggcctcgaccgcacgcgaaatcatggccaaggccgaaaccaccaaatgcgccatcatcctgccggtggacgcggtcgtgggctggcacttcgccgccgatacgccacaccagacctatggcgtggattcggttccgggcgacgccatgatccttgacgcaggcgagctttcgaccgacctcattgcttcggccatcgatgatgccgcaacattggtctggaacggcccgcttggggctttcgagttgcgcccctttgacacagcaacggtgaaggtcgcaaggcatgtcgcaaagcgcacaaaggaaggcaagcttgtttcggtcggcggcggcggcgatacggtggcagccctcaaccatgcgggcgtggtcgacgacttcacctatatctcaaccgctggcggcgctttcctcgaatggatggaaggcaaaccgcttccgagcgtcgatgtattgaagaagtga

SEQ ID NO: 10663 - protein, 395 aa, Brucella suis
MFRTLDDANVQSKRVLVRIDLNVPMANGEVTDLTRIERIVPTIAELSRKGAKVILLAHFGRPKGVASDENSLKHVVKPLSKVLDHSVHFAEDCIGDKAKAAVDALKDGDVLLLENTRFHKGEEKNDPEFVQALAANGDLYVNDAFSAAHRAHASTEGLAHVLPAFAGRAMQAELEALEKGLGNPARPVVAIVGGAKVSTKLDLLSNLIEKVDALVIGGGMANTFLAAKGLDVGKSLCEHELASTAREIMAKAETTKCAIILPVDAVVGWHFAADTPHQTYGVDSVPGDAMILDAGELSTDLIASAIDDAATLVWNGPLGAFELRPFDTATVKVARHVAKRTKEGKLVSVGGGGDTVAALNHAGVVDDFTYISTAGGAFLEWMEGKPLPSVDVLKK

SEQ ID NO: 10664 - DNA, 1167 bp, Buchnera aphidicola
  CDS (1)..(1167)
atgaatttaagaaaaatgactgaattaaatataacaggaaaaaaaattttaataagaacagatttaaatgttcctataaaaaatggcgtgattcaatctgatgcaagaatacttgctgctcttcctaccattgaaatagctattgaaaaaaaagctaaaataattattttatctcatttaggacgtccaaaagaagggtgctatacaaaaaaatattctttatttcctatttttgagtatctaaaaaagaaattaaaaaaaacaaaaatttacttttctgataatcacttaaaaaaagttgaaataaattcaggagaaatattaattttagaaaatgttcgttttaacgtgggagaattaaaaaacgatgaaaatttatctaaagaatatgctaatttatgcgatatttttgttatggatgcttttggtagtgcacatagaatgcaatcttcaacatatggcattggaaaatttgttaaaattgcatgtgcaggacctcttttaatatctgaaattaacaacttaaaaaaagcgttaaaaaatccgaaacgtcctatggtcgctatagtaggaggtgcaaaggtatcaaccaaatttaatgtgttaaataaattagctgcaatttcagatacaatcattgttggaggaggtatagctaatacatttttagctattgataataaaattggaaaatcgttacatgaaccgaaatttatactaaaagctaaaaagttacgtgataaatacaacaacattgtgataccaatcgattctcgtgtaggaaaaaacttttctcataaagaaaaatgcacaataaaattatcttctaatattgaaaaaaacgaagaaatcatggatttaggtgataaaacaataaaaaaaattatcaaaatacttaaaaaatcaaaaacaattctttggaatggacctgttggtgtttttgagtttcctaattttcgtaaaggaactgaaatgattgcaaaagcaattgcagaaaataatggattttcaatagctggcggtggagatacactatctgttattgatatgtttcaaataaaagataaaatttcttatatttcaacaggaggaggagcatttttagaattcatagaagggaaaaaattacctgccatgaaaatgttagaagaaaattttcacaaataa

SEQ ID NO: 10665 - protein, 388 aa, Buchnera aphidicola
MNLRKMTELNITGKKILIRTDLNVPIKNGVIQSDARILAALPTIEIAIEKKAKIIILSHLGRPKEGCYTKKYSLFPIFEYLKKKLKKTKIYFSDNHLKKVEINSGEILILENVRFNVGELKNDENLSKEYANLCDIFVMDAFGSAHRMQSSTYGIGKFVKIACAGPLLISEINNLKKALKNPKRPMVAIVGGAKVSTKFNVLNKLAAISDTIIVGGGIANTFLAIDNKIGKSLHEPKFILKAKKLRDKYNNIVIPIDSRVGKNFSHKEKCTIKLSSNIEKNEEIMDLGDKTIKKIIKILKKSKTILWNGPVGVFEFPNFRKGTEMIAKAIAENNGFSIAGGGDTLSVIDMFQIKDKISYISTGGGAFLEFIEGKKLPAMKMLEENFHK

SEQ ID NO: 10666 - DNA, 1182 bp, Buchnera aphidicola
  CDS (1)..(1182)
atgtctattattaaaattactgatttaaatcttttaaataaaaaagttcttattcgctcagatttaaacgtaccaataaaaaacaataaaatttcatcatatgcacgtattcatgcatcacttccaacaattaaatttgctctaaaaaatctagctaaagtaattgtcacttcacacctaggtaggccaactgaaggcatatacaaaaaaaaattttcattatttcctgtttttaaatattttaaaaaaatacttcctgaaactaatatatatttttctcaaaatttaactgaatgctcttcaataaaatccggtgaattaattatattagaaaacgtgcgattcaaccaaggagaaaaagaaaatagcaaaattctatctaaaaaatatgctactttatgtgatatatttgtcatggatgcatttggtgcaatacatagaaacgaagcatcaactaatgggataataaaatacgctaaattagcatgttctgggttattacttgaatcagaactaaaaacattaaattcagctttaactaatcctgttcgtcctatggttgcaattgtaggaggagctaaagtatctactaagtttaaaacattaactacattagcaaaaatttcagataccttgatagtaggaggaggtattgctaatacatttatatctattgatcacaatattggaaaatctttacatgatccaaaatttattgaacaagctaaaatactaaaagaaaaatacaacatttttattccaacagattctcgagttagcactacgtttacatatgacagtatagccactataaaaagtacatctgatattcacgctaatgaagaaattatggattttggcgatattagtattaaaaatatgataaatataataaaaaaagctaaaactatcttatggaatggaccaataggagtgtttgaattcaaaaactttagtaaaggaacagaacaattgtcaaaagctatcgcttccagtgatgcattttccatagcaggtggaggtgatacattatcagttgttgaaatgtttaaagtacaaaataacatctcatatctttctactggaggtggttcgtttttaaaatttttagaagggaataaatttcgtataattgagttattagaaaaacactttaataaatttaaaaataataatttttaa

SEQ ID NO: 10667 - protein, 393 aa, Buchnera aphidicola
MSIIKITDLNLLNKKVLIRSDLNVPIKNNKISSYARIHASLPTIKFALKNLAKVIVTSHLGRPTEGIYKKKFSLFPVFKYFKKILPETNIYFSQNLTECSSIKSGELIILENVRFNQGEKENSKILSKKYATLCDIFVMDAFGAIHRNEASTNGIIKYAKLACSGLLLESELKTLNSALTNPVRPMVAIVGGAKVSTKFKTLTTLAKISDTLIVGGGIANTFISIDHNIGKSLHDPKFIEQAKILKEKYNIFIPTDSRVSTTFTYDSIATIKSTSDIHANEEIMDFGDISIKNMINIIKKAKTILWNGPIGVFEFKNFSKGTEQLSKAIASSDAFSIAGGGDTLSVVEMFKVQNNISYLSTGGGSFLKFLEGNKFRIIELLEKHFNKFKNNNF

SEQ ID NO: 10668 - DNA, 2061 bp, Candida albicans
  CDS (714)..(1967)
aacggaactacactagtgtcctagaatatgtatactaatttgcaaaacaaatgctggcaaaaaaaaaaacctacagtggtggttataataaattatagatatgaaaaaggagatgcagcaactgttgagaagttgttaattaggaagctttatacagtattactattattattacttgctgcaccacctgatgaaatattaaaaaattgtagtgttgcgtgtgtgtcaggaggcatgcgaaatatggagcgttcttccccgggataaactcaatcgaggtattttttttttcttcacttgaacacgagacgctttgacattgaccaaatatgacgcaaacattatgatttggtgattgtttagctatagggaaggcaattggaataggtgtcatatgatctagggctacaattgatcaatttgagcaaaaataatagacgtagacactaattattaatcttgatttcattatacgtatgttcaaatttgttttctctctcttccagttgtgcgtctactgactcctgattgaattttttttttgttcactttctacaaaaatatataaatcctcttttaattccaactcaattcactcctcatttcattcaattgaatttttttttctttcttctttctttttttatttcttatattttctaattcaatttttcaatcaagcgattatcaattgcagaagaataactatcaaaatgtcattatctaacaaattatcagtcaaagacttagacgttgctggaaagagagtctttatcagagttgacttcaacgtcccattggacggtaagactatcaccaacaaccaaagaattgttgctgctttgccaaccatcaaatacgttgaagaacataaaccaaaatacattgtcttggcttcccacttgggtagaccaaacggtgaaagaaacgacaaatactcattagctccagttgctactgaattggaaaaattgttgggtcaaaaagtcaccttcttgaacgattgtgttggtccagaagtcaccaaggctgttgaaaacgccaaagatggtgaaatctttttgttggaaaacttgagataccacattgaagaagaaggttcttccaaagacaaggatggtaagaaagtcaaggctgatccagaagccgttaagaaattcagacaagaattgacttcattggctgatgtctacattaacgatgcctttggtactgctcacagagcccactcctctatggttggtctcgaagttccacagagagctgctggtttcttaatgtccaaagaattggaatactttgctaaggctttggaaaacccagaaagaccattcttggccattttgggtggtgctaaagtttctgacaagattcaattgattgacaacttgttggacaaggttgatatgttgattgttggtggtggtatggccttcactttcaagaaaatcttgaacaaaatgccaattggtgattctcttttcgatgaagccggtgctaaaaacgttgaacacttggttgaaaaagctaagaaaaacaatgttgaattgatcttgccagttgattttgtcactgctgataaattcgacaaagatgccaaaacttcttctgctactgatgctgaaggtattccagacaactggatgggtttggactgtggtccaaaatctgtcgaattgttccaacaagctgttgccaaagctaagaccattgtttggaacggtccaccaggtgttttcgaatttgaaaaattcgccaacggtactaaatccttattggatgctgctgtcaaatctgctgaaaatggtaacattgttatcattggtggtggtgatactgctactgttgctaagaaatacggtgtcgttgaaaaattatcgcacgtttctactggtggtggtgcttcattggaattattagaaggtaaagacttgccaggtgtagttgctctttccaacaaaaactaattgatagtcgataatatagttacgttatataatatataagtgttatatgtatcttgaatattaattgaaaacaaaaaaaaaaagtaaaaattat

SEQ ID NO: 10669 - protein, 417 aa, Candida albicans
MSLSNKLSVKDLDVAGKRVFIRVDFNVPLDGKTITNNQRIVAALPTIKYVEEHKPKYIVLASHLGRPNGERNDKYSLAPVATELEKLLGQKVTFLNDCVGPEVTKAVENAKDGEIFLLENLRYHIEEEGSSKDKDGKKVKADPEAVKKFRQELTSLADVYINDAFGTAHRAHSSMVGLEVPQRAAGFLMSKELEYFAKALENPERPFLAILGGAKVSDKIQLIDNLLDKVDMLIVGGGMAFTFKKILNKMPIGDSLFDEAGAKNVEHLVEKAKKNNVELILPVDFVTADKFDKDAKTSSATDAEGIPDNWMGLDCGPKSVELFQQAVAKAKTIVWNGPPGVFEFEKFANGTKSLLDAAVKSAENGNIVIIGGGDTATVAKKYGVVEKLSHVSTGGGASLELLEGKDLPGVVALSNKN

SEQ ID NO: 10670 - DNA, 1203 bp, Candidatus Blochmannia floridanus
  CDS (1)..(1203)
atggttatgattaaaatgagtgatgtagatttatttaataaacgtattttaattcgtgctgacttaaatgtgcctatcagaaatggaattattacttctgctagaagaattcatgcgtcattgccaactattcagctagctttgtctagaagtaatcaagttatggtgacatctcatttaggtaggcctgtagaaggagaatatgactcacaattttctttgcaacctgtagtagattattttcaaaaaaatttaagcgctaaaattggaggtgtaagattagttaaagattatttagatggaattaattggatttcaaatgagttattgattttagaaaatgttcgattcaataaaggtgaaaaaacagatgatgaagtattagcaaaaaaatatgcatctttatgtgatgtatttgtaatggatgcttttggaagcgctcatcgtatacaatcttctactcacaatgttagtaaattcgttaaagtagcttgttctggtttattattagaacaggaaatagcagcgttacataaagctttgtctaatcctgttaggccaatggttgctatagttggtggatctaaagtttctagtaaattgatggtcttagagtctttatcaaaagtagtggattatttaatagtaggaggaggtattgctaatacttttttagcggctcaaggtcaaaatgtaggaaaatcgctgtatgaggcggaattaatttctacagctaaaagtttgttaaaggattgtaatatccctatacctactgatgttcgagtaagttcagagttttctgaaacagctcaatcgattatgaaaaatgtaactgaaattaaagatgatgaacaaattttagatttaggagataattcaattattaatatattaaatattttaaataatgctaaaactattttatggaatggtcctgttggagtatttgagtttcctaattttagaaagggtacagaaatggtatcaaatgctattgctaatagcaatgctttttctattgcaggaggtggtgatactttaatggccatcgatttatttggtattgcaaatcaaatatcttatgtttctactggaggaggagcctttttagaatttattgaaggtaaaactttaccatctattgaagttttagaggaacataaaagaatgagaaatggtaattattctgatattaattactga

SEQ ID NO: 10671 - protein, 400 aa, Candidatus Blochmannia floridanus
MVMIKMSDVDLFNKRILIRADLNVPIRNGIITSARRIHASLPTIQLALSRSNQVMVTSHLGRPVEGEYDSQFSLQPVVDYFQKNLSAKIGGVRLVKDYLDGINWISNELLILENVRFNKGEKTDDEVLAKKYASLCDVFVMDAFGSAHRIQSSTHNVSKFVKVACSGLLLEQEIAALHKALSNPVRPMVAIVGGSKVSSKLMVLESLSKVVDYLIVGGGIANTFLAAQGQNVGKSLYEAELISTAKSLLKDCNIPIPTDVRVSSEFSETAQSIMKNVTEIKDDEQILDLGDNSIINILNILNNAKTILWNGPVGVFEFPNFRKGTEMVSNAIANSNAFSIAGGGDTLMAIDLFGIANQISYVSTGGGAFLEFIEGKTLPSIEVLEEHKRMRNGNYSDINY

SEQ ID NO: 10672 - DNA, 1212 bp, Chlamydophila caviae
  CDS (1)..(1212)
atggatagattgacagtcagggaactttccccagaagaaaacaaggttttagttcgtgtagattttaatgttcctataaaagatgggaagattcttgatgatattcgcattcgtagtgctatgccaacaattaactatctgttgcaaaaacgcgctgctgtaattttaatgagtcatttaggccgccctaagggaacggggtttgaagagaagtattccctccagcctgttgttgaagttttagaaggctacttaggccatcacgttcctttagctcccgattgtattggggaggttgctcgtcaggcagtagcgcagctatctccagggcgcgtattgctattagaaaatctccgtttccataggggtgaagaacatcccgaagaagatcctacatttgctgctgaactttcttcttatggagatttttatgtgaatgatgcttttgggacttctcatagaaaacatgcttctgtttatcatgtgccccaagctttccctggaagatctgcagcaggccttcttatggagaaagaactcgagtttttagggcagcaccttctgcattctcctaaacgtccttttactgctatccttggtggggctaaagtatcttcaaaaatcggggtaatagaagccttactatcgcaagtgaacaacttactcttagcaggaggcatgggattcaccttcttaaaggcactaggtaagtccgtagggaattccctagttgaagaatcgggaatagagcttgctcgtcgtgttttgaaacttgcagagcagcgtaatgtgcgtatcgttctccctatagatgtaaaagttgccaaggcgtgcgagcctggagtcagctggtcagaaacacttatagatcaggggattcctgcagatcttgaaggtttagatatcggaaccaaaacgattcaagagttttgtaagatcattgatgcttcagcaacagtattttggaacggccccgtcggtgtttatgaagttcctccttttgatcaaggttctatggctatcgccaactgtctagcacgacattcttctgcaactaccgtcgtgggtggtggtgacgccgctgctgttgttgctttagccggatgtacctctcaagtctcacacgtatcgacaggcgggggagcttctttagagtttttagaaaacggctttttaccaggcacagaagttctctctccagcgcaagattaa

SEQ ID NO: 10673 - protein, 403 aa, Chlamydophila caviae
MDRLTVRELSPEENKVLVRVDFNVPIKDGKILDDIRIRSAMPTINYLLQKRAAVILMSHLGRPKGTGFEEKYSLQPVVEVLEGYLGHHVPLAPDCIGEVARQAVAQLSPGRVLLLENLRFHRGEEHPEEDPTFAAELSSYGDFYVNDAFGTSHRKHASVYHVPQAFPGRSAAGLLMEKELEFLGQHLLHSPKRPFTAILGGAKVSSKIGVIEALLSQVNNLLLAGGMGFTFLKALGKSVGNSLVEESGIELARRVLKLAEQRNVRIVLPIDVKVAKACEPGVSWSETLIDQGIPADLEGLDIGTKTIQEFCKIIDASATVFWNGPVGVYEVPPFDQGSMAIANCLARHSSATTVVGGGDAAAVVALAGCTSQVSHVSTGGGASLEFLENGFLPGTEVLSPAQD

SEQ ID NO: 10674 - DNA, 1212 bp, Chlamydia muridarum
  CDS (1)..(1212)
atggataaactatcaataaaagacctttccccagaagggaaaaaggtactagttcgtgtagattttaatgttcctattaaggacggaaaaattttagatgatgtccgtattcgtagtgctatgcctacgatcaattacctattgaagagagatgctgcgatcattttagtcagtcatttagggcgtcctaagggagatatgttcgaagaagcgtattcgttagctcctattgtgcctgtattagaaggatatttggggcatcatgtgcctctatctccagattgtgttggagaagttgcacggcaggctgttgcgcagttgtctcctggaagagtgcttcttcttgaaaatgtacgttttcatagaggggaagagcatcctgaggaggatcctagttttgctgttgagcttgctgcttacgccgatttttatgtaaatgatgccttcggaacctctcatcggaagcatgcttctgtgtatcgagttcctcaaatgttccccgatcgtgctgctgcgggatttctaatggaaaaagagcttgaatttttgggacagcatttattagtggagcctaagcgtccctttacggccatcctaggtggtgctaaggtatcttcaaaaataggggtaatcgaagctttactctcgagagttgataatttagtgttagctggaggtatggggtatacttttctaaaagctatgaatcagcaagttgggaattcattggtggaagagacaggcattcctttagcgaaaagggttttggaaaaagctcggacacaaggggttaagatttatcttccggtagatgccaaagttgcaagacgttgcgaaactggggaagattggcaagagttgtcaatacaggaggggattcctgagggtttctctggtttcgatattgggtctaagacgatagctctattttctgaggtgatccaagattccgcaacggtattttggaatggccctgttggggtttatgaagttcctcctttcgatcaaggatcaaaagccatcgctcagtgtcttgcaagtcattcttctgcagtgacggttgttggtgggggtgatgccgctgccgtagttgctttagcaggatgtacctcgcagatttcccatgtatccacaggaggaggagcttctttggaattcttagagaagggctatcttccagggacagaaattctctcccctgctcgcagttaa

SEQ ID NO: 10675 - protein, 403 aa, Chlamydia muridarum
MDKLSIKDLSPEGKKVLVRVDFNVPIKDGKILDDVRIRSAMPTINYLLKRDAAIILVSHLGRPKGDMFEEAYSLAPIVPVLEGYLGHHVPLSPDCVGEVARQAVAQLSPGRVLLLENVRFHRGEEHPEEDPSFAVELAAYADFYVNDAFGTSHRKHASVYRVPQMFPDRAAAGFLMEKELEFLGQHLLVEPKRPFTAILGGAKVSSKIGVIEALLSRVDNLVLAGGMGYTFLKAMNQQVGNSLVEETGIPLAKRVLEKARTQGVKIYLPVDAKVARRCETGEDWQELSIQEGIPEGFSGFDIGSKTIALFSEVIQDSATVFWNGPVGVYEVPPFDQGSKAIAQCLASHSSAVTVVGGGDAAAVVALAGCTSQISHVSTGGGASLEFLEKGYLPGTEILSPARS

SEQ ID NO: 10676 - DNA, 1194 bp, Chlorobium tepidum
  CDS (1)..(1194)
atgcagaaaaagacattgtctgacatatcgttacaaggaaaacgcgtcctgatgcgagtcgatttcaacgtgccgctcgaccaggacaggaacatcactgacgagaaaaggatcgtggaggcactgccttcaatccgcaaggtcatcgacaatggcggcaggctgattctgatgtcgcacctcggaagaccgaaaggcaaggtcaacccggcattctccctttcaccggtcgcaaagcgcctctccgagctgcttgattgcccggtgacgatggctggtgactgcatcggcaccgaggtgatgcagcaggtgctcgccttgcaggacggtgacgtgctcatgctcgaaaacctccgcttccaccccgaagaggaggctaatgatcctgacttcgccagggagctggcttcgctgggcgaaatctacgtcaacgacgcattcggtacggcgcaccgcgcccacgcctcgaccgagggcatcacccacttcatgcagaccgccgttgcgggctacctcatcgaaaaggagctgcgctatctcggtacggcgctcaacgatgcacagcgtccgttcgtggccattctcggcggcgcgaagatttcaggcaagatcgacgtgctcgaaagcctcttcgagaaagtcgataccgttcttgtcggcggcgcgatggtcttcaccttctttaaggctcagggcctcgacgttggcaactcgcttgtcgaagaaaacaagctcgaactggctgtttccctgcttgaaaaagccaaagcgaaaaacgtgcgcttgcttcttccggaagacgtggtcgtggccggagagatttccgccgacgcgccttcgcgtgtcgagccggtcagcgccatctccgcaggcatgattggtctcgacatcggcccggcaaccatcgaaacctaccgcaaggaaattctcgacgcgaaaaccgtgctctggaatggcccgatgggtgtgttcgagatcgaccagttcgccaggggcaccttcgccgtcgcccaggcgcttgccgacgcaaccgcagagggcgcgatcaccatcatcggcggcggcgactcggcggcggccatcgcaaaggctggcctctccgacaaggtgacgcacgtttcgaccggcggtggcgccagcctcgaattcctcgaaggcaaggagctgccgggcatcgcagccctgaacgattag

SEQ ID NO: 10677 - protein, 397 aa, Chlorobium tepidum
MQKKTLSDISLQGKRVLMRVDFNVPLDQDRNITDEKRIVEALPSIRKVIDNGGRLILMSHLGRPKGKVNPAFSLSPVAKRLSELLDCPVTMAGDCIGTEVMQQVLALQDGDVLMLENLRFHPEEEANDPDFARELASLGEIYVNDAFGTAHRAHASTEGITHFMQTAVAGYLIEKELRYLGTALNDAQRPFVAILGGAKISGKIDVLESLFEKVDTVLVGGAMVFTFFKAQGLDVGNSLVEENKLELAVSLLEKAKAKNVRLLLPEDVVVAGEISADAPSRVEPVSAISAGMIGLDIGPATIETYRKEILDAKTVLWNGPMGVFEIDQFARGTFAVAQALADATAEGAITIIGGGDSAAAIAKAGLSDKVTHVSTGGGASLEFLEGKELPGIAALND

SEQ ID NO: 10678 - DNA, 1176 bp, Chromobacterium violaceum
  CDS (1)..(1176)
atgaaattcaacaaactctccgaacagaatctttccggcaagcgcgcgctgatccgcgtggacatgaacgtgccgctgaagaacggcgtgatcggcgacgacacccgcatccgcgccagcctgcccaccatcgaacactgcctgaaggccggcgccgccgtgctgctgatgacccatctcggccgtccgaccgagggcgagcccaagccggaggacagcctggcgccggtggtggcccgcctgtccgagctgctgggcaagccggtgcgcctgatcgccgacttccacgccggcgtcgagcttgcgccgggcgaagtggcgatgctggagaacgtgcgcctgaacaagggcgagaagaagaacaacgacgagctgggccgcgcttacgccgcgctgtgcgacgtcttcgtccacgacgccttcggcaccgcgcaccgcgccgaggcctccacccacgcggtggccaagttcgcgccggtcgcctgcgccggcctgctgctgtcggccgagctcgacgcgctgggcaaagcgctgcaggcgccggcccgcccgctggtggccatcgtcgccggctccaaagtgtcgaccaagctgaccatcctggaagcgctggccgacaaggtggaccagctgatcgtcggcggcggcatcgccaacaccttcctgctggccgagggcaaggccatcggcaaatcgctggccgaggccgatctggtggaagacgcccgccgcgtgatcgccaagatccgcgcccgcggcggcgacgtgccgctgccggccgacgtggtgtgcgccaaggaattcgccgaaaccgccgccgcggccaccaagaacgtggcggaagtggtcgccgacgacatgatcctcgacatcggcccggacgctgccaaacagctggccgccatcatcgcccaggccggcaccgtggtgtggaacggcccggtcggcgtgttcgagttcgaccagttcggcaacggcaccaagacgctggcccaagccatcgcccagtccaaggcgttttcgatcgccggcggcggcgatacgctggcggcgatcgccaagtacggcatcaccgacgacatcagctacatctcgaccggcggcggcgccttcctggagttcctggaaggcaaggagctgccggcggtggccatcctggccgagcgcgcgcagtaa

SEQ ID NO: 10679 - protein, 391 aa, Chromobacterium violaceum
MKFNKLSEQNLSGKRALIRVDMNVPLKNGVIGDDTRIRASLPTIEHCLKAGAAVLLMTHLGRPTEGEPKPEDSLAPVVARLSELLGKPVRLIADFHAGVELAPGEVAMLENVRLNKGEKKNNDELGRAYAALCDVFVHDAFGTAHRAEASTHAVAKFAPVACAGLLLSAELDALGKALQAPARPLVAIVAGSKVSTKLTILEALADKVDQLIVGGGIANTFLLAEGKAIGKSLAEADLVEDARRVIAKIRARGGDVPLPADVVCAKEFAETAAAATKNVAEVVADDMILDIGPDAAKQLAAIIAQAGTVVWNGPVGVFEFDQFGNGTKTLAQAIAQSKAFSIAGGGDTLAAIAKYGITDDISYISTGGGAFLEFLEGKELPAVAILAERAQ

SEQ ID NO: 10680 - DNA, 1194 bp, Clostridium perfringens
  CDS (1)..(1194)
atgaacttcaataaaaagactatagaagacgttcaagtaaaaggtaaaaaagtattagtaagatgcgactttaacgttccattaaaagatggtgttataactgatgaaaacagattaaacggagctatgccaactataaaatacttagttgataatggcgctaaagtaatcctttgctcacatatgggtaaaccaaaaggagaagctaaaccagaattctcattagcacctgtagctaaaagattaagcgaaatgcttggtaaagaagtagtatttgctgctgacgacaacgttgttggagaaaatgctaaaaaagctgtagctgaaatgaaagatggagacgtagttttacttcaaaatacaagatacagaaaagaagaaactaaaaatggtgaagagttatcaaaagaattagctagcttagctgaaatgtttgttaacgatgcattcggtactgctcacagagctcactgctcaacagttggagtaactgaatacttaaaaccagcagtatgtggatacttaatccaaaaagagcttaagttcttaggagatgctgtagaaactccagaaagaccattcgttgctatcttaggtggagctaaagtttcagataagataaacgttataaacaaccttttagaaaaagttgatactttaataataggtggaggaatggcttacacattcttaaaagctcaaggatatactgtaggaagttcattagtagaagaagataaagttgaatacgctaaagaaatgttagctaaagctgaggaaaaaggtgttaaattattattacctgtagaccacagagtagctaaagaattcaaagatgttgaagctgtagttacagaagatcaaaacatcgctgaaggattcatgggattagatatcggaccaaaaactgaagctatctacgctgaagctataaaagatgctaaaacagttatctggaacggaccaatgggagtattcgaattcgaaaacttcaacaaaggaacaatagctgttgctaaagctatggctgaagcagatgctactactataatcggtggtggagattcagctgctgctgtaaacatcttaggattcggtgacaaaatgtctcacatctcaactggtggtggagcttcattagaattcttagaaggaaaagtattaccaggaatagctgctttaaacgataaataa

SEQ ID NO: 10681 - protein, 397 aa, Clostridium perfringens
MNFNKKTIEDVQVKGKKVLVRCDFNVPLKDGVITDENRLNGAMPTIKYLVDNGAKVILCSHMGKPKGEAKPEFSLAPVAKRLSEMLGKEVVFAADDNVVGENAKKAVAEMKDGDVVLLQNTRYRKEETKNGEELSKELASLAEMFVNDAFGTAHRAHCSTVGVTEYLKPAVCGYLIQKELKFLGDAVETPERPFVAILGGAKVSDKINVINNLLEKVDTLIIGGGMAYTFLKAQGYTVGSSLVEEDKVEYAKEMLAKAEEKGVKLLLPVDHRVAKEFKDVEAVVTEDQNIAEGFMGLDIGPKTEAIYAEAIKDAKTVIWNGPMGVFEFENFNKGTIAVAKAMAEADATTIIGGGDSAAAVNILGFGDKMSHISTGGGASLEFLEGKVLPGIAALNDK

SEQ ID NO: 10682 - DNA, 1206 bp, Clostridium tetani
  CDS (1)..(1206)
atggtttatgtggcatttaataaaaaaaccattgaagacattgatgttaaaggaagaaaagttttagtaagatgtgattttaatgtacctttaaaagatggaaaaataacagatgaaaatagattaatgggagcactaccaactattaaatatattatggaaaagggcggtaaagttattttatgttctcaccttggtaaaccaaaaggagagcctaaacaggaattatctctagcaccagtagctaaaagattatctgagcttttaaataaggaagttttatttccagcagataatgaagtagttggagaaaatgctaaaaaagcagtagaaaatatgaaagatggagatgtaatcctattacaaaatacaagatatagaaaagaagaaactaagaatgaagaaaccttttcaaaagaattagcatctcttgcagatatatttgtaaatgatgcttttggaacagcacatagagcacattgctctacagttggagtaacagaatttgttgcaacatcagtatgtggatacttaatccaaaaagaattaaagtttttaggtaatgctgttgaaaatccacaaagaccttttatatcaattcttggaggagctaaagtatctgataaaataaatgtaataaataatttattagaaaaagttgatactctaattataggtggaggaatgagctatactttccaaaaggctcaagggtacacaataggaagctctcttttagaagaagacaaaatagattatgcaaaagaaatgatagaaaaggcaaaagaaaagggagtaaaattacttctacctgtagataatgtagcagctgaaaaatttgcagaagatgcagaagctattataacagaagatcaaaatattaaagaaggatatatgggacttgatataggacctaaaacttcaaaactttattcacaagaggttcaaagcgctaagactgtagtttggaatggacctatgggtgtatttgaatttgaaaaatttgcaaaaggtactatagaagtagcgaaggccatggctgaatcacaagctacaaccataataggtggaggagatagtgctgcggctgtaaatcaacttggatttggggataaaatgacccatatatctacaggtggaggagcttcattagaatttttagaaggaaaagagcttccaggaatagcagcacttaacgataaatag

SEQ ID NO: 10683 - protein, 401 aa, Clostridium tetani
MVYVAFNKKTIEDIDVKGRKVLVRCDFNVPLKDGKITDENRLMGALPTIKYIMEKGGKVILCSHLGKPKGEPKQELSLAPVAKRLSELLNKEVLFPADNEVVGENAKKAVENMKDGDVILLQNTRYRKEETKNEETFSKELASLADIFVNDAFGTAHRAHCSTVGVTEFVATSVCGYLIQKELKFLGNAVENPQRPFISILGGAKVSDKINVINNLLEKVDTLIIGGGMSYTFQKAQGYTIGSSLLEEDKIDYAKEMIEKAKEKGVKLLLPVDNVAAEKFAEDAEAIITEDQNIKEGYMGLDIGPKTSKLYSQEVQSAKTVVWNGPMGVFEFEKFAKGTIEVAKAMAESQATTIIGGGDSAAAVNQLGFGDKMTHISTGGGASLEFLEGKELPGIAALNDK

SEQ ID NO: 10684 - DNA, 1218 bp, Corynebacterium diphtheriae
  CDS (1)..(1218)
atggctattaaaactcttaaagatctcttggcagaaggcgttgaaggacgccacgtgcttgttcgttcagatttcaatgtaccgctgaacgatgatcgtgaaattactgatgctggacgtattaccgcctcgctcccaacgatcaaagcattagttgacaacggtgctcgagtaatcttgatggctcacttgggccgccccaagggagaagtaaatgaaaaattctcactggctcctgtagcggaggcattgtctgaagcccttggacagtatgtcgcactcgcaggcgacgtcgttggtgaagatgctcatgaacgcgcgaacggtctcaatgacggtgacgttctgctccttgaaaacgttcgctttgatccacgcgagacctcgaaggaagaagctgagcgtggcgaatttgcggatcagcttgtcgcactcaccgctgaaaatggtgctttcgtatccgatggctttggcgttgttcaccgagctcaggcatcagtatttgatgttgcgcagagattgccgcattatgcgggaacactcgtggaaaaagagctagaagttcttggaaacaaggttgcctctgctccagaacgtccttatgcggtcattctaggtggcgcaaaggtgtctgacaagcttggcgtgatcgaagcgctagcaacaaaggctgacaaacttattattggtggcggaatgtgctacaccttcttggcagccaaaggtatcaacgtgcaaaagtcgctgttgcaagaagaacaaatcaacaagtgcaaagaacttctagaagcatacgctgataagatcgttcttccagttgatctggtagcagctgcagagttcgccagcgatgcagaaaataagatcgttgcaattgacgaaatccccgaaggctggatgtctcttgatgtcgggcctaagactgttgagaagtttgctgaggttctagcgacatcaaagaccgtattctggaatgggcctatgggcgtttttgagtttgaaaacttctcagccggtacccgtggcgtagcagaagctattatcgcagctacggctaatggtgcattctctgttgtcggcggtggcgattcggctgctgctgttcgacttcttggtctagacgaggatggattcagccatatctctactggtggcggagcatcacttgaactcctcgaaggcaaaaaccttcctggcgtttcggtgctcgaaagctaa

SEQ ID NO: 10685 - protein, 405 aa, Corynebacterium diphtheriae
MAIKTLKDLLAEGVEGRHVLVRSDFNVPLNDDREITDAGRITASLPTIKALVDNGARVILMAHLGRPKGEVNEKFSLAPVAEALSEALGQYVALAGDVVGEDAHERANGLNDGDVLLLENVRFDPRETSKEEAERGEFADQLVALTAENGAFVSDGFGVVHRAQASVFDVAQRLPHYAGTLVEKELEVLGNKVASAPERPYAVILGGAKVSDKLGVIEALATKADKLIIGGGMCYTFLAAKGINVQKSLLQEEQINKCKELLEAYADKIVLPVDLVAAAEFASDAENKIVAIDEIPEGWMSLDVGPKTVEKFAEVLATSKTVFWNGPMGVFEFENFSAGTRGVAEAIIAATANGAFSVVGGGDSAAAVRLLGLDEDGFSHISTGGGASLELLEGKNLPGVSVLES

SEQ ID NO: 10686 - DNA, 1218 bp, Corynebacterium efficiens
  CDS (1)..(1218)
atggctgtaaagaccctcaaggatctgctcgacgaaggcgtcgacggacgtcacgtcatcgttcgttcggacttcaacgtccccctcaacgatgatcgtgaaatcaccgacaagggccgcatcatcgcctccctgcccaccctgaaggcactgaccgaagccggcgccaaggtcatcgtcatgtcccacctcggccgccccaagggtgaggtcaacgagaagtactccctcgccccggtggctgaggcactgtccgacgagctcggtcagtacgtggcgctggcagccgatgtcgtcggcgaagacgcccatgagcgtgcaaacggcctgaccgagggcgatatcctcctgctggagaacgtacgcttcgatccacgtgagacctccaaggatgaggctgagcgcggtgcgttcgccgatgaactcgcagccctggccgccgacaacggtgcctttgtctccgatggtttcggcgtggtccaccgtgcacagacctcggtctacgacatcgccaagcgcctgccacactacgccggcagactggtggagaacgagatctctgtgctggagaagatcgccgagaaccccgaggcaccgtacaccgtcgtgctcggcggctccaaggtctccgacaagctcggtgtcatcgaggcgctggcctccaaggccgattccatcatcatcggtggcggcatgtgctacaccttcctcaaggcccagggacacgatgtccagaaatccatgctccaggatgagatgatcgacacctgcaaggatctcctcgagcgcttcggcgacaagatcgtccttcccgttgatctcacctgggcctccgagttcgccaaggatgctgagaagaaggtcaccgacctggattccgcaccggaggggtggctctccctcgacatcggaccgaagtccgtcgagaagttcgccgacgtcctcggtgcctccaagaccatcttctggaacggccccatgggtgtcttcgagttcgaggccttctccgacggcacccgtggtgttgcccaggcgatcatcgacgccaccgccaataacggggcgttctccgttgtcggcggcggtgactccgcagcatctgtccgtgtgctcggcctggatgaggagggcttctcccacatctccaccggtggcggtgcctccctcgaattcctcgagggcaaggaactgccgggcgtggcgatcctcaaggactaa

SEQ ID NO: 10687 - protein, 405 aa, Corynebacterium efficiens
MAVKTLKDLLDEGVDGRHVIVRSDFNVPLNDDREITDKGRIIASLPTLKALTEAGAKVIVMSHLGRPKGEVNEKYSLAPVAEALSDELGQYVALAADVVGEDAHERANGLTEGDILLLENVRFDPRETSKDEAERGAFADELAALAADNGAFVSDGFGVVHRAQTSVYDIAKRLPHYAGRLVENEISVLEKIAENPEAPYTVVLGGSKVSDKLGVIEALASKADSIIIGGGMCYTFLKAQGHDVQKSMLQDEMIDTCKDLLERFGDKIVLPVDLTWASEFAKDAEKKVTDLDSAPEGWLSLDIGPKSVEKFADVLGASKTIFWNGPMGVFEFEAFSDGTRGVAQAIIDATANNGAFSVVGGGDSAASVRVLGLDEEGFSHISTGGGASLEFLEGKELPGVAILKD

SEQ ID NO: 10688 - DNA, 1176 bp, Coxiella burnetii
  CDS (1)..(1176)
atgtccaatctcaatcttcacaacaaacgcgtgatgattcgtgaagacctgaacgtgccaatgaaaaatggaaaaattacgaatgatgaacggatcgtgcgcgcattgccgacgattcaaaaagccatagaacaaaaagcacgagtgatgattttatcgcatttgggaagacccgaagaagggaaattcgaaaaagaattttctttagccccggtagcgcgattgctgagtaaaaaattaaatcaaaaagtgccgctaatcaatgattggctcaaaggagtcgcggttgaaccgggtcaggccattctttgtgaaaatgtgcggtttaataaaggtgaaaacgaaaataataccgaactcgctaaacggatggcggagttgtgcgatatttttgttatggatgcttttgcaacggcacatcgtgcccaggcatccacggctggcgtcgctgcatacgcaaaattagcctgcgccggtcctttgctcatttccgaagtcgaagctttatcgcgcgccttagaaaatcctcaaaaaccattggtcgctgtggtaggcggctcaaaagtttcaaccaaaattcatttgttagaaaatttattagataaagtcgatcaattaatcgtaggcggtggtattgcaaatacctttttaaaagcgcagggctattcaattggaaaatcgctctgtgaaaatgaatggttggacgcggctcagcaattttgggaaaaagccgccgaaaaaaacgtttctctccccttgccggtggatgttattgtggcggatgaattgtcagaagatgcgaaagcaacggtgaaaaatatcgatgccgtaaccagtaacgaatctattttcgatgtagggccaaacacttcggcaacctacgccaagttaatggcgcaagcgggcacgatcgtttggaacgggcccatcggcgttttcgaaatagaagcatttagtcaaggaacacgcgcgttggcacaagccgttgcaaaaagtaccgcttattctatagtggggggtggagacaccctggctgctttggataaattcaatctgaccgatcaaatgtcttacgtcagtacagccggaggcgcatttttagagtttttggaaggaaaaatactacctgctattaaaattttaacgcaacgagcaaaagagtatgagcaaaaataa

SEQ ID NO: 10689 - protein, 391 aa, Coxiella burnetii
MSNLNLHNKRVMIREDLNVPMKNGKITNDERIVRALPTIQKAIEQKARVMILSHLGRPEEGKFEKEFSLAPVARLLSKKLNQKVPLINDWLKGVAVEPGQAILCENVRFNKGENENNTELAKRMAELCDIFVMDAFATAHRAQASTAGVAAYAKLACAGPLLISEVEALSRALENPQKPLVAVVGGSKVSTKIHLLENLLDKVDQLIVGGGIANTFLKAQGYSIGKSLCENEWLDAAQQFWEKAAEKNVSLPLPVDVIVADELSEDAKATVKNIDAVTSNESIFDVGPNTSATYAKLMAQAGTIVWNGPIGVFEIEAFSQGTRALAQAVAKSTAYSIVGGGDTLAALDKFNLTDQMSYVSTAGGAFLEFLEGKILPAIKILTQRAKEYEQK

SEQ ID NO: 10690 - DNA, 1182 bp, Desulfovibrio vulgaris
  CDS (1)..(1182)
atggccgttatcaagatgaccgatctcgacctcaagggaaaacgggttcttctgcgtgaagacctcaacgtgcccctcaaggaggggcgcatcaccagcgacaagcgcatacgcgccgctctgccgtccattcgcatggcgatggaggcgggggcccgtgtgcttatcgtctcgcatctgggtcgccccgtagagggcgagttcgatgaggctttttcgctcgcccctgtggccgcacatctttcgcgcgaactcgggcgtgatgtgcgtcttgtgaaggactacatcgacggtgtggatgtcgccgagggcgattgcgtcctgtgcgagaacgtccgctttctcaagggtgagaagaagaacaccgaggaactgggcagaaggcttgccgctctgtgcgacatcttcgtcatggacgcgttcggtgccgcacaccgggcgcaggcttctacccacgccgtggcgcgcttcgcccctgttgcctgcgcggggccgctgctggctgcagaacttgacgcgctggaacgcgcccttgacgccccgaagcacccgcttgtgggcatcatcggcggttcgaaggtctcgaccaagctgacgcttctcgacaacctgtcacaccgtgtcgaccgcctcatcgtgggcggcggcatcgccaataatttcatcaaggccgccggttacgaagtgggcaagtccctctatgagcccgaactcgtggaagaggccgcacgcctcatggccgcagccagggcagctggcggtgagattcccgtgccgctggacgtggtggtcggccccgagttggccgatggtgcccctgccacggtgcggaaggtctccgaagtcggccctgacgagatgattctcgacatcggccccgcgacggcgacacgttaccgcgagattctgctcgccgccggaaccatcgtctggaacggcccggtgggtgctttcgagtgggaacagttcggggcaggaacccgcgccctgtgcgaggctgtcgccgacagtcctgccttttcgatagccggcggtggcgataccgtcgccgccgtcgagaagtatggcgttgccagccgtgtgggatacatctccacgggtggtggagccttcctcgagttccttgaaggcaaggaacttccggctgtcgccatactgcaggaaagggccgcgcaatcgtga

SEQ ID NO: 10691 - protein, 393 aa, Desulfovibrio vulgaris
MAVIKMTDLDLKGKRVLLREDLNVPLKEGRITSDKRIRAALPSIRMAMEAGARVLIVSHLGRPVEGEFDEAFSLAPVAAHLSRELGRDVRLVKDYIDGVDVAEGDCVLCENVRFLKGEKKNTEELGRRLAALCDIFVMDAFGAAHRAQASTHAVARFAPVACAGPLLAAELDALERALDAPKHPLVGIIGGSKVSTKLTLLDNLSHRVDRLIVGGGIANNFIKAAGYEVGKSLYEPELVEEAARLMAAARAAGGEIPVPLDVVVGPELADGAPATVRKVSEVGPDEMILDIGPATATRYREILLAAGTIVWNGPVGAFEWEQFGAGTRALCEAVADSPAFSIAGGGDTVAAVEKYGVASRVGYISTGGGAFLEFLEGKELPAVAILQERAAQS

SEQ ID NO: 10692 - DNA, 1194 bp, Enterococcus faecalis
  CDS (1)..(1194)
atggctaaaaagacaattaaagatgtagatttaaaagacaaaaaagtccttgtccgtgttgactttaacgttccgttaaaagatggcgtgatcacaaacgataatcgtatcgtagcggctttaccaacaatcaaatacgtgattgaaaatggcggaaaagcaattcttttctctcatttaggtcgtgtaaaaacagaagaagacaaagctggcaaatcattaaaaccagtggctgaacgtttaagcgaattactaggtcaaccagttacttttgttccagaaacacgtggtaaagaattagaagacgctgttaacaatatgaaagatggcgacgttttagtatttgaaaacactcgttttgaagatgttgacggcaaaaaagaaagcggcaatgacgctgaattgggtaaatactgggcttctttaggcgatgtatttgtcaatgatgcttttggtactgcacaccgtgcacatgcctcaaacgttggaattgcttcaactggtatcccaacagttgctggtttcttaatggaaaaagaaattaaattcatcggcgaagctgttgaaaatccaaaacgtccattcgtagcaatcttgggtggcgcaaaagtttctgacaaaatcgctgtcattgaaaacctaattgaaaaagccgataaaattttaatcggtggcggtatggcttacacattcatgaaagcacaaggctatagtgttggtttatctttacttgaagaagataaagtggacttagcgaaaagcttaatggaaaaagctggcgacaaattagttttaccggttgatacagttgtctctaaagagttcagcaatgacgctcctttccacacggttccttcaactgaaatcccagatgatgaagaaggcttggatattggtgaaaaaacaattgaattattcgctaacgaattacaaggtgcgaaaacagttgtttggaatggaccaatgggcgtatttgaaatgagtaactttgccaaaggaacaattggtgtttgtgaagcgattgctaatttagaagacgcaacaacaatcatcggtggcggggactctgctgctgcagcaattcaattaggctacgaaaacaaattctctcacatctcaacaggtggcggagcaagtttagaattattagaaggcaaaactttaccaggtttagcttctattaacgataaataa

SEQ ID NO: 10693 - protein, 397 aa, Enterococcus faecalis
MAKKTIKDVDLKDKKVLVRVDFNVPLKDGVITNDNRIVAALPTIKYVIENGGKAILFSHLGRVKTEEDKAGKSLKPVAERLSELLGQPVTFVPETRGKELEDAVNNMKDGDVLVFENTRFEDVDGKKESGNDAELGKYWASLGDVFVNDAFGTAHRAHASNVGIASTGIPTVAGFLMEKEIKFIGEAVENPKRPFVAILGGAKVSDKIAVIENLIEKADKILIGGGMAYTFMKAQGYSVGLSLLEEDKVDLAKSLMEKAGDKLVLPVDTVVSKEFSNDAPFHTVPSTEIPDDEEGLDIGEKTIELFANELQGAKTVVWNGPMGVFEMSNFAKGTIGVCEAIANLEDATTIIGGGDSAAAAIQLGYENKFSHISTGGGASLELLEGKTLPGLASINDK

SEQ ID NO: 10694 - DNA, 1419 bp, Euplotes crassus
  CDS (89)..(1345)
ccccaaaacccctgattaagtcgaatcattgaatatttatcaaatttatttgaaaaaattgctgaaatctttaattatttggttagatatgctatctaagaaattgactgttgataagatcccccacatgattaagaacaagagagtcttagtcagagtagactttaatgttccaattaaggatggaaaggttgccgatcctacaagaattgtatctactcttgatacaatcaacttcttaaaggaaaatggtgctaaatccattgtgttgatgagtcatttgggtagaccaaaaggagttagacaagaacaattctcattagctcctgttgtcccagcgcttgaagacattattggccagaaagttaactttttaaacgactgtattggtactgaagttgaaggagaagtggcaaatactaaagatggaaatatcctgcttttggagaatctcagattctacttggaagaggaaggaaaaggagtcataaatggagagaaagtcaaagctgatccaaccaaggttgagtctttcagatcccaactcactagacttggagatctttatgtaaatgatgcttttggaacttgccacagagctcattcctcaatggttggtgtcaatgtggacaccagagctgccggatttttgttaaagaaggaacttgattacttctcaaaagttttagaagatcctaaaagacctctcaccgttattcttggaggagctaaagttgcagataaaattcaactgatcaacaatttgctagacttggcagatgaaatgatcattggtggaggaatggctttcacattcaacaaagtcctgaacaataccccaatcggagcatccctctatgatgaagaaggagctaagactgttcatggcattatggaaaaggcaaaagaaaagggagtaaagattcatattccaagtgattttgtttgtgctgagagctttgcagaagatgctaaatttgcctacaaactgaagatgaaggagtcccaagatggatggttaggtctggacattggagataaaactattcgcagctttgatgaggttattagaagatctaacacccttttctggaatggaccttcaggagtttttgaatggaaaaactttgctaaaggatctcatgcaatgcttcaagctgttactgaatcaaccaagaatggaacagtttctgtatgtggaggaggagataccctcaatcttttgaagcaagtagatggagccaaagagaatatttctcatgttagtactggaggaggtgcctccttagaacttgttgaaggaaaagaacttccaggaatcaaggctttgtctgatatcaactagcttggttactcaacaatttcaacacaatgctctaaagaaggggttttggggttttggggttttggggggaattc

SEQ ID NO: 10695 - protein, 418 aa, Euplotes crassus
MLSKKLTVDKIPHMIKNKRVLVRVDFNVPIKDGKVADPTRIVSTLDTINFLKENGAKSIVLMSHLGRPKGVRQEQFSLAPVVPALEDIIGQKVNFLNDCIGTEVEGEVANTKDGNILLLENLRFYLEEEGKGVINGEKVKADPTKVESFRSQLTRLGDLYVNDAFGTCHRAHSSMVGVNVDTRAAGFLLKKELDYFSKVLEDPKRPLTVILGGAKVADKIQLINNLLDLADEMIIGGGMAFTFNKVLNNTPIGASLYDEEGAKTVHGIMEKAKEKGVKIHIPSDFVCAESFAEDAKFAYKLKMKESQDGWLGLDIGDKTIRSFDEVIRRSNTLFWNGPSGVFEWKNFAKGSHAMLQAVTESTKNGTVSVCGGGDTLNLLKQVDGAKENISHVSTGGGASLELVEGKELPGIKALSDIN

SEQ ID NO: 10696 - DNA, 1197 bp, Fusobacterium nucleatum
  CDS (1)..(1197)
atgaaaaaaattataactgatttagatttaaataataaaaaagttcttatgagagtagattttaatgttcctatgaaagatggaaaaattactgatgaaaatagaattgttcaagcattgcctacaataaaatatgttttagaacataatgctaaacttattttattttcacatttaggaaaagttaaaatagaagaagataaggctacaaaaagtttaaaagctgttgctgaaaaattatcagaacttttaggaaaaaatgtaacttttattcctgaaacaagaggagaaaaattagaatctgctattaataatttaaaatctggtgaagtattgatgtttgaaaatacaagatttgaagatttagatggtaaaaaggaatctaaaaatgattctgaattaggtaaatattgggcatcactaggggatgtttttgtaaatgatgcttttggaactgctcatagagctcatgcttctaatgtaggaattgcagaaaatattggaaatggaaattcagctgttggtttcttagttgaaaaagaattaaaatttattggtgaagcagtaaataatccaaaaagaccattaattgctattttaggaggagcaaaagtttctgataaaataggggttattgaaaatctattgactaaggctgataaaattctaattggtggagctatgatgtttactttcctaaaagcagaagggaaaaatattggaacttcattggttgaagatgataaattagacttggctaaagatttattagctaaatcaaatggaaaaatagttttacctgttgatacagttattgcaagtgaatttaaaaatgatattgaattttctactgttgatgtagataatattccaaataataaaatgggacttgacattggtgaaaaaactgttacactatttgatagttacataaaaactgctaagactgttgtatggaatggacctatgggagtatttgaaatgtctaactttgcaaaaggaacaataggagtatgtgagtcaatagcaaatttaactgacgcagtaacaataataggtggaggggattctgctgctgctgcaattagtttgggctatgcagataaatttactcatatttctactggtggaggagcatctttagaattcttagaaggaaaagttttaccaggagtcgaagctatatcaaataaataa

SEQ ID NO: 10697 - protein, 398 aa, Fusobacterium nucleatum
MKKIITDLDLNNKKVLMRVDFNVPMKDGKITDENRIVQALPTIKYVLEHNAKLILFSHLGKVKIEEDKATKSLKAVAEKLSELLGKNVTFIPETRGEKLESAINNLKSGEVLMFENTRFEDLDGKKESKNDSELGKYWASLGDVFVNDAFGTAHRAHASNVGIAENIGNGNSAVGFLVEKELKFIGEAVNNPKRPLIAILGGAKVSDKIGVIENLLTKADKILIGGAMMFTFLKAEGKNIGTSLVEDDKLDLAKDLLAKSNGKIVLPVDTVIASEFKNDIEFSTVDVDNIPNNKMGLDIGEKTVTLFDSYIKTAKTVVWNGPMGVFEMSNFAKGTIGVCESIANLTDAVTIIGGGDSAAAAISLGYADKFTHISTGGGASLEFLEGKVLPGVEAISNK

SEQ ID NO: 10698 - DNA, 1262 bp, Glomus mosseae
  CDS (1)..(1251)
atgtcactttcaaacaaattatcaatacgagacttaaacgtcaaagacaaacgagtcttaatacgagtcgacttcaacgtccccctcgatggcacaaccataaccaacaaccaacgcatcgtcgcagcccttccaacaatcaagtatgcactagaacagaaagccaaaaccgtcgtgttaatgtcacatcttggccgtcctgacggaaagaaggtcgacaagtattcacttgcgccagtggcgaaggaggtcgagagactgcttgggaagaaggtgacgtttttggaggattgcgttggggagggtgtggagaattatgtgaagaatgcctgtgatggggaggttattctcttggagaatttgaggtttcacgctgaggaggaggggagctccaaggggcctgatggcaagaaagttaaggcggatctggaaaaagttaaggagtttagaaggtctttgacggctcttggtgatgtttacatcaatgatgcttttggaaccgcacatcgagcacacagttccatggttggcgtcgaattacctcaaaaagcagccggtttcctcgtcaagaaagaattagagtactttgccaaagcgctcgaatcccccgaacgacctttcctagctattctcggcggtgcaaaggtgtccgataagatccagctcattgataacttgatcgccaaggtagatagtttgatcatttgtggtggtatggcgttcacgttcaagaagacgcttgagaacgtcaagattgggaactcgctatttgacgcggacggcgcgaagaccgttggagaggtcatggagaaggcgaagaagcatgacgttgaggtcgtcttgcctgttgactacattaccgcggataagtttgccaaggacgcgcaagttgggtatgctactgatcaagagggaattcctgatgggtggatgggattggactgcggcgagaagtctgttgagttgtataagcagactattgctaaggcgaagactatcctttggaatgggcctgctggggttttcgagtttgataactttgctaaggggacgaaggctactttggactgcgcagttgaggcagcacaatctggaaagattgtcatcatcggtggtggtgataccgcaactgttgctgcgaaatatggcgttgaggacaagctgagccatgtctcgactggcggtggagcttctttggagttgctcgaaggcaaggatcttcctggtgtctctgctctctcgagtaagtaaacgagattcac

SEQ ID NO: 10699 - protein, 416 aa, Glomus mosseae
MSLSNKLSIRDLNVKDKRVLIRVDFNVPLDGTTITNNQRIVAALPTIKYALEQKAKTVVLMSHLGRPDGKKVDKYSLAPVAKEVERLLGKKVTFLEDCVGEGVENYVKNACDGEVILLENLRFHAEEEGSSKGPDGKKVKADLEKVKEFRRSLTALGDVYINDAFGTAHRAHSSMVGVELPQKAAGFLVKKELEYFAKALESPERPFLAILGGAKVSDKIQLIDNLIAKVDSLIICGGMAFTFKKTLENVKIGNSLFDADGAKTVGEVMEKAKKHDVEVVLPVDYITADKFAKDAQVGYATDQEGIPDGWMGLDCGEKSVELYKQTIAKAKTILWNGPAGVFEFDNFAKGTKATLDCAVEAAQSGKIVIIGGGDTATVAAKYGVEDKLSHVSTGGGASLELLEGKDLPGVSALSSK

SEQ ID NO: 10700 - DNA, 1224 bp, Gloeobacter violaceus
  CDS (1)..(1224)
atggcgaagaaaacggttgaggccctgggggcggcggacctcaagggtaagcgggctctggtgcgggttgattttaatgttcccctcgacgagagcggccagatcacagacgatacgcgcattcgcgctgcgttgcccaccattggaatgttgaccggtgggggggcgcgggtaatcctggtgagccacctggggcgtcccaagggttttgacgatcagttgcgcctcacgccggtggccaagcgcctgggcgaactgctcggccagacggtctacaaagccgacgacgtgattggcccggaagtcgaagaagcggtcaagaagctcgaagacggcgatgtgctgctgttggagaacgtgcgcttctacccggaagaagaaaaaaacaaccccgaatttgcccagaagctcgcgggcctcgccgaactttatgtcaacgacgccttcggcaccgcccaccgcgcccacgcctccaccgaaggcgtggcgcgctacttgcgcccggcggtggcggggctgcttttgcaaaaagaactcgaatacctgggcaaagccctcgaaagcccggaacggccggtgcttgccatcatgggcggcgccaaagtgagcgacaagattcagcttatccagaacatgctcaccaaggtcgattcgatcttgatcggcggggcgatggcctacacgttcctcaaagcccaaggcgtggatgtgggagcttcccgctgcgagacgagcaccaccaaaaaggacggcacgaccgtcgatttgctccagctggccctcgacctgcttgccgaggcgaaggaacggggcgtcaccttcttgctgccggtcgaccaccgcaccaacgataagtttggtgaccttgccgacccgccggtcacccccgatgccaacatcccggagggccagatggccctggacatcggtcccaagaccgaggaactctacgtggccgaagtccaaaaatcgggcacggtgatctggaacggtccgatgggcgtcttcgaactgccgggattcagcaaaggcaccttcgcggtggcccatgccctggctgagagcgacaacctctcgatcgtgggcggcggcgacagcgcctcggcggccgagaaagccggtgtggtcgacaagctcagccacgtgagcaccggtggcggtgcctcgctcgaatttctcgaaggcaagaccctgcccggggtagcggccctcgacgaagcctga

SEQ ID NO: 10701 - protein, 407 aa, Gloeobacter violaceus
MAKKTVEALGAADLKGKRALVRVDFNVPLDESGQITDDTRIRAALPTIGMLTGGGARVILVSHLGRPKGFDDQLRLTPVAKRLGELLGQTVYKADDVIGPEVEEAVKKLEDGDVLLLENVRFYPEEEKNNPEFAQKLAGLAELYVNDAFGTAHRAHASTEGVARYLRPAVAGLLLQKELEYLGKALESPERPVLAIMGGAKVSDKIQLIQNMLTKVDSILIGGAMAYTFLKAQGVDVGASRCETSTTKKDGTTVDLLQLALDLLAEAKERGVTFLLPVDHRTNDKFGDLADPPVTPDANIPEGQMALDIGPKTEELYVAEVQKSGTVIWNGPMGVFELPGFSKGTFAVAHALAESDNLSIVGGGDSASAAEKAGVVDKLSHVSTGGGASLEFLEGKTLPGVAALDEA

SEQ ID NO: 10702 - DNA, 1176 bp, Haemophilus ducreyi
  CDS (1)..(1176)
atgtccgttaaaaaaatggctgaccttgatttaactggtaaacgtttattcattcgtgctgatcttaacgtccccgtaaaggaaggtaaaatcacctcagatgctcgtattcgagctacaatcccgacgttaaaattagccttacaaaaaggtgcgaaagtgatggtgacatcacacttaggtcgtccaactgaaggcgtatttgaagaagcaaattcattacaacctgtagttgattacttaaatgcatctgatttaggtgtgcctgtacggctagtgcgtgactatttagatggtgtagaagtcaaccaaaatgaaattgttgtccttgaaaatgtgcgcataaataaaggcgagaaaaaaaatgatgctgaactagcaaaaaaatatgctgccttatgcgatatttttgttatggacgcatttggtactgcacaccgcgcagaatgctcaacctatggcatagcagaatttgcacctatagcttgtgcagggccattattggcagccgagcttgaagcattaggtaaagcattaaaagaaccacagcgcccaatgttagcaattgtaggtggttcaaaagtgtcaaccaaactaaccgttttagatagcctctcaaaaattgctgatcaactgattgtcggggggggcattgccaacatattcattgcggcagaagggcataatgtaggtaaatccttatatgaagctgatttaatcccagaagcaaaacgattagcgtcaaccactcatattcctgttcctgttgatgtgcgtgtaggtacagaattttctgaaacagccacagcaaccgaaaaattagtatcagaagtgaccgccgatgaatctatcttcgatattggcgacaaatccgctgaagaattagctcatattattaaatccgcgaaaacgattttttggaatggccctgtaggggtctttgaattcgcgaacttccgtaaaggaacggaaattatctcaaatgcaattgcagaagccactgcaaatggggcattttctatcgcaggtggtggcgatacattggctgcaattgatttatttggcattgccgataaaatttcttatatctcaaccggcggcggtgctttcttagaatttgtagaaggcaaagtattacctgctgttgaaattttagaaaaacgtgcaaacagctaa

SEQ ID NO: 10703 - protein, 391 aa, Haemophilus ducreyi
MSVKKMADLDLTGKRLFIRADLNVPVKEGKITSDARIRATIPTLKLALQKGAKVMVTSHLGRPTEGVFEEANSLQPVVDYLNASDLGVPVRLVRDYLDGVEVNQNEIVVLENVRINKGEKKNDAELAKKYAALCDIFVMDAFGTAHRAECSTYGIAEFAPIACAGPLLAAELEALGKALKEPQRPMLAIVGGSKVSTKLTVLDSLSKIADQLIVGGGIANIFIAAEGHNVGKSLYEADLIPEAKRLASTTHIPVPVDVRVGTEFSETATATEKLVSEVTADESIFDIGDKSAEELAHIIKSAKTIFWNGPVGVFEFANFRKGTEIISNAIAEATANGAFSIAGGGDTLAAIDLFGIADKISYISTGGGAFLEFVEGKVLPAVEILEKRANS

SEQ ID NO: 10704 - DNA, 1209 bp, Helicobacter hepaticus
  CDS (1)..(1209)
atgaaggaaactggaatcgaattaatgaaaaatacaaaaagtgtgcgtgatattgacgtcaaagacaaaagagtgcttattcgcgtggattttaatgtgccaatggacgaggattttgatatttcagatgatacgcgtatccgcgaagcactacccactattaattattgcattgataatcacgcacaaaatatagtgcttgtcagccatttagggcgtcccaaaggacgcaatgcagagttttcactcaaacacgtgcttaaacgtgtagagcgacttttaggacgcgatatagctttcgcagagacaatagaaaatgtagaaaatcttcaacaacaaagcaagagtggaagtgtgattttacttgaaaatattagattctatgagggagaggaaaaaaatgatgaggaactctctactaaactcgcctctatttgtgatgtgtatatcaatgatgcctttggcacaagccatcgcgcacattcaagcacctgtggcattgctaaatatgccaaagagtgtgtagcaggattattgctcaaaaaagaaattgattcatttgctaaagcaatggcaaatccacttaaaccggtgttacttatcgttggcggaagcaaggtaagctctaaactcgcactcttatataatatccttgatgtggtggataaaatcatcattggtggtgcgatgagcaatactttccttaaagcacgaggttttgatatgcaaaaatcccttgtggaagatgatttagtgagtgaagcacgtaagattttggataaagcaaaagaaaaaaaagtcaaaatctaccttcctgtagatgttgtaagcactgatgatattaaagaacatcgccatatcaaaatcacgcctgcacaagatataccagagggctttatggcagtagatatgggacctgcaacaagtaagctctttagtgaagtggtaagggattctcaaacaattatttggaatggaccgcttggcatttatgaaatacaagctttttcacgcggcacttttaaccttgcccacgctgtgagcgatacttatgcctttagtcttattggtggtggcgatactgctgatgcaatagacaaggcaggagagcgagacaatatgagctttatttccacgggtggtggagcaagtttggagctacttgaagggaaaattcttcctgcatttgaggtgcttgagcgcaaataa

SEQ ID NO: 10705 - protein, 402 aa, Helicobacter hepaticus
MKETGIELMKNTKSVRDIDVKDKRVLIRVDFNVPMDEDFDISDDTRIREALPTINYCIDNHAQNIVLVSHLGRPKGRNAEFSLKHVLKRVERLLGRDIAFAETIENVENLQQQSKSGSVILLENIRFYEGEEKNDEELSTKLASICDVYINDAFGTSHRAHSSTCGIAKYAKECVAGLLLKKEIDSFAKAMANPLKPVLLIVGGSKVSSKLALLYNILDVVDKIIIGGAMSNTFLKARGFDMQKSLVEDDLVSEARKILDKAKEKKVKIYLPVDVVSTDDIKEHRHIKITPAQDIPEGFMAVDMGPATSKLFSEVVRDSQTIIWNGPLGIYEIQAFSRGTFNLAHAVSDTYAFSLIGGGDTADAIDKAGERDNMSFISTGGGASLELLEGKILPAFEVLERK

SEQ ID NO: 10706 - DNA, 1525 bp, Lactobacillus delbrueckii
  CDS (127)..(1338)
tcgtactttgttgcactttgctactctttaatttaaagttttctaaattgaattagtagtgtgaaagaaggcggagggaaatttcttccttccgccttttttcgatgaatataggagattttttcaatggctaaattgattgtttctgacgtagacgttaaggacaagaaggttttggttcgcgttgacttcaacgtgccgattaaggacggcgttatcggcgacgacaaccgtatcgtggctgctttgccaactatcaagtacatcatcgaaaacggcggcaaggctatcttgctttcccaccttggccggatcaagagcgatgaagacaagaagagcttgagcctggctccagttgccaaacgtttgggcgaattgcttgaaaagcctgtaactttcgtaccttcaaacgaaggcaaggaagttgaagacgccatcaacaacatgaaggacggcgacgtagttgttttggaaaacacccgtttccaagacatcgacaacgacttcggcaagcgtgaatcaaagaacgaccctaagctgggcgaatactgggcatcattgggtgacgttttcgtaaacgacgcgttcggtactgctcacagaagccacgcttcaaacgttggtatcgctacggccatgaaggctgccggtaaaccagtagctgctggtttcctgcttgaaaaggaaatcaagttcctgggcaacgctgttgctaacccagttcacccattcgtaactattcttggcggggctaaggtttctgacaagatcggcgttattaccaacttgattccaaaggctgaccacatcatcatcggtggtggtatggcttacaccttccttaaggctcaaggccacaatatcggcaagtccctggttgaagacgacaaggttgaatttgccaaggaattgctggaaaaggctggcgacaagctggttctgccaatcgaccacgtagccgcaactgaattcaacaacgatgctgcttcagaagttgttggccaagacatcccagacaacgaaatgggcttggacatcggtcctaagactattgaactcttcaagaagactcttgaaggtgccaagactgttgtttggaacgggccaatgggcgtcttcgaaatgccaaacttcgccaagggtactttggaagttggccgtgctttggctgacttgccagacgctactactattgtcggcggtggtgactcaactgctgctgctaagcaattggggatcgctcctaagttgactcacatctcaactggtggtggtgcatctcttgaataccttgaaggtaaggaattgccaggtatcgcttgcgtttcagacaagtagtttaggaggatttttcaaatgtcacgtaccccaattattgctggtaactggaagctgaacatgaacccaaaggaaactgttgagttcgtaaacgctgttaaggaccaattgccggacccatcaaaggttgaatcagtgatttgtgcaccagcagttgacttggacgccttgctgaaggctgccgaag

SEQ ID NO: 10707 - protein, 403 aa, Lactobacillus delbrueckii
MAKLIVSDVDVKDKKVLVRVDFNVPIKDGVIGDDNRIVAALPTIKYIIENGGKAILLSHLGRIKSDEDKKSLSLAPVAKRLGELLEKPVTFVPSNEGKEVEDAINNMKDGDVVVLENTRFQDIDNDFGKRESKNDPKLGEYWASLGDVFVNDAFGTAHRSHASNVGIATAMKAAGKPVAAGFLLEKEIKFLGNAVANPVHPFVTILGGAKVSDKIGVITNLIPKADHIIIGGGMAYTFLKAQGHNIGKSLVEDDKVEFAKELLEKAGDKLVLPIDHVAATEFNNDAASEVVGQDIPDNEMGLDIGPKTIELFKKTLEGAKTVVWNGPMGVFEMPNFAKGTLEVGRALADLPDATTIVGGGDSTAAAKQLGIAPKLTHISTGGGASLEYLEGKELPGIACVSDK

SEQ ID NO: 10708 - DNA, 1212 bp, Lactobacillus johnsonii
  CDS (1)..(1212)
atggctaaattaatcgtttcagaccttgatcttaaaggtaaaaaagttttagttcgtgttgacttcaatgttccaattaagaatggtgttattggtgacgacaaccgtattgttgctgcattaccaactattaaatacatcattgatcacggtggtaaagcaattttgcttagccacttgggtcgtgttaagtcagatgctgacaagaaagaattgtcattacgtccagtagcagaacgtttaagtgaattattagaaaagcctgtaacttttgtaccagaaaacgagggtaaagaagtagaagaagctatcgacaacatgaaggatggcgacgttgttgttcttgaaaacactagattccaagatattgacaacgactttggtaagcgtgaatctaagaacgatccaaagcttggcgaatactgggcaagtcttggtgatgtatttgtaaacgatgcatttggtactgctcacagaagtcacgcttcaaacgttggtattgcaactgctatgaagaaggctggtaagcctgcagcagctggttacttacttgaaaaggaaattaagttcttaggtgatgctgttgaaaacccagttcacccatttgtaactattcttggtggtgcaaaagtatcagataagattggtgttattgaaaacttaattcctaagtcagatcacattttaatcggtggtggtatggcttatactttcttagctgcacaaggtcacaagattggtaaatcattatttgaagctgacaaggtagaacttgctaagagcttgcttgaaaaggctggcgacaagatcgttcttccagttgataacgttgctgctactgaattctcaaatgatgctcctcacgaaattgttggtgatgatattcctgacaacgaaatgggtcttgacatcggtcctaagactgttgaaaaattcagagacatcttaaaggatgctaagactgttgtatggaacggacctatgggtgcattcgaaatgccaaattacgcagaaggtactttggaagttggtcgtgcattagctgacttaaaggatgccgtaactattattggtggtggtgactcaactgctgctgctaagcaattaggaatcgctcctaagatcagccacatttctactggtggtggtgcttcacttaactaccttgaaggtaaagaattaccaggaatcgcttgtgtttctgacaagtaa

SEQ ID NO: 10709 - protein, 403 aa, Lactobacillus johnsonii
MAKLIVSDLDLKGKKVLVRVDFNVPIKNGVIGDDNRIVAALPTIKYIIDHGGKAILLSHLGRVKSDADKKELSLRPVAERLSELLEKPVTFVPENEGKEVEEAIDNMKDGDVVVLENTRFQDIDNDFGKRESKNDPKLGEYWASLGDVFVNDAFGTAHRSHASNVGIATAMKKAGKPAAAGYLLEKEIKFLGDAVENPVHPFVTILGGAKVSDKIGVIENLIPKSDHILIGGGMAYTFLAAQGHKIGKSLFEADKVELAKSLLEKAGDKIVLPVDNVAATEFSNDAPHEIVGDDIPDNEMGLDIGPKTVEKFRDILKDAKTVVWNGPMGAFEMPNYAEGTLEVGRALADLKDAVTIIGGGDSTAAAKQLGIAPKISHISTGGGASLNYLEGKELPGIACVSDK

SEQ ID NO: 10710 - DNA, 1203 bp, Lactobacillus plantarum
  CDS (1)..(1203)
atggctaaattaatcgtttcagatttagatgttaaagataaaaaagttttaattcgtgtcgactttaatgttccaattaaagacggcaaaattggtgacgacaaccggatcgtcgctgccttaccaacgatcaaatacgtgattgaacatgatggcaaagccatcttattctcacatttaggtcggattaagagcgaagacgacaagaagggcttaagcttacgtcctgttgcagaacgtctttcaaacttattaaacaagcctgttaccttcgtccctgttactgaaggcgaacaacttgaaactgccatcaacaacatgaacgacggtgacgtcttagttgttgaaaacactcgttttgaagacgttgttaacggcgaacaagttaagcgcgaatctggtaacgatcctgaattaggcaagtactgggcttcacttggtgatgtctacgtcaacgatgctttcgggactgctcaccggagccatgcttctaacgttgggattgcttcaaacatggatcaagttgccgctggtttcttaatggaaaaggaaatcaagttcttaggtgacgcggttgacaatcctaagcacccattcgttgctatcttaggtggtgccaaggtttctgataagatcggtgttatcgatcacttaatcagcaaagctgacaagatcatcatcggtggtgggatgacttatacgttctatgctgctaaaggcatgggcattggtaactcacttgttgaaaaagacaagattgaattggctaagtcaatcatcgaaaaagctggcgacaagttagtcttacctagcgactcaatcgttgctgaaaagtttgataacgatgttcctagcaaggttgttgaaggttcaattcctgatggctacatggccttagatattggtcctaagtcaatcgaagaattcgaagatgttttacgcgacgctaagaccgttgtttggaacggaccaatgggtgtcttcgaaatgagcaactacgccaagggtacgcttgaaattggtaagttcttaggaaccttatcagacgcaacgaccatcgttggtggtggggactcaactgccgctgttaagcaacttggcgttggcgacaagttaacccacatttctactggtggcggtgcttcacttgaataccttgaaggtaaggaattacctggtattgctgctatttctgaaaaataa

SEQ ID NO: 10711 - protein, 400 aa, Lactobacillus plantarum
MAKLIVSDLDVKDKKVLIRVDFNVPIKDGKIGDDNRIVAALPTIKYVIEHDGKAILFSHLGRIKSEDDKKGLSLRPVAERLSNLLNKPVTFVPVTEGEQLETAINNMNDGDVLVVENTRFEDVVNGEQVKRESGNDPELGKYWASLGDVYVNDAFGTAHRSHASNVGIASNMDQVAAGFLMEKEIKFLGDAVDNPKHPFVAILGGAKVSDKIGVIDHLISKADKIIIGGGMTYTFYAAKGMGIGNSLVEKDKIELAKSIIEKAGDKLVLPSDSIVAEKFDNDVPSKVVEGSIPDGYMALDIGPKSIEEFEDVLRDAKTVVWNGPMGVFEMSNYAKGTLEIGKFLGTLSDATTIVGGGDSTAAVKQLGVGDKLTHISTGGGASLEYLEGKELPGIAAISEK

SEQ ID NO: 10712 - DNA, 1191 bp, Leptospira interrogans
  CDS (1)..(1191)
atggaattacctagacttgaaaatgtagatctctcaggaaagagagttttcctgagagtagattttaacgttccagtagaaaatggaaaagttacagacaaaactagaattgaaaagactcttcctacaatcgaacttctgattaaaaaaggcgcaaggataattattgcgagtcacttaggaagacccaaaggacaagtaaatcctgaattttctttggcgccagtagttgaaactttccaaagtcttgtaaaatctaaggtttatttttctaagacagtaatcggagaagacgcgattaaactttctaaagaacttaaaaacggcgaaattttagtaattgaaaacgttcgttttcataaagaagaagaggaaaatgatcctggtttttccaaaaaacttgctgcgttagccgacatctatgtgaacgacgcttttggggcagcccacagagcgcactcttccaccgaaggaattgcacgtctacttcctgcatatgcaggtcttctaatgcacaaagagatcttagaactttctgcgcttctgcataaaccggctcgtccatttgtggcgatcataggaggttccaaagtttccactaagatcaaggtcctaaccaatctattcgacaaggtaaatcatcttctcattggtggtggaatggcttatacgtttttaaagtccagagcgatccctattggaaattcactcgtggaaaaagaattcgaagttcaagcctttcagttaatcgaaaaagcaggcgtcgctggtatcgatttacaacttccggtagatcacatcattggagatcagtttaacgaaaaggcaaagaccaagtccgtagataagatgggaattttagacggttggatgggaatggatataggctctaaaacggtttctaactacgaaaagattattaaaaacgctggtacgattttttggaacgggccaatgggtgtttttgaaatggataaatttgcgagtgggactatggcaatcgccaaagcagtcgctaaatccaaggcaaaaacagttgtaggtggaggagattccatcgctgcaatcaacaaagctagagttgcagataaaattactcatatctcaactggcggtggagcttccctcgaatttatggaaggtagaaaacttccaggagtagaagcccttaagaaaaaaacttccgagtaa

SEQ ID NO: 10713 - protein, 396 aa, Leptospira interrogans
MELPRLENVDLSGKRVFLRVDFNVPVENGKVTDKTRIEKTLPTIELLIKKGARIIIASHLGRPKGQVNPEFSLAPVVETFQSLVKSKVYFSKTVIGEDAIKLSKELKNGEILVIENVRFHKEEEENDPGFSKKLAALADIYVNDAFGAAHRAHSSTEGIARLLPAYAGLLMHKEILELSALLHKPARPFVAIIGGSKVSTKIKVLTNLFDKVNHLLIGGGMAYTFLKSRAIPIGNSLVEKEFEVQAFQLIEKAGVAGIDLQLPVDHIIGDQFNEKAKTKSVDKMGILDGWMGMDIGSKTVSNYEKIIKNAGTIFWNGPMGVFEMDKFASGTMAIAKAVAKSKAKTVVGGGDSIAAINKARVADKITHISTGGGASLEFMEGRKLPGVEALKKKTSE

SEQ ID NO: 10714 - DNA, 1221 bp, Methanopyrus kandleri
  CDS (1)..(1221)
atgtacgaaaacatatctactatggacgatttcgagttcgaaaataaatgggtcttgttacgaattgatataaattcgacggttatcgatggtaaaattgaggacgatgaacgtattaaaagacatctcgggacgatcaaggagttaatggaacacgacgccagggtggccattctagcacaccaaggaagaccgggtgaggatgacttcacgacactggaaccacatgcggaaatcatgtccgaagaactcgacaacttcgagtacgtgcccgacgtgttcggacccaccgcgaagaagaagattcggtcgttggagcccggcgaagttatcctgctggagaacgtgcggttctattccgaggaacgtatcaaccgggacccggagtggcacgcacgccgacatttggtgcggaacctggccccgctgttcgacattttcgtgaacgacgccttcgctgcggcccatcgctcgaacgcttcactggtcgggttcactcgaagacttccgtcttgcgtcggccgtgtgatggagcgcgagatcgaagtcctcgaaaccatggtcagagacgagatggaggacggcgtcttcgtgatcggagggtccaagatcgaggatgctatcaaggtcatacgccgagccatcgagatggacaacgtacgtcgcgtgttactgggaggtctcgtgggcaatctcttcctttgggcctccggagtggatctagggaaaccttcacggaaattcctggatatgaagggttacacgggctacttggacgaggcacgggagctcctcgaggaaggtgacgacgtgatcctcgtacccgaagacgtggctctcaaccgcggtggagagcgcgaggaggtagacgtggacgaactgccagcggacgctcccgtcttcgacatcggtaccggaacgatcgaacggtatcgcaaggaggtcgaaagcgcgggtatggtggtcgcgaacgggccgatgggcgtgtacgaggaacccggattcgagaagggaacgtacgaggtcctcaatgctatcgccgattcggaggctttctccgtgatcggaggaggccacataattgcggcggcgaaagcctgtggtgcttatgacagcatagatcacgtcagcacgggtggcggagcgatgctccgaatgctcgccggggagcgactaccggccatagatgccatcctcacttgcccgttctcggggtgctga

SEQ ID NO: 10715 - protein, 406 aa, Methanopyrus kandleri
MYENISTMDDFEFENKWVLLRIDINSTVIDGKIEDDERIKRHLGTIKELMEHDARVAILAHQGRPGEDDFTTLEPHAEIMSEELDNFEYVPDVFGPTAKKKIRSLEPGEVILLENVRFYSEERINRDPEWHARRHLVRNLAPLFDIFVNDAFAAAHRSNASLVGFTRRLPSCVGRVMEREIEVLETMVRDEMEDGVFVIGGSKIEDAIKVIRRAIEMDNVRRVLLGGLVGNLFLWASGVDLGKPSRKFLDMKGYTGYLDEARELLEEGDDVILVPEDVALNRGGEREEVDVDELPADAPVFDIGTGTIERYRKEVESAGMVVANGPMGVYEEPGFEKGTYEVLNAIADSEAFSVIGGGHIIAAAKACGAYDSIDHVSTGGGAMLRMLAGERLPAIDAILTCPFSGC

SEQ ID NO: 10716 - DNA, 1251 bp, Methanosarcina mazei
  CDS (1)..(1251)
atgctgagggtaatgacttccagaaactttcttacgatcgatgattttgacatacgcggaaagacgattcttttaagggtcgacatgaactctcctatggacactcagggtcacattctggacgatatgaggatcaggagtcatattgccactcttaaagaccttgagagtgcaaaagtcgttgtgcttgcgcaccagagccggcctgggaaaaaagacttcaccactatgaaacctcatgctcacctgctgtccaggtatctgggcaggcaagttacttatgtggacgacatcttcgggacttttgcgaagactcagatcgcttctatggaagacggggacgtcatcatgctcgaaaacgtcaggttctattctgaagagagcctcgagaggactacagccgagcaggccaatacttttatggttaaaaaactggcaccctttgttgatattttccttaatgacgcgtttgcggtatctcacaggtctcatctctctgttgtaggctttaccgaagtcctcccttccggagcaggcagggtaatggaaaaagaacttatttccctggaaaaaggagttaaaagtggagagaggccaagcgttttcgtgctggggggggcaaaagtggacgactcacttagagtaaccgaaaatgtcctcacaaacgggggagctgacagagtcctccttacaggggtagttgcaaacgttgcccttgccgcttccggagtaaatataggaaaagccaatctggatttcattaaatcccagggctacgaagaccagatagaaagggcgagaggtttgcttgcgaagttcgaagataaaatcggacttccgaaagacgttgctttaaatgataacaaaaagcgtgttgaagctcctatttccgaacttaattccgattctctgcccattaacgatataggtcttgaaaccattgtggactacaccaatgaaatccagaatgccaaaacagttgtcctgaacggccctgccggggtttcagagattgaggactttgccctcggaacccatgaaattataaaagctgctattaaatccgatttctctatcattggcggcgggcatatctctgtggaagttgcacacctcgggcttgaacaccgcttttcacacataagcactggaggaggagcctgtattgatttccttgcaggggaaaagctgccaggcgtcgaagctctcaaggctgcttacaataagtatcaggaagctaaaaagctttaa

SEQ ID NO: 10717 - protein, 416 aa, Methanosarcina mazei
MLRVMTSRNFLTIDDFDIRGKTILLRVDMNSPMDTQGHILDDMRIRSHIATLKDLESAKVVVLAHQSRPGKKDFTTMKPHAHLLSRYLGRQVTYVDDIFGTFAKTQIASMEDGDVIMLENVRFYSEESLERTTAEQANTFMVKKLAPFVDIFLNDAFAVSHRSHLSVVGFTEVLPSGAGRVMEKELISLEKGVKSGERPSVFVLGGAKVDDSLRVTENVLTNGGADRVLLTGVVANVALAASGVNIGKANLDFIKSQGYEDQIERARGLLAKFEDKIGLPKDVALNDNKKRVEAPISELNSDSLPINDIGLETIVDYTNEIQNAKTVVLNGPAGVSEIEDFALGTHEIIKAAIKSDFSIIGGGHISVEVAHLGLEHRFSHISTGGGACIDFLAGEKLPGVEALKAAYNKYQEAKKL

SEQ ID NO: 10718 - DNA, 1245 bp, Methanococcus maripaludis
  CDS (1)..(1245)
atgtttttaactcttgacgactttgaattggaaggaaaaacggttgcattgagagttgacattaatagccctattgatgttaatactggagatattttagatgatacaaggattaaggcatgcagtgatacgataaaaagtctttcagaaaaaggagcaaaggttgttattttagcacaccagagcaggcctggaaaaaaagattttacgactcttgaagctcacgcgaaaaaactgtccgaagtattaaatatggaagttacacacgtagatggattaatctgcgcgtctgcacgtgaagcaattcttgcaatggataatggggaaataatacttcttgaaaacgtaaggcttcttgcagaagaagttttatccgattggaagtcttgggaagaaattactccagaaaaacaggctaaaacagtcatgattaagaaattacatccttttttcgattattttgttaacgatgcatttgcagcagctcacagggctcaaccttctcttgttggattttcttactatgttccaatgttatgcggaagggtcatggaaaaagaattatttacacttacaaaagttctcaaaaaccctgaaagaccttgcgtgtttgcattgggtggtgcaaaagctgacgacagtattgaagtattgaaaaacgttcttgaaaaacagaccgccgatcaggttttaacaagtggtgttgttgcaaatatctttttagttgcaaaaggttacaaaatcgggccaaatgaaaatgtaattgctgacatgggatacaccaaccagatagaaattgcaaaagagttaatttcaaaatatggggacaaaatcgtggttccaatcgatgcagcattaaatgtcgatggtgaacgggttgaaaaagaactcgacttaaacgaagaaataacttaccctattcacgacatgggcgaaaaaaccatgaaactctacgaagaaattttaaaagatgcaaaaacggttgttgcaaacggacctgctggagttttcgaaaataaaaatttcttaaaaggaacagaagaacttttaaaaagcactgcaaattcaaaaggcttttcggttatcggtggaggacacctctcagcagctgccgaagttgtagggttggcaggaaaaatggaccacatcagcactggtggcggtgcatgtatcgaatttttagctggtaaaaaacttcctgtaattgaaatgctgtccaaatcttacgaaaaacataaactttaa

SEQ ID NO: 10719 - protein, 414 aa, Methanococcus maripaludis
MFLTLDDFELEGKTVALRVDINSPIDVNTGDILDDTRIKACSDTIKSLSEKGAKVVILAHQSRPGKKDFTTLEAHAKKLSEVLNMEVTHVDGLICASAREAILAMDNGEIILLENVRLLAEEVLSDWKSWEEITPEKQAKTVMIKKLHPFFDYFVNDAFAAAHRAQPSLVGFSYYVPMLCGRVMEKELFTLTKVLKNPERPCVFALGGAKADDSIEVLKNVLEKQTADQVLTSGVVANIFLVAKGYKIGPNENVIADMGYTNQIEIAKELISKYGDKIVVPIDAALNVDGERVEKELDLNEEITYPIHDMGEKTMKLYEEILKDAKTVVANGPAGVFENKNFLKGTEELLKSTANSKGFSVIGGGHLSAAAEVVGLAGKMDHISTGGGACIEFLAGKKLPVIEMLSKSYEKHKL

SEQ ID NO: 10720 - DNA, 1242 bp, Mycoplasma gallisepticum
  CDS (1)..(1242): transl_table=4
atgattaactacaataagaagaccttaaaggatgttgatctaaaagataaaacagtaattgtacgtgttgattttaacgtaccaattaaagacaataaggttatagatgatacaagaattgttcaagcattagatacgattaaatatctaatcgaacaaaactgtaagatcgttttattaagtcacttaagccgaattaagtcattagaagatattagttctaaaaagaagagcttaagaccagtttatgaaaacttaaaaaccaaacttaacaacgttaagtttttagaagaaaacgttggttatgacgttgttgaagcggttaaacaattaaaacaccaagaagttttattattggaaaacactcgttataacgatgtcgacaatcaaggtgaagttgttaaaaaagaatctaaaaacagtccagaactaggacgtttctgagctagtttagctgatgtttttgtcaacgacgcatttggtacttcacaccgtgcgcatgcttcaaacgttgggattgctgcaaatatctcgcaatcttgtattggtttcttagttcaaaaagaactagaagcattatcaaaattaacaaacaacccacaacgtccgtttgttgtgatcttaggtggtgctaaggtatcagataaattaaaagtaatcgaatcattactaaaatctgctgatcaaattctaatcggtgggggaatggttaatacctttaataaggctaaaggttatcatattggtaaatcattattcgaacctgagatgttagaaactgctaagaagatcttagctgaagataaggataataagatcattttagcgactgatcagatggtaactaaagctagtacgatcactgatattaaaactgcacctgctggtaagtgtgtgtttgccaaagatgaagcagaaaacgaagattttgaagctttagatatcggtgatgaatcaatcaaaactttcaaatcttatatagctaaagctaaatcaatcttctgaaacggtcctttaggtgtttttgaaaaccctaattacgaacgtggatcttatgagattgctaaagcgatcagtgaatctgatagttatagtgtgatcggtggcggtgatagtgctgctgctgcaaaccaatttaaattagccgacaaatttagctttgtctcaactggtggtggtgcttcattaacatttatggaacaaactgttctaccagggattgaagcgatccaatcaaaataa

SEQ ID NO: 10721 - protein, 413 aa, Mycoplasma gallisepticum
MINYNKKTLKDVDLKDKTVIVRVDFNVPIKDNKVIDDTRIVQALDTIKYLIEQNCKIVLLSHLSRIKSLEDISSKKKSLRPVYENLKTKLNNVKFLEENVGYDVVEAVKQLKHQEVLLLENTRYNDVDNQGEVVKKESKNSPELGRFWASLADVFVNDAFGTSHRAHASNVGIAANISQSCIGFLVQKELEALSKLTNNPQRPFVVILGGAKVSDKLKVIESLLKSADQILIGGGMVNTFNKAKGYHIGKSLFEPEMLETAKKILAEDKDNKIILATDQMVTKASTITDIKTAPAGKCVFAKDEAENEDFEALDIGDESIKTFKSYIAKAKSIFWNGPLGVFENPNYERGSYEIAKAISESDSYSVIGGGDSAAAANQFKLADKFSFVSTGGGASLTFMEQTVLPGIEAIQSK

SEQ ID NO: 10722 - DNA, 1215 bp, Mycoplasma hyopneumoniae
  CDS (1)..(1215): transl_table=4
atgcagccaacctacaaaaataaaaagtttattgatgatattgattttttaaataaaactgtaattctccgtgttgattttaatgtgccgatcaaaaatggagaaattagttctataaaaagaatcattgcaagtcttaaaactattaaaaaaattgtaaataatggcggtaaattagtgattttatcccatcttggccggataaaatccaaagaagatcttccaaaaaaatcccttagaatagtagctgaaaaattagctgaaattttaggtcaggaaattaaatttatccctgaaaaccgtggtcctaaagtcgaaaatgcaattagccaacttgaaaaaggtgaaattttagtacttgaaaatacaagatttcaggacctaaataataaagctgagtccaaaaacgatgctgaattaggcagatattgagcctcccttggtgatgtttttatcaatgatgccttcggaactcttcatcgggctcatggatcaaatgtcggaattgcaacttatattaaagaatcagcaattggatatttagtaaaagaagaattagatgccctttcaaaactaattttttccccgcaaagaccattttatgcaattatcggcggggcaaaaatatccgataaaatcgggataatttcaactttattagaaaaagctgataaagttttaatcggtggcggaatggcttatactttcaaaaaagcacttggttataaaattggtctttcgatttatgaagatgacaaacttgaacttgctgctagtctagtcaaaaaatatccagataaattaattttagctcttgatgcggctctagccccagaatttgccgatcttgaacctttatataatcaggaaaatccccttgaaatccctgatcatttagaaggaatggatattggtcctttaacaattgagttattcaaggatcatctaaaagatggaaaaactatcctttgaaatggaactttaggcgtagccgaatttaaaaattttgcccgtggaaccaaggaagttgccaaaattattgccaatctaaaagaatgttatagtatcattggcgggggagattcaatcgctgcaattgaagccgaaggtcttagtaattcattttcccatatttctacaggcggaggcgcttcaattagttttattgaaaacggtgatttaattggacttggcccaatccaggaaaaagactaa

SEQ ID NO: 10723 - protein, 404 aa, Mycoplasma hyopneumoniae
MQPTYKNKKFIDDIDFLNKTVILRVDFNVPIKNGEISSIKRIIASLKTIKKIVNNGGKLVILSHLGRIKSKEDLPKKSLRIVAEKLAEILGQEIKFIPENRGPKVENAISQLEKGEILVLENTRFQDLNNKAESKNDAELGRYWASLGDVFINDAFGTLHRAHGSNVGIATYIKESAIGYLVKEELDALSKLIFSPQRPFYAIIGGAKISDKIGIISTLLEKADKVLIGGGMAYTFKKALGYKIGLSIYEDDKLELAASLVKKYPDKLILALDAALAPEFADLEPLYNQENPLEIPDHLEGMDIGPLTIELFKDHLKDGKTILWNGTLGVAEFKNFARGTKEVAKIIANLKECYSIIGGGDSIAAIEAEGLSNSFSHISTGGGASISFIENGDLIGLGPIQEKD

SEQ ID NO: 10724 - DNA, 1215 bp, Mycoplasma mycoides
  CDS (1)..(1215): transl_table=4
atgaattacaataacaaaaaaacattaaaagacatagatgttaaaaataaaactgtattagttcgtgtggattttaatgtaccaattcaaaatggagttattactgatgataatcgtataattgctgcttttcctactataaattacttacttgaaaatgatgcaaaaattgttttattttcacacttatcaagaattaaatcaaaagaagataaactaaaaaaatctttagccccagttgctaaaagattagaagaattattaaataaacaagttaaatttattaatcaaactagaggacaagaactagaaaaagctattagttcattacaatctaaagaaattattttagttgaaaacactagatttgaagatgttttagatgatcaagttgttaagtatgaatcaaaaaacaattctgaattaggaaaatattgagctagtttgggagaagtttttgtaaatgatgcttttggaactgcacatagggcacacgcttcaaatgttggaattgcttcaaatattaaagtttcagctattggatttttagttgaaaaagaactaaaaatgttatttcaagcagtcaatgaacctaaaaaaccatttattgctattttagggggagctaaagtttcagataaaattggtgttattgaaaatttattaccaaaagtagataaattattaattggtggaggaatgagttatacattcttaaaagcattaggaaaaactattggtaaatcattattagaagaagataaaattgatttagcaaaacattatttagaaattggtaaagataaaattgtagtacctgttgatactgcttgtgcaaaagaatttgcagatgttagtccaactatttttgaaggaaatattcctgacgaatgagatggattagatgccggaccaaaaacaattgaattatttaaacaagaaattaaaaaagctaaaactattgtttgaaatggacctgttggagtatttgaatttaaaaactttgaaaacggtacaaaatcagtctgtcaagccattgctgaacaaacacaaaatggtgcatttactttaattggtggtggagatagtgcttcagctgcaattaatatgggatttaaagataaattttcatgaatttcaactggtggaggagcttcacttgaatttatggaaggaaaagaattactaggaatttctgcaattcaagataaataa

SEQ ID NO: 10725 - protein, 404 aa, Mycoplasma mycoides
MNYNNKKTLKDIDVKNKTVLVRVDFNVPIQNGVITDDNRIIAAFPTINYLLENDAKIVLFSHLSRIKSKEDKLKKSLAPVAKRLEELLNKQVKFINQTRGQELEKAISSLQSKEIILVENTRFEDVLDDQVVKYESKNNSELGKYWASLGEVFVNDAFGTAHRAHASNVGIASNIKVSAIGFLVEKELKMLFQAVNEPKKPFIAILGGAKVSDKIGVIENLLPKVDKLLIGGGMSYTFLKALGKTIGKSLLEEDKIDLAKHYLEIGKDKIVVPVDTACAKEFADVSPTIFEGNIPDEWDGLDAGPKTIELFKQEIKKAKTIVWNGPVGVFEFKNFENGTKSVCQAIAEQTQNGAFTLIGGGDSASAAINMGFKDKFSWISTGGGASLEFMEGKELLGISAIQDK

SEQ ID NO: 10726 - DNA, 1248 bp, Mycobacterium paratuberculosis
  CDS (1)..(1248)
atggctgtccacaatctcaaagaccttctcgccgaaggtgtttccggacgcggtgtgctggtgcgttcggacctgaacgtgccgctggactccgatggtgagcaaggccggatcaccgaccccggccgcatcaccgcgtcggtgccgacgttgagcgcactggtcgaggcgggcgccaaggtggtggtcgccgcgcacctcgggcgtcccaagaacgggccggacccggcgttgtcgctggccccggtggccgccgcgctcggcgagcagctgggccggcacgtgcagctggcctcggacgtggtgggcaccgacgccctggcccgcgccgaggggttgaccgacggcgacgtcctgctgctggaaaacatccggttcgacgcccgcgaaacgtccaaggacgacgccgagcggctcgcgctggcccggcagctggccgaattggtcggtcccacaggcgctttcgtctccgacggtttcggcgtggtgcaccgcaagcaggcctcggtgtacgacgtcgccacgctgctgccgcactacgccggcacgctggtggccgaggagatcgccgtgctggagcagctgaccggctccaccaaacgcccctacgcggtggtgctcggcgggtccaaggtgtccgacaagctcggcgtcatcgagtcgctggccaccaaggccgacagcatcgtcatcggcggcggcatgtgcttcaccttccttgccgcgcaagggttttcggttggcaagtcgctgctggaaaccgagatggtggacacctgccgccggctgctggacacctacgtcgacgtgctgcggctgccggtggacatcgtggcggccgacaggttcgccgccgacgcggcgccgcagaccgtgccggccgacgccatccccgacgacctgatgggcctggacatcgggccgggatcggtcaagcggttcaccgcgctgctgtccaacgccgagacgatcttctggaacggcccgatgggcgtgttcgagttcccggcgttcgccgcgggcaccaaggggctggccgaagcgatcgccgcggcgaccggcaagggcgccttctccgtggtcggcggcggcgactcggcggccgcggtgcgcgcgctgggcatcccggagagcggcttctcgcacatttccaccggcggcggggcgtcgctggaataccttgagggcaaggcacttccgggcatcgaggtgctgggacgtccgcaaccgacgggaggcgccgcgtga

SEQ ID NO: 10727 - protein, 415 aa, Mycobacterium paratuberculosis
MAVHNLKDLLAEGVSGRGVLVRSDLNVPLDSDGEQGRITDPGRITASVPTLSALVEAGAKVVVAAHLGRPKNGPDPALSLAPVAAALGEQLGRHVQLASDVVGTDALARAEGLTDGDVLLLENIRFDARETSKDDAERLALARQLAELVGPTGAFVSDGFGVVHRKQASVYDVATLLPHYAGTLVAEEIAVLEQLTGSTKRPYAVVLGGSKVSDKLGVIESLATKADSIVIGGGMCFTFLAAQGFSVGKSLLETEMVDTCRRLLDTYVDVLRLPVDIVAADRFAADAAPQTVPADAIPDDLMGLDIGPGSVKRFTALLSNAETIFWNGPMGVFEFPAFAAGTKGLAEAIAAATGKGAFSVVGGGDSAAAVRALGIPESGFSHISTGGGASLEYLEGKALPGIEVLGRPQPTGGAA

SEQ ID NO: 10728 - DNA, 1179 bp, Nitrosomonas europaea
  CDS (1)..(1179)
atgtccgttattaaacttgtcgatcttgatctgaagaacaaacgcgtctttatccgcgctgatttgaatgttcctgtaaaagacgggaaagtgacatcagatgcgcgcattactgcctcgatggcaacgatcaaccactgcctgaaacaaggcgcaaaagtcatggtgacctctcatcttggacggccggaagaaggggtatggacagaagaaaattctctccagccggttgccgatgatattgcccggagactgggaaagcctgtccggttgatcaaagactgggtagagggtggatttgaagttgcatctggagagttggtagtcctggaaaattgtcggatcaataaaggtgaaaaaaagaacctcgaagaaaccgccaagaaatatgccagtttgtgtgatgtattcgtcatggatgcttttggtacagcacaccgtgcagaagcttcgacacatggtatcgccaaatatgcaccgattgcctgtgcaggtattttgcttaccgaagaactcgatgcgctgacaaaagccctgcatcagccagcacatccgctggtggcaatcgtaggcggatcaaaagtttccaccaaactgaccgtgctggaatcgcttgctgaaaaagttgatcagctcgtagtcggcgggggaattgccaacacttttctcaaggccgcagggaacaacattggaaaatccctgtgcgaggatgaactggtacccgttgcaaaatccctgatggataaaatgaacaagcgtaatgcaacgattcccatcgcagtagatgtcgtcgtcggaaagaaattcgctgaagatgaagctgctgttctaaaagcagccaacgctgtttctgatgacgacatgatctttgatatcgggcctgagagtgctcaagaattggtcgacatcatcatgaaagccggtacggtagtctggaatggcccggtcggtgtattcgaattcgatcaatttggagaaggaacacgcgccatagccaaggcaattgctgaaacggatgccttcaccctggcggggggcggtgacacaatcgctgccatccaaaagtacgacatctacgataaagtttcctatatatccactgccggaggagcattcctggagtttctggaagggaagaaattacctgctgtcgagattctggaattacgtgcgaagtga

SEQ ID NO: 10729 - protein, 392 aa, Nitrosomonas europaea
MSVIKLVDLDLKNKRVFIRADLNVPVKDGKVTSDARITASMATINHCLKQGAKVMVTSHLGRPEEGVWTEENSLQPVADDIARRLGKPVRLIKDWVEGGFEVASGELVVLENCRINKGEKKNLEETAKKYASLCDVFVMDAFGTAHRAEASTHGIAKYAPIACAGILLTEELDALTKALHQPAHPLVAIVGGSKVSTKLTVLESLAEKVDQLVVGGGIANTFLKAAGNNIGKSLCEDELVPVAKSLMDKMNKRNATIPIAVDVVVGKKFAEDEAAVLKAANAVSDDDMIFDIGPESAQELVDIIMKAGTVVWNGPVGVFEFDQFGEGTRAIAKAIAETDAFTLAGGGDTIAAIQKYDIYDKVSYISTAGGAFLEFLEGKKLPAVEILELRAK

SEQ ID NO: 10730 - DNA, 1182 bp, Oceanobacillus iheyensis
  CDS (1)..(1182)
atgaacaaaaaaacaattaacgatctacaagttgaaggaaagcgagtatttacacgcgtagactttaatgttcctttaaaagatggtgagattacagatgatacacgtattcgcgccgcactaccgacaattgaacaattaacagcacaaggtgcaaaagtgattttagctagtcatctaggacgacctaaaggaacagttgtagaagaactacgtttagaccctgttgctgatagacttagtgatctattaggtaaagaagtattgaaaacagatcaagtttatggtgaagaagttgatcaggctatcagtgagctagaaaacggtggagttcttttaatagagaacgttcgctttgaagctggagaagaaaaaaatgatcctgaattagtggaagcattcgctaacatggctgacctttatgtcaatgatgcttttggtgctgctcatcgtgcacatgcatctacaactggcgtagcagagaaattaccagcagctgcaggtaaattaatggagaaagaaattgaagcactaggcaacgctctagaaaatccggaacgaccgtttacagcaattgttggtggagcgaaagtaaaagataaaattagtgtgatcgataatctgttagataaagtagataatttgattattggtggcggtctagcttacacgttcatcaaagcacaaggtcatgagattggaaaatcacttctagaagaagataaaattgatttggctaaagaatttatgaacaaagcgaaagaaaaaggtgttaactttgtattgccagtcgacgctattgtggccgatgatttctcagaagaggctaataccaaaattgtagatatagataaaattccttctgactgggaagcgttagatataggcacgaagacaagagaaaaatatagtagtatcgtgaaagattcaaaacttgttatatggaatggaccaatgggagtatttgaattaaatgcattcgcaggtggtacaaaagctgtagcagaagcattagcatctacagaaggctactctataataggtggtggcgattctgcggcagctgttgaaaagttcggccttgcagaagaaatggatcatgtatctacaggtggaggagcatcattagaattcatggaaggaaaagttcttcctggactagctgctctaaatgataaataa

SEQ ID NO: 10731 - protein, 393 aa, Oceanobacillus iheyensis
MNKKTINDLQVEGKRVFTRVDFNVPLKDGEITDDTRIRAALPTIEQLTAQGAKVILASHLGRPKGTVVEELRLDPVADRLSDLLGKEVLKTDQVYGEEVDQAISELENGGVLLIENVRFEAGEEKNDPELVEAFANMADLYVNDAFGAAHRAHASTTGVAEKLPAAAGKLMEKEIEALGNALENPERPFTAIVGGAKVKDKISVIDNLLDKVDNLIIGGGLAYTFIKAQGHEIGKSLLEEDKIDLAKEFMNKAKEKGVNFVLPVDAIVADDFSEEANTKIVDIDKIPSDWEALDIGTKTREKYSSIVKDSKLVIWNGPMGVFELNAFAGGTKAVAEALASTEGYSIIGGGDSAAAVEKFGLAEEMDHVSTGGGASLEFMEGKVLPGLAALNDK

SEQ ID NO: 10732 - DNA, 1197 bp, Onion yellows phytoplasma
  CDS (1)..(1197)
atgacaaaatccttaactaatatgaatattacaaataaaaaagttttattgcgagcagacctaaatgttcctttagaaaacagcgttatcacagatgacaacagaattaaggctattttacctactttaaaatatttagttcagcaaaaagctaaagttattattttttctcatttgggacgcgttaaaactgaagctgataaagcccattttagcttgcaagtggtagctgaaaaaattgctttttatttgcaacaaaaattaaagtttgttccagaaacccaaggcaacaccttaaatcaagctgttggccagatgcttccaggggatgttttagtagtccaaaatactcgttttgaagatgttcctttcaaaaaagaaagtaaaaacgaccccgaattaggcaaatattgggcatctttaggtgatgtttttgtcaatgatgcttttggtacatgccatcgcacccacgcttctaatgtaggcattgcaacatatatcaaagaaaaatgctttggttttttggtcgaaaaagaaatatcttttctcaaaaaaattgtccaaactcctcaaagacctttggttgctgttttgggtggctccaaagtatctgacaaaattggagttattcgtagtcttttgcaaaaagttgatgttcttttgataggtggaggaatgagctatacttgtcttaaagccaaatgttttaacataggaactagcttgttagaagcagacaaaatccctttagtaaaagaattattagcttctccagaaggcaaaaaaatcgttttacctaaagattttgtttgtggcaaagaattttcgccaacaacacaagcagctgtttatagttatgataatatttctgatgatgtaatgggacttgatatcggacctcaaacaattgaacttttcaaaacgtatttacaaacggctcaaacagttgtttggaatggtcctgtaggagtgtttgaatttgaacaattttctaaaggaaccaaagctttagccgaaacaataagcaatctttcgcccaatacaactaccattattggtggtggcgatagcgctgctgcagtctttaaattcggtctagatcaaaatttcagccatatttctacgggtggaggcgcttttttagaatttttagaaggaaaaccaatgccagggcttgcatgtatggagaaactgtaa

SEQ ID NO: 10733 - protein, 398 aa, Onion yellows phytoplasma
MTKSLTNMNITNKKVLLRADLNVPLENSVITDDNRIKAILPTLKYLVQQKAKVIIFSHLGRVKTEADKAHFSLQVVAEKIAFYLQQKLKFVPETQGNTLNQAVGQMLPGDVLVVQNTRFEDVPFKKESKNDPELGKYWASLGDVFVNDAFGTCHRTHASNVGIATYIKEKCFGFLVEKEISFLKKIVQTPQRPLVAVLGGSKVSDKIGVIRSLLQKVDVLLIGGGMSYTCLKAKCFNIGTSLLEADKIPLVKELLASPEGKKIVLPKDFVCGKEFSPTTQAAVYSYDNISDDVMGLDIGPQTIELFKTYLQTAQTVVWNGPVGVFEFEQFSKGTKALAETISNLSPNTTTIIGGGDSAAAVFKFGLDQNFSHISTGGGAFLEFLEGKPMPGLACMEKL

SEQ ID NO: 10734 - DNA, 1383 bp, Opisthorchis sinensis
  CDS (4)..(1251)
gggatggggcttcgcaaattgagcatagccaatgttgacctcaaagataagcgggtgcttatgcgagttgattttaatgttccaatgaaagatggcaaggtgacaaacacccaaagaattgttggggcatcaccaaccatcaagtatgcacttgataagggggccaaaagtatcgtcctaatgtcccatcttggaggtcgggtcggtaacaaagtcgccagatattccctcaacccggtgggagaagaagtgtccaaactccttgggaaaccagtgaaattcttacctgattgtgtcggcccagaaacaacagaaggcatgtgccaatcctctgcaggatccgtgttcctgttagaaaatctacgtttccatgttgaggaggaagggaaaggcgtttcccccactggagaaaagatcaaagccactccagagcaagtcaaggccttcagtgaaaacttgaccaagttgggtgacgtttacctaaacgacgcatttggtacagctcacagagctcacgcttccatggttggctgcagacttacgcaaagggcatgtgggtttctcatggacaaggaattgacctacttctccaagctgttggatcagcctcagcatcctttcttggcgatcattggtggagctaaagtcagtgacaaaattcaactgatcaagaacatgttggacaaagtggacgaactgattataacaggaggcatggctttcactttcctcaagaaactccacaatatgaagattggaaagagtctttacgatgaacccggggctgcaattgtcgacgaatggatgcagttggccaaatccaagaacgttaagattcatctacctgttgatttcataaccggggacaagtttgcggaggatgccaatactggcactgccacagtcgagcctggcatccgggacacgcatatgggcttggatggtggtccgaaaaccatggaagagttctgcaaggtaattagtcgagcaaaaaccattgtttggaacggtccaatgggtgtgttcgaaatggagaagtttgctggcggtacgaaggcagcaatggatgcagtggtggctgctacaaccaagggagttacgaacaataatggtggtggtgacacagctacctgctgtccaaaatggaaaacagaggcacaggtcagtcacgtgagtactggagtaggggctagcttggagctgcttgaaggcaagcaactaccaggtattctcgccctgagtgacgcataatcgccacagctatcggggctaatgattggcatctagtcacaattgtaccgtagcgtttccctgttacttatgttattgtctttatttgcaccaaaacatgcttcttcgttcgttaaaaaaaaaaaaaaaaaa

SEQ ID NO: 10735 - protein, 415 aa, Opisthorchis sinensis
MGLRKLSIANVDLKDKRVLMRVDFNVPMKDGKVTNTQRIVGASPTIKYALDKGAKSIVLMSHLGGRVGNKVARYSLNPVGEEVSKLLGKPVKFLPDCVGPETTEGMCQSSAGSVFLLENLRFHVEEEGKGVSPTGEKIKATPEQVKAFSENLTKLGDVYLNDAFGTAHRAHASMVGCRLTQRACGFLMDKELTYFSKLLDQPQHPFLAIIGGAKVSDKIQLIKNMLDKVDELIITGGMAFTFLKKLHNMKIGKSLYDEPGAAIVDEWMQLAKSKNVKIHLPVDFITGDKFAEDANTGTATVEPGIRDTHMGLDGGPKTMEEFCKVISRAKTIVWNGPMGVFEMEKFAGGTKAAMDAVVAATTKGVTNNNGGGDTATCCPKWKTEAQVSHVSTGVGASLELLEGKQLPGILALSDA

SEQ ID NO: 10736 - DNA, 1260 bp, Oxytricha nova
  CDS (1)..(1260): transl_table=6
atgctttccaaaaagctagccatcgatcacatcccccacctcatcaaaggaaagagagtcctcatgagagttgatttcaatgttcccatcaaggagggcaagatcaaggatcttaccagaattcaaggagcactcccttcaatcaactactgcctagagaatggagctgagtctgttgttctcatgagtcacttaggcagacctgatggccagagagtagagaagcactccctcaagcctgtgctcccagccatcgaagacctactcaagaaaaaggtacagttcctcgatgattgcgttggctccgaggtggagagagagtgcaagtcagcttccaagggaaaggtcattcttcttgaaaacctgagattccatcttgcagaggagggcaaaggagtaatcaatggagagaaggttaaggcaaccaaagaagacattgctgctttcagaaagtcacttaccagccttggagagctctatgttaacgatggcttcggtactgctcacagagctcactcttcaatggtaggagttaacgttgataccagagctgctggcttcttgctcaagaaggaacttcagtatttctccaagattcttgagactcctgagagacccctcactgttgtgatgggaggagccaaggtcgctgataagatccaactcatcatgaagcttctcgagttagctgacgagttgatcattggtggaggtatggccttcactttcaacaaggtgctagacggctcaaacatcggtaaatctcttttcgattaggaaggtgccaagattgttccagacatcattaaaaaggctaaggagagaggagtaaagatccacttgccagttgatgcagttgctgctgataagtttgaagagtctgctgctacttagcttgttgacctcaagactggagctattcctgacggatggatgggacttgatatcggccccaagaccattgagcaaaacagcagagttatcttaagagctaagactgtgttctggaacggaccccaaggagtttttgaaatggctcctttctcaaagggatctctatcaatgctagacgacatcattaaggctacctagaccggagctacctcagttgctggtggcggtgatactgtctctctccttggaaaggttaagggcaccactgacaagttctctcacgtcagcactggaggtggtgcatctcttgagcttctttaaggcaaacaacttccaggtgttgttgctctttcagacagacaatga

SEQ ID NO: 10737 - protein, 419 aa, Oxytricha nova
MLSKKLAIDHIPHLIKGKRVLMRVDFNVPIKEGKIKDLTRIQGALPSINYCLENGAESVVLMSHLGRPDGQRVEKHSLKPVLPAIEDLLKKKVQFLDDCVGSEVERECKSASKGKVILLENLRFHLAEEGKGVINGEKVKATKEDIAAFRKSLTSLGELYVNDGFGTAHRAHSSMVGVNVDTRAAGFLLKKELQYFSKILETPERPLTVVMGGAKVADKIQLIMKLLELADELIIGGGMAFTFNKVLDGSNIGKSLFDQEGAKIVPDIIKKAKERGVKIHLPVDAVAADKFEESAATQLVDLKTGAIPDGWMGLDIGPKTIEQNSRVILRAKTVFWNGPQGVFEMAPFSKGSLSMLDDIIKATQTGATSVAGGGDTVSLLGKVKGTTDKFSHVSTGGGASLELLQGKQLPGVVALSDRQ

SEQ ID NO: 10738 - DNA, 1164 bp, Pasteurella multocida
  CDS (1)..(1164)
atgtcagtaatcaaaatgacagacttggatttgagcggcaaacgtgtgtttattcgtgctgatttaaatgtgccagtcaaagatggcaaagtgacttctgatgcacgtatccgtgcgaccatccctaccttgaaacttgcgcttgaaaaaggcgcaaaagtgatggtgacttcacacttaggtcgcccaacagaaggcgaatttgatgaagcaaactcactgaaacctgtagttgattacttaaatgcaaatttagatgtgcctgttcgtttagtacgcgattatttagacggtgtggacgttaaccaaggcgaaatcgtggtattagaaaacgtgcgcattaacaaaggtgagaagaaaaacgatcctgaattaggcaaaaaatatgccgcactttgcgatgtctttgtgatggatgcctttggtactgcacaccgtgcgcaagcctcgacttacggtgtggctgaatatgcgccagtggcttgtgcaggtccattattagcggctgaattagatgctttaggcaaagccttaaaagaacctgcgcgtccaatggtggcgattgtaggggggtcgaaagtctcaaccaaattagaagtgttaaattccttatctaaaattgcggaccaaattattgtgggcgggggtatcgccaataccttcattgctgcagcaggtcataacgtcggtaaatccttatatgaagaagatttaattcctgtggcgaaaaacttagcagcaagcacagatattcctgtacccgttgatgttcgcgttgggttagaattctctgaaactgcagcagcaacagaaaaagccgtcaatgaagtgaaagatgatgaatccatttttgatattggtgataaatcagcagaacaactcgcggaaatcatcaaaaatgcgaaaacgattctttggaatggtccagtgggcgtgtttgagttcccgaatttccgtaaagggactgaaatcatttctcacgcaatcgctaatagcgaaggtttctcaattgcaggtggtggtgacacattagcggcgattgacctattcggtatcaaagataaaatttcttatatttcaacaggtggtggtgcattcttagaattcgttgaaggtaaagtattaccagcagtagaaatcttagaaaaacgtgcaaatggttaa

SEQ ID NO: 10739 - protein, 387 aa, Pasteurella multocida
MSVIKMTDLDLSGKRVFIRADLNVPVKDGKVTSDARIRATIPTLKLALEKGAKVMVTSHLGRPTEGEFDEANSLKPVVDYLNANLDVPVRLVRDYLDGVDVNQGEIVVLENVRINKGEKKNDPELGKKYAALCDVFVMDAFGTAHRAQASTYGVAEYAPVACAGPLLAAELDALGKALKEPARPMVAIVGGSKVSTKLEVLNSLSKIADQIIVGGGIANTFIAAAGHNVGKSLYEEDLIPVAKNLAASTDIPVPVDVRVGLEFSETAAATEKAVNEVKDDESIFDIGDKSAEQLAEIIKNAKTILWNGPVGVFEFPNFRKGTEIISHAIANSEGFSIAGGGDTLAAIDLFGIKDKISYISTGGGAFLEFVEGKVLPAVEILEKRANG

SEQ ID NO: 10740 - DNA, 1164 bp, Photorhabdus luminescens
  CDS (1)..(1164)
atgtctgtaattaagatgaccgatttagatctggcgggtaagcgtattttgatccgcgctgacctgaacgttccggtaaaagatggcaaagtcacctctgatgcgcgtatccgtgcttccttaccgaccattgaggcagcattaaaacagggcgctaaagtgatgatcacttctcaccttggccgccctactgaaggcgaatacagtgaagaattctcgctgaaaccagtagtagactatctagaagagaaattatcttcccccgttcgactggaaaaagagtatctggaaggcgtggatgtcgcggaaggtgaactggttgtgctggagaatgttcgctttaataaaggtgagaagaaagacgacgaaaccttagccaaaaaatatgcttccctgtgtgatatttatgtcatggatgcattcggtactgctcatcgtgcacaagcttctactcacggtgtggctaagtttgctccagtggcctgtgccggtcctttgttgtccgcagagttagaggcattgggtaaagcgttagataatccagcccgtccaatggtggctatcgttgggggctctaaagtttcaaccaagctgaccgttctggatacgctgtctaaaattgctgaccaattgattgtcggtggtggtatcgcgaatacctttgttgctgcggaaggccataatgtcggtcgttctctctatgaagacgacttgctcccggaagcgaagaaattgctgataagctgtgatattccggtgccaaccgatgttcgtgtggcaacagaattctctgaaacagccgaagcaatcttgaaatctacccacgatattaaagatgatgagcagatcctcgatctgggggatgaatctgctcaacggctggcggatattctgaaaaacgccaaaacgattctatggaatggcccggttggtgtatttgaattccctaatttccgtcaaggaactgaaattgtcgcgcgcgccattgctgatagtgatgccttctctatcgccggtggcggcgatacgctggcagcgatcgacttgttcggtattgctgacaaaatttcttatatctctacgggtggtggtgctttccttgagttcgtggaagggaaaaaactgcctgcggttgtgatgttggaagaacgtgcaaaacagtaa

SEQ ID NO: 10741 - protein, 387 aa, Photorhabdus luminescens
MSVIKMTDLDLAGKRILIRADLNVPVKDGKVTSDARIRASLPTIEAALKQGAKVMITSHLGRPTEGEYSEEFSLKPVVDYLEEKLSSPVRLEKEYLEGVDVAEGELVVLENVRFNKGEKKDDETLAKKYASLCDIYVMDAFGTAHRAQASTHGVAKFAPVACAGPLLSAELEALGKALDNPARPMVAIVGGSKVSTKLTVLDTLSKIADQLIVGGGIANTFVAAEGHNVGRSLYEDDLLPEAKKLLISCDIPVPTDVRVATEFSETAEAILKSTHDIKDDEQILDLGDESAQRLADILKNAKTILWNGPVGVFEFPNFRQGTEIVARAIADSDAFSIAGGGDTLAAIDLFGIADKISYISTGGGAFLEFVEGKKLPAVVMLEERAKQ

SEQ ID NO: 10742 - DNA, 1164 bp, Photorhabdus luminescens
  CDS (1)..(1164)
atgtctgtaattaagatgaccgatttagatctggcgggtaagcgagttttaatccgcgctgacctgaacgttccggtaaaagatggcaaagtcacctctgatgcgcgtatccgtgcctccttgccaaccatcgaagcagcattgaaacagggcgccaaggtcatgatcacttctcaccttggccgcccgattgaaggcgaatacaacgaagaattctcgctgaaaccagtagtagactatctaaaagagaaattatcctcctccgttcgactggaaaaagagtatctggaaggcgtggaagtatcagaaggtgagctggtcgtgctggagaacgttcgctttaataaaggtgagaagaaagacgacgaaagcttggctaaaaaatacgcttccctgtgtgatatttatgtcatggatgcattcggtaccgctcatcgtgctcaggcttcgactcacggcgtggctaagtttgctcctgttgcttgtgccggtcctttattgttcggggaattagaggcattaggtaaagcgttggataatccggctcgcccaatggtggctattgtcggtggttctaaagtttcaaccaagctgaccgttctggatacgctgtctaaaattgccgaccaactgattgttggtggtggtattgcgaatacgtttgttgccgcggaaggtcacaatgttggccgttctctctatgaagatgatttgatcccggaagcgaaaaaattgctgataagctgtgatattccggtgccaaccgatgttcgtgtagcaacagaattctctgaaacggccgaagcaaccttgaaatcctccagtgatattaaagatgatgagcagatcctcgatttgggagatgaatccgctcaacggctggctgatatcctgaaaaacgctaaaacgatcctatggaatggcccggttggtgtatttgaattccctaatttccgtcaagggactgaaattgtcgcgcgcgccattgctgatagtgatgccttctctatcgccggcggcggcgatacgctggcagcgatcgacctgttcggtattgctgacaaaatttcttatatctctacgggtggtggcgctttcctcgagttcgtggaagggaaaaaactgcctgcggttgtgatgttggaagaacgtgcaaaacagtaa

SEQ ID NO: 10743 - protein, 387 aa, Photorhabdus luminescens
MSVIKMTDLDLAGKRVLIRADLNVPVKDGKVTSDARIRASLPTIEAALKQGAKVMITSHLGRPIEGEYNEEFSLKPVVDYLKEKLSSSVRLEKEYLEGVEVSEGELVVLENVRFNKGEKKDDESLAKKYASLCDIYVMDAFGTAHRAQASTHGVAKFAPVACAGPLLFGELEALGKALDNPARPMVAIVGGSKVSTKLTVLDTLSKIADQLIVGGGIANTFVAAEGHNVGRSLYEDDLIPEAKKLLISCDIPVPTDVRVATEFSETAEATLKSSSDIKDDEQILDLGDESAQRLADILKNAKTILWNGPVGVFEFPNFRQGTEIVARAIADSDAFSIAGGGDTLAAIDLFGIADKISYISTGGGAFLEFVEGKKLPAVVMLEERAKQ

SEQ ID NO: 10744 - DNA, 1179 bp, Photobacterium profundum
  CDS (1)..(1179)
atgagaggacgaacaatgtctgtaatcaagatgactgatctggaacttgctggtaagcgcgtatttattcgtgcagatctaaacgtaccagttaaagacggtaaagtaacttctgatgcacgtatccttgcatctctaccaactattaagcgttgcttagaagctggcgctaaagtaatggttacttctcaccttggtcgtccaacggaaggcgagtacaacgaagagttctctctggctccagtagttaactacttaaatgacgcactagattgtgacgttaaactagcgaaagattacctagatggaattgaattaaacgctggtgagctagttgttcttgaaaacgttcgctttaacaaaggcgaaaagaagaacgatgaagcactttctaagaagtatgcagcattatgtgacatcttcgtgatggacgcatttggtacggctcaccgtgcacaagcatcgactcacggtgttggcatgaacgcagctatcgcgtgtgctggtcctctactcgctaacgagcttgaagcacttggtaaagcaatggacaaccctgctcgtccacttgttgcaatcgttggtggttctaaagtatcaactaagctgactgttcttgagtcgctatctaaaattgctgaccaactagttgttggtggtggtatcgcgaacacattcatcgcagctgaaggccacaatgttggtaaatcactgtacgaagcagatttagttgaaacagctaagaaactaatgaaagactgtgcgattcctgttgcaactgacgttgcatgtgcaaaagcattcgatgagaacgcagaagcggtaatcaagcacgtgtctgaagttcaagacgacgacatgatcttcgacctaggtccagattcaactgccgttcttgctgaaatcattagcaatgcaaagacgattctttggaatggccctgttggcgtatttgaattcaaaaactttgaagcgggtactgctggtattgctaaagcaattgcagattctgaaggtttctctgttgcaggcggcggtgacacattagcagctatcgataaattcggtatcaaggctgacgtttcttacatttctactggcggcggcgcgttccttgagttcgttgaaggtaaagtattacctgcagttgctatgctagaagagcgtgcaaaagcataa

SEQ ID NO: 10745 - protein, 392 aa, Photobacterium profundum
MRGRTMSVIKMTDLELAGKRVFIRADLNVPVKDGKVTSDARILASLPTIKRCLEAGAKVMVTSHLGRPTEGEYNEEFSLAPVVNYLNDALDCDVKLAKDYLDGIELNAGELVVLENVRFNKGEKKNDEALSKKYAALCDIFVMDAFGTAHRAQASTHGVGMNAAIACAGPLLANELEALGKAMDNPARPLVAIVGGSKVSTKLTVLESLSKIADQLVVGGGIANTFIAAEGHNVGKSLYEADLVETAKKLMKDCAIPVATDVACAKAFDENAEAVIKHVSEVQDDDMIFDLGPDSTAVLAEIISNAKTILWNGPVGVFEFKNFEAGTAGIAKAIADSEGFSVAGGGDTLAAIDKFGIKADVSYISTGGGAFLEFVEGKVLPAVAMLEERAKA

SEQ ID NO: 10746 - DNA, 1257 bp, Porphyromonas gingivalis
  CDS (1)..(1257)
atgacgatagaacaattcaatttcgccggcaagaaagccttcgtgcgcgtcgatttcaacgttcccctcgatgacaactttaagatcaccgacgacacccgcatccgcgcagccctccccactctccgcaagatcatagccgacggcggtatgaccatcatcggctctcatctgggacgccccaaaggcgtagcaccggagttctccctccggcatatcctgccgcacgtatccgaactgctcggcgtggatgtcctctttgccgatgactgcatcggagccgatgccatggacaaagcggccaagctcaaagccggccaagtgctgctgctcgaaaatctccgcttctatgccgaggaggaaggtaagccgcgcggactctccgacgatgcttcggacgaagaaaaagccgcagcgaagaaagccgtcaaggctgctcagaaagagtttacgcaaaagctggcttccatggccgactgctacgtgaacgatgctttcggcacagcgcatcgggcacatgcttccacagcactgatcgctgactacttcgaccgagaccacaaaatgttcggctatctgatggagaaagaagtaaaagccgtagaaagagtgctgcacgacatcaagcggccgttcaccgccatcatgggaggctccaaggtatcgaccaagatagaaatcatcgagaacctactcaacaaagtggataacctgatcctgaccggcggaatgacctatactttcaccaaagcggcaggcggtcggataggcctctccatcgtggaagacgacaagctggatttggctcgcgacatcgtgaagaaagcagccgaaaagggcgtcaatctgatactctccgtggatacgaaagtagccgacaggttcgacaacgatgcagccacccaagtatgcagcaatatggagatacccgacgactggatgggtatggacataggcccccggtcgatcgagaaattccgcaaagtaatactcgaatccaaaacgatcctttggaacggtcccacgggagtattcgaatttgacaacttctccataggctcgaaagccgtcggcgaagccatcgtggaagctacggccaatggagccttctcgctggtcggaggaggagacagcgttgcctgcgtgaacaaattcggtcttgccgataaggtatcctacgtctccacgggtggcggagccttgctcgaagccatcgagggcaaaaccctccccggcattgcagccatccaaggataa

SEQ ID NO: 10747 - protein, 418 aa, Porphyromonas gingivalis
MTIEQFNFAGKKAFVRVDFNVPLDDNFKITDDTRIRAALPTLRKIIADGGMTIIGSHLGRPKGVAPEFSLRHILPHVSELLGVDVLFADDCIGADAMDKAAKLKAGQVLLLENLRFYAEEEGKPRGLSDDASDEEKAAAKKAVKAAQKEFTQKLASMADCYVNDAFGTAHRAHASTALIADYFDRDHKMFGYLMEKEVKAVERVLHDIKRPFTAIMGGSKVSTKIEIIENLLNKVDNLILTGGMTYTFTKAAGGRIGLSIVEDDKLDLARDIVKKAAEKGVNLILSVDTKVADRFDNDAATQVCSNMEIPDDWMGMDIGPRSIEKFRKVILESKTILWNGPTGVFEFDNFSIGSKAVGEAIVEATANGAFSLVGGGDSVACVNKFGLADKVSYVSTGGGALLEAIEGKTLPGIAAIQG

SEQ ID NO: 10748 - DNA, 1209 bp, Prochlorococcus marinus
  CDS (1)..(1209)
atggcaaagcgttctctctcaaatctcagcgtagaggacctatgcggcaagagagttttggtcagggttgactttaatgtcccattgaacgaagaaggttcaataactgatgacacaaggattcgtgcggctttaccaactattcagcacttaattgaaaaagaggccagagtcattctttccgctcattttggtaggcccaaaggaaaggtcaatgaagatatgcgtctcactccagtttctcaaaggttgagtgaattattaggtaaaaccgttgtcaaaacagaaagttgtattggacctgatgcagaaaaaaaggtacatgaaatgtctaatggtgatgtagttcttcttgagaatgttcgctttatcggagaagaagaaaaaaatgattcagaatttgcaaagaaattagcctctttagctgaagtttatgtcaatgatgcttttggtgccgctcacagagctcatgcttcaactgaaggcgttacgaattacctaagcccaagcgttgctggttatttaatggagaaagagcttaagtatttgcaaggtgctattgattcccctcaacgtcctttggcagcaattgttggaggatctaaggtcagcagtaaaataggtgtattagaatctttgattgataaatgtgacaaggtcctaataggtggaggaatgatcttcactttttataaagctcgtggattatctgtaggcaaaagtttagttgaggatgacaagcttgatcttgctagagctcttgagaaaaaggcaaaagaaaaaggagtgcaattattattacccagtgatgttgtacttgccgacaatttctctccagatgcttctagtcagatggttcagattgattccattcctgaaggatggatgggcttagatatcggaaaggaatcagtgaaattatttcaagatgctttggctgattgtaagactgttatttggaatggacctatgggtgtttttgaatttgataaatttgcaaatggtacaaactctatctcaactacattggcagaattaagtgcaaaaggttgctgcacaattattggaggaggggattctgttgctgcagtagaaaaggcaggacttgcctctaaaatgtctcatatttcaactggtggtggagcaagtttagaattattggaaggcaaggtccttccaggtgttgctgctttggatgacgaaatttga

SEQ ID NO: 10749 - protein, 402 aa, Prochlorococcus marinus
MAKRSLSNLSVEDLCGKRVLVRVDFNVPLNEEGSITDDTRIRAALPTIQHLIEKEARVILSAHFGRPKGKVNEDMRLTPVSQRLSELLGKTVVKTESCIGPDAEKKVHEMSNGDVVLLENVRFIGEEEKNDSEFAKKLASLAEVYVNDAFGAAHRAHASTEGVTNYLSPSVAGYLMEKELKYLQGAIDSPQRPLAAIVGGSKVSSKIGVLESLIDKCDKVLIGGGMIFTFYKARGLSVGKSLVEDDKLDLARALEKKAKEKGVQLLLPSDVVLADNFSPDASSQMVQIDSIPEGWMGLDIGKESVKLFQDALADCKTVIWNGPMGVFEFDKFANGTNSISTTLAELSAKGCCTIIGGGDSVAAVEKAGLASKMSHISTGGGASLELLEGKVLPGVAALDDEI

SEQ ID NO: 10750 - DNA, 1206 bp, Prochlorococcus marinus
  CDS (1)..(1206)
atggcgaagcgttcactgtccaatctcagcgcagcggacctacgcagtaagcgtgtgctggttcgggttgatttcaacgtgcctctcaacgagaacggcgccattaccgatgacacccgcatccgcgccgccctgcccaccatcaatgacctgatcgacaaaggtgctcgggtgatcctctcagcccactttggccgaccaaagggtcaaatcaacgaaggaatgcggctcacaccagtagcaaaacgcctcagcgaactgctgggtaaaaacgtgacaaaaaccgaaagctgcgttggtagcgacgccgaagcaaaggttaatgccatggccgatggagatgtcgtactgctcgagaatgtgcgctttttctcagaagaagaaaaaaacgacgccaacttcgcccaaaagctcgcagcacttgctgacgcttatgtcaatgacgccttcggtgctgcacaccgcgcccacgcctctacagaaggggtcaccaaattcctcaaccccagtgtggcaggccacctgatggagaaggaactgcaatacctgcaaggtgccatcgacgacccgaagcgaccccttgcagcgatcgtgggtgggtccaaggtcagcagcaagatcggcgtgttggaagccttgatcgacaagtgcgacaaggtgctgatcggcggcggcatgatcttcacgttctacaaagcgcgtggcctttcagtcggcaagagcctggtggaagaagacaagttagagctggccaaggagctagaggccaaggcgaaggccaagggggttcaactgcttctgcccactgacgttgtgctagccgatgacttcgcccccgccgccaatagccagaccgtatccatcgacgccattcccgatggttggatgggactggacattggccccgactcaatcaatctcttccaagacgcactggctgactgccaaaccgtgatctggaacggccccatgggcgtgttcgagttcgataagtttgccgccggcaccaacgccatcgccacaaccttggcggacctcagtggcaagggttgctgcacaattattggtggtggtgactccgtagctgctgttgagaaggccggcctcgccgagaagatgtcccacatctccaccggtggtggcgccagccttgagctgctggaaggcaaggtgttgccaggtgtcgccgctctcgacgacgcctaa

SEQ ID NO: 10751 - protein, 401 aa, Prochlorococcus marinus
MAKRSLSNLSAADLRSKRVLVRVDFNVPLNENGAITDDTRIRAALPTINDLIDKGARVILSAHFGRPKGQINEGMRLTPVAKRLSELLGKNVTKTESCVGSDAEAKVNAMADGDVVLLENVRFFSEEEKNDANFAQKLAALADAYVNDAFGAAHRAHASTEGVTKFLNPSVAGHLMEKELQYLQGAIDDPKRPLAAIVGGSKVSSKIGVLEALIDKCDKVLIGGGMIFTFYKARGLSVGKSLVEEDKLELAKELEAKAKAKGVQLLLPTDVVLADDFAPAANSQTVSIDAIPDGWMGLDIGPDSINLFQDALADCQTVIWNGPMGVFEFDKFAAGTNAIATTLADLSGKGCCTIIGGGDSVAAVEKAGLAEKMSHISTGGGASLELLEGKVLPGVAALDDA

SEQ ID NO: 10752 - DNA, 1209 bp, Prochlorococcus marinus subsp
  CDS (1)..(1209)
atgtcgaagttgtctctttccagtcttgataagtctaaattagaaggaaaaaaagttcttgtaagggttgattttaatgtcccattaaatgacagtggtcaaattactgatgatactagaataagagcagcaattcctacgataaaatatcttataaataattcggcaaaagttatattagctgctcattttggaagacctaaagggaaagttaatgagaaaatgagattaaccccagttgctgccagattaagcgatatcttggaacaaaaagttaatctgactgaaagctgcattggtgaagaggctctagctaaatctaatagtttaaacaatggggaggttttattactagaaaatgttcgtttttatgaagaagaagaaaaaaatgatttagatttcgctaaaaatttagcttctcatgcagatatgtatgttaacgatgcttttggagctgcgcatagagctcatgcttcaactcaaggagttacaaaatttttagaacctgctgttgcaggatttttgttagaaaaagagttgaaatatttacagggcgcaattgatgctccaaaacgtcctcttgcagcaatagtaggaggttctaaagtaagtagcaaaattggagttttggattctcttttagataagtgtgacaaaattattattgggggcggtatgatttttactttttacaaggcaagaggattagatgttgggaagagtcttgttgaggaagataaactcgaactagcaagaaatttagaggcaaaagcaaaaaataaaggggtagagcttctattaccatctgatgtattacttgcaaatgagttttctcctgatgcagaaagtaaagtctctcaaatagatgcaataagtggtgattggatgggcctagacattgggccacaatcaatcaaggttttccaaaatgctcttgccgaatgtaaaacaataatttggaatggtccaatgggtgtttttgaatttgataaatttgctgaaggtacaaatgcaatagcaacaaccctggcagatttaagttctttctctgaggtttgtacaattattggagggggagattctgtcgctgcagtagaaaaagctggcttagctgaaaaaatgtcacatatatctactggtggaggggctagtttagaacttttagaaggcaaaactttacctggagtagcagctttaaaagacgcttaa

SEQ ID NO: 10753 - protein, 402 aa, Prochlorococcus marinus subsp
MSKLSLSSLDKSKLEGKKVLVRVDFNVPLNDSGQITDDTRIRAAIPTIKYLINNSAKVILAAHFGRPKGKVNEKMRLTPVAARLSDILEQKVNLTESCIGEEALAKSNSLNNGEVLLLENVRFYEEEEKNDLDFAKNLASHADMYVNDAFGAAHRAHASTQGVTKFLEPAVAGFLLEKELKYLQGAIDAPKRPLAAIVGGSKVSSKIGVLDSLLDKCDKIIIGGGMIFTFYKARGLDVGKSLVEEDKLELARNLEAKAKNKGVELLLPSDVLLANEFSPDAESKVSQIDAISGDWMGLDIGPQSIKVFQNALAECKTIIWNGPMGVFEFDKFAEGTNAIATTLADLSSFSEVCTIIGGGDSVAAVEKAGLAEKMSHISTGGGASLELLEGKTLPGVAALKDA

SEQ ID NO: 10754 - DNA, 1164 bp, Pseudomonas putida
  CDS (1)..(1164)
atgaccgtgttgaagatgaccgacctcgacctgcaaggtaagcgcgtactgatccgcgaagacctcaacgtgcctgtgaaggacggtgtggtagccagcgatgcgcgtatcctggcagcgctgccgaccatcaagctggccctggagaagggcgcagcggtaatggtctgctcgcacttgggccgcccgaccgaaggcgaattctctgccgagaacagcctcaagccggtcgccgattacctgagcaaggccctgggccgcgacgtgccgctggttgccgactacctggacggtgtcgcggtacaggccggtgaactggtgctgttcgagaacgtgcgcttcaacaagggcgagaaaaagaacgccgacgagctggcgcagaaatacgcagccctgtgcgacgtattcgtcatggacgctttcggcaccgcacaccgcgccgaaggctcgacccatggcgtcgccaagttcgccaaggtggccgctgccggcccactgctggcagccgaactggatgccttgggcaaggccctgaaagccccggccaagccaatggcggccatcgttgccggctccaaggtttccaccaagctggacgtgctgaacagcctcagcagtgtttgcgaccagctgatcgtcggtggcggtattgccaacactttcctggccgctgccggccacccggtgggcaagtcgctgtacgagcctgacctggtggacaccgccaaggccattgccgccaaggtcagcgtgccgctgccagtcgacgtggtggttgccaaggagtttgccgagagcgccgaagccaccgtcaaggccattgccgacgtagctgccgacgacatgatcctggacatcggcccgcaaaccgcggccaatttcgccgagctgctgaaatcgtcgaaaaccattctttggaatggcccggttggcgtgttcgaattcgatcagttcggcaacggcaccaaggtactggccaaggccatcgccgacagcgccgcgttctccatcgccggtggcggtgacaccctggcagccatcgacaaatatggcgtcagcaaggaaatctcctacatttctaccggtggtggcgccttcctcgagttcgtcgagggcaaggtcctgccagctgtggcaattctggaagagcgggccaaggcctga

SEQ ID NO: 10755 - protein, 387 aa, Pseudomonas putida
MTVLKMTDLDLQGKRVLIREDLNVPVKDGVVASDARILAALPTIKLALEKGAAVMVCSHLGRPTEGEFSAENSLKPVADYLSKALGRDVPLVADYLDGVAVQAGELVLFENVRFNKGEKKNADELAQKYAALCDVFVMDAFGTAHRAEGSTHGVAKFAKVAAAGPLLAAELDALGKALKAPAKPMAAIVAGSKVSTKLDVLNSLSSVCDQLIVGGGIANTFLAAAGHPVGKSLYEPDLVDTAKAIAAKVSVPLPVDVVVAKEFAESAEATVKAIADVAADDMILDIGPQTAANFAELLKSSKTILWNGPVGVFEFDQFGNGTKVLAKAIADSAAFSIAGGGDTLAAIDKYGVSKEISYISTGGGAFLEFVEGKVLPAVAILEERAKA

SEQ ID NO: 10756 - DNA, 1164 bp, Pseudomonas syringae
  CDS (1)..(1164)
atgaccgtcttgaagatgaccgacctcgatctgcaaggtaaacgtgtactgatccgcgaagacctcaacgtcccgataaaggacggcgttgtcagcagcgatgcacgtattcttgcttcgctgccgaccatcaggctggcgctggaaaaaggcgcggctgtcatggtctgctcgcaccttggccgtccgaccgagggcgagttttctgctgaaaacagcctcaagccggttgctgaatacctgagcaaggcattgggtcgtgacgttccgctggtcgccgattacctggacggcgttgacgtcaaggcgggcgatatcgtgctgttcgagaacgttcgcttcaacaagggcgagaaaaagaacgccgacgagctggcgcagaagtacgcggccctgtgcgacgtgttcgtgatggacgcttttggcaccgctcaccgcgctgaaggctcgacccacggcgtggccaaatacgccaaggttgccgctgctggcccgttgctggctgccgaactggaagcgctgggcaaggcgctgggcgctccggctcagccaatggctgctattgttgccggctccaaagtgtccaccaagctggacgtgctcaacagcctgagcgcgatctgcgatcagttgattgttggcggcgggattgccaacacctttctggctgcagccggtcacaaggtcggtaaatcgctttacgagccagacctgctcgacaccgcgcgcgccattgccgccaaggtcagcgtgccgttgccgactgacgtggtggttgccaaggaattcgccgagagtgccactgcaaccgtcaagctgatcgccgatgtggccgacgacgacatgattctggatattggtccacagactgctgcgcacttcgccgaactgttgaaatcttccgggactatcctgtggaacggtccggttggcgtgttcgaattcgaccagttcggtgaaggcaccaaaacgctggccaaggccattgctgaaagcaaagcgttctccatcgcgggtggtggcgacaccctggccgcgatcgacaagtacggtgtggcagatcagatttcctatatttcgaccggtggcggtgcgttcctcgaattcgtggaaggcaaggttctgccagcggttgaaatgctcgaacaacgtgccagggcctga

SEQ ID NO: 10757 - protein, 387 aa, Pseudomonas syringae
MTVLKMTDLDLQGKRVLIREDLNVPIKDGVVSSDARILASLPTIRLALEKGAAVMVCSHLGRPTEGEFSAENSLKPVAEYLSKALGRDVPLVADYLDGVDVKAGDIVLFENVRFNKGEKKNADELAQKYAALCDVFVMDAFGTAHRAEGSTHGVAKYAKVAAAGPLLAAELEALGKALGAPAQPMAAIVAGSKVSTKLDVLNSLSAICDQLIVGGGIANTFLAAAGHKVGKSLYEPDLLDTARAIAAKVSVPLPTDVVVAKEFAESATATVKLIADVADDDMILDIGPQTAAHFAELLKSSGTILWNGPVGVFEFDQFGEGTKTLAKAIAESKAFSIAGGGDTLAAIDKYGVADQISYISTGGGAFLEFVEGKVLPAVEMLEQRARA

SEQ ID NO: 10758 - DNA, 1227 bp, Pyrobaculum aerophilum
  CDS (1)..(1227)
atgttacttaatgaaattattgacttaataccaaatataaataagtgcctaaaaaagggaaaaacgttaattataagaattgatataaattcgcccattgtaaatggtaaaataattgatgattttagaataagggctcactcgtacaccttgcgcctggcttctgacgcgggggccagggctgtggtgttggcccatcaagggagacctggacaagacgattttacctcacttgagatccataagccgtatatagaaaaatacctagagaggcctataaaatttgtagacgatataataggcccggaggcgaggcgccagataaaagagttgaaagacggcgaaatactgttgctggaaaacgtgaggattctctccgaggaggtaatagaaaaggtgccggaggctcaggcagaaactcttctagtccgcaaactagcccctctagccgactactacgtattcgacggtttcgcggtggctcacagatcgcagccaagcgtagtgggctttccaattgttttgccctcttgcgccggccccgtctttgagagggagctaagggcgttgggagcggtgtttgaaaaacgcggcagaggcgtgacgttaatagcgggaggcgccaaaatgccggacactcttaaggcagtagagcagttgttaaaaaacggctttgtggaaaaagtggccgttggaggcctcgtgggctttgtgtttgccttgggcaaatatggcgtgttaaacagcgcgttaaaacaagaggtagagaagggcggcttcctcccatatatagagagagcccgccaattattggctaaatacggcgcgcagatatacacgcctgtggacttcgcagttaatcaaaacgggaggctagacgttgatatatattcactggcgcaacctccgctagatattgggagatctacgacaattgcgtttaaagaagtgattgaacagagcgagattgtaattttcagcgggcccatgggctatatcgaggacgagagattcgcgacaggaacaatagaactgttaaaagcggcgtcaaacagacggttaatactaggcggggggcacacgattatggccgcggagaaggccggcgtgcttgataaagcataccacgtgtcgactggcgggcgcgcttttattcagacaataggcggcgaggaaatgccggcagtgaaagcgttattaacctctgctaaaaaatttagcctatga

SEQ ID NO: 10759 - protein, 408 aa, Pyrobaculum aerophilum
MLLNEIIDLIPNINKCLKKGKTLIIRIDINSPIVNGKIIDDFRIRAHSYTLRLASDAGARAVVLAHQGRPGQDDFTSLEIHKPYIEKYLERPIKFVDDIIGPEARRQIKELKDGEILLLENVRILSEEVIEKVPEAQAETLLVRKLAPLADYYVFDGFAVAHRSQPSVVGFPIVLPSCAGPVFERELRALGAVFEKRGRGVTLIAGGAKMPDTLKAVEQLLKNGFVEKVAVGGLVGFVFALGKYGVLNSALKQEVEKGGFLPYIERARQLLAKYGAQIYTPVDFAVNQNGRLDVDIYSLAQPPLDIGRSTTIAFKEVIEQSEIVIFSGPMGYIEDERFATGTIELLKAASNRRLILGGGHTIMAAEKAGVLDKAYHVSTGGRAFIQTIGGEEMPAVKALLTSAKKFSL

SEQ ID NO: 10760 - DNA, 1260 bp, Ralstonia solanacearum
  CDS (1)..(1260)
atggcatcgggtaaaatcgccgctttccgtgatttctccgctgctgccatgcccaacgtcctgcgtctgaccgatctcatctccgaaggcaagcttgccggcaagcgtgtcttcatccgcgccgatctcaacgtgccgcaagacgatgccggcaacatcaccgaagacacgcgcatccgcgcttcggtgccggccatccgcgccgcgctcgacgccggtgccgccgtgatggtcacctcgcatctgggccgtccgaccgaaggcgagttcaagccggaagattcgctggccccggtggccgtgcgcctgtccgagttgctcggctgtgaggtgaagctggtgcagaactgggtcgacggcgtggatgtcgcgcccggccaggtggtgctgctggaaaactgccgcgtcaacaagggcgagaagaagaacagcgacgaactggcccagaagatggccaagctgtgcgacgtctacgtcaacgacgccttcggcaccgcccaccgcgccgaggccaccacgcacggcatcgccaagtttgcccccatcgcctgcgccggcccgctgctgggcgccgagctggacgcgctgggcaaggcgctgggccaaccggcccgtccgctggtcgccatcgtggccggctccaaggtgtcgaccaagctgaccatcctgaaatcgctggccgacaaggtggacaacctgatcgtcggcggcggcatcgccaacacgttcatgctggccgcgggcctgaagatcggcaagtcgctggccgaggcggatctggtgggcgatgccaaggcgatcatcgacctgatggctgcccgtggcgcctcggtgcccattcctgtcgatgtggtctgcgccaaggaattcagcgccaccgctgccgccaccgtcaaggacgtgaaggacgtggcggatgacgacatgattctcgacatcggcccgaagaccgccgcgcaactggccgaccagctcaaggcctccggcaccatcgtgtggaacggcccggtcggcgtgttcgagttcgaccagttcggcaacggcaccaaggtgctggccgaggcgatcgcggcctcgtcgggcttctcgatcgccggtggcggcgatacgctggcggcgatcgccaagtacggcatcgccgaccgcgtgggctacatctccaccggcggcggcgcattcctggaattcctggaaggcaagacgctgccggccgtggagatcctggagcagcgtgcccagcgccaggaagcgctggcctga

SEQ ID NO: 10761 - protein, 419 aa, Ralstonia solanacearum
MASGKIAAFRDFSAAAMPNVLRLTDLISEGKLAGKRVFIRADLNVPQDDAGNITEDTRIRASVPAIRAALDAGAAVMVTSHLGRPTEGEFKPEDSLAPVAVRLSELLGCEVKLVQNWVDGVDVAPGQVVLLENCRVNKGEKKNSDELAQKMAKLCDVYVNDAFGTAHRAEATTHGIAKFAPIACAGPLLGAELDALGKALGQPARPLVAIVAGSKVSTKLTILKSLADKVDNLIVGGGIANTFMLAAGLKIGKSLAEADLVGDAKAIIDLMAARGASVPIPVDVVCAKEFSATAAATVKDVKDVADDDMILDIGPKTAAQLADQLKASGTIVWNGPVGVFEFDQFGNGTKVLAEAIAASSGFSIAGGGDTLAAIAKYGIADRVGYISTGGGAFLEFLEGKTLPAVEILEQRAQRQEALA

SEQ ID NO: 10762 - DNA, 1197 bp, Rhizobium loti
  CDS (1)..(1197)
atggccgccttcaagacactggacgatatcggcaacatcagcggcaagcgcgtgctggtgcgcgtcgacctcaacgttcccgtcgccgacggcaaggtcaccgacgccacccgcatcgaacgcatcgcgccgaccatcgccgaactgtcgggcaagggcgccaaggtcatcctgctcgcccatttcggccggcccaaggatgggccatccccggaattctcgctggagccgatcgccagggcgacggccgaggtgctcggccgtcccgtcggctttgcctcggattgcgtcggcgacatggcgggaagtgctgtcgcggccatgaacaagggtgacgtgctgctcttcgaaaatacccgtttctacaaggccgaggagaagaacgacccggccttcagcgagcggctcgccgccaatggcgacattttcgtcaacgacgccttttccgcggcgcaccgcgcccactcttccacagaggggctggcgcgtctgttgccttcctttgctggccgcaccatgcaggccgagctcgaagcgctggagaagggcctgggcaacccggtccgcccggtcgtggcgatcgtcggcggcgccaaggtctcgaccaagatcgacctgctgatgaacctggtgaagaaggtcgacgcgctggtcatcggcggcggcatggccaacaccttccttgccgcgcgcggcaccgatgtcggcaagtcgctgtgcgagcatgatcttgcccccaccgccaagcagatcatgatcgaggccgccgaggccggctgcgccatcatcctgccggtcgacggtgtcgtcgccaaggaattcaaggcgggcgccgcctgcgagaccgtcgccatctccgacgtgccggccgatggcatgatcctggatgtcggcgaaaagaccgtgaagacgatcggcgaatggatcgaccgcgccgcgacactggtctggaacggcccgcttggcgccttcgagatcgagccgttcgatcacgccacggtggcggcggcaaaacacgcggccgcgcgcaccaaggccggcaagctggtctccgttgcgggtggcggcgacacggtggcggcgctcaaccacgccggcgtcgccgacgacttcacctatgtctctaccgccggcggcgccttcctggaatggatggaaggcaagcctctgccaggcgtcgacgtgctgaagcgctga

SEQ ID NO: 10763 - protein, 398 aa, Rhizobium loti
MAAFKTLDDIGNISGKRVLVRVDLNVPVADGKVTDATRIERIAPTIAELSGKGAKVILLAHFGRPKDGPSPEFSLEPIARATAEVLGRPVGFASDCVGDMAGSAVAAMNKGDVLLFENTRFYKAEEKNDPAFSERLAANGDIFVNDAFSAAHRAHSSTEGLARLLPSFAGRTMQAELEALEKGLGNPVRPVVAIVGGAKVSTKIDLLMNLVKKVDALVIGGGMANTFLAARGTDVGKSLCEHDLAPTAKQIMIEAAEAGCAIILPVDGVVAKEFKAGAACETVAISDVPADGMILDVGEKTVKTIGEWIDRAATLVWNGPLGAFEIEPFDHATVAAAKHAAARTKAGKLVSVAGGGDTVAALNHAGVADDFTYVSTAGGAFLEWMEGKPLPGVDVLKR

SEQ ID NO: 10764 - DNA, 1200 bp, Rhizobium meliloti
  CDS (1)..(1200)
atgactttcaagactctcgacgatctgaccgacatcgccggcaagcgcgttctcgtgcgcgtcgatctgaacgtgcctgtcaaggacggccaggtgaccgacaccacccgcatcgagcgcgtggcgccgaccattcgcgaactctccgagaagggcgcgaaagtcgttctgctcgcgcatttcggccggccgaagggcgagcccgtcgccgacatgtcgctgaaggcgatcgcctccgccgtcgaggagatcctcgaccagcgcgtctatttcgctgccgactgcatcggcgacaaggccgccaacgccattgccgaattgaacgacggcgaagtgctgctgctcgagaatacccgcttccacaagggcgaggagaagaacgattcggacttcgtgacggcgctcgccgccaatggcgacatctatgtcaacgacgccttctccgccgcccatcgcgcccacgcctcgaccgaggggcttgcccatcaccttcccgcctatgccggccgcaccatgcaggcggagctcgaagcgcttgaaaaggggctcggcaatccgaagcgcccggtcgtcgcgatcgtcggcggcgccaaggtctcgaccaagatcgaccttctgcagaacctcgtgaagaaggtcgacgcgctggtcatcggcggcggcatggccaacaccttcctcgcggcgcaaggcgtcgatgtcggaaagtcgctctgcgagcacgatcttgcggagaccgccaaggccatcctcgcggccgcctcggaagcgggatgcgcaatcgtgcttccggtcgacggcgtcgttgcccgtgagttcaaggccggtgccgacaacgaggtcgtcgatatcaaggccatccctgccgacgccatggtgcttgacgtcgggccgaaatcgatcgaggccatcaacgaatggatctcgcgcgccgaaaccctcgtgtggaatggcccgctcggcgcgttcgagatcgcgcccttcgacagggcgaccgtggcggcggcgaaacacgcggcagcccgcacccgcgccggctcgctcgtctccgtcgccggcggcggcgacacggtcgcagcactcaaccatgccgaggtcgcggacgatttcacctatgtctcgaccgccggcggcgccttcctcgaatggatggaaggcaagcccttgccgggcgtagatgttctccggcagcggaactga

SEQ ID NO: 10765 - protein, 399 aa, Rhizobium meliloti
MTFKTLDDLTDIAGKRVLVRVDLNVPVKDGQVTDTTRIERVAPTIRELSEKGAKVVLLAHFGRPKGEPVADMSLKAIASAVEEILDQRVYFAADCIGDKAANAIAELNDGEVLLLENTRFHKGEEKNDSDFVTALAANGDIYVNDAFSAAHRAHASTEGLAHHLPAYAGRTMQAELEALEKGLGNPKRPVVAIVGGAKVSTKIDLLQNLVKKVDALVIGGGMANTFLAAQGVDVGKSLCEHDLAETAKAILAAASEAGCAIVLPVDGVVAREFKAGADNEVVDIKAIPADAMVLDVGPKSIEAINEWISRAETLVWNGPLGAFEIAPFDRATVAAAKHAAARTRAGSLVSVAGGGDTVAALNHAEVADDFTYVSTAGGAFLEWMEGKPLPGVDVLRQRN

SEQ ID NO: 10766 - DNA, 1194 bp, Rhodopirellula baltica
  CDS (1)..(1194)
atggccaagaaaaccattgatcaaatcgacgttcaagacaaaaccgttctcatgcgagtcgacttcaacgtgccgttggacgaatcgctcgccatcaccgatgaccgccgtattcgcatggcgttgcccagcatcaagagcgtcatcgaccgcggtggcaaagtgatcctgatgagccacctgggacgaccgactggtggtgaaggcgacgagaagtattccttggctccggccgcgaaacgtttgggtgaattgctcggcagcaccgttcacttcgcgaccgacactgtcggagacgacgcatcgagcaaagcaagctcgttggccgctggcgaagttttggtgctggaaaacttgcgtttcaatccaggcgagaagaaaggcgactcagagttcgctggcaagttggccgcgatggccgacgcctactgcaacgacgcattcggcacctgtcaccgcaaagacgcatcgatggtcgccgtccccgaagcgatggctggcaagcctcgcgtggttgggcatttggtcgccaaagaaatccagtacctcaccgatgcgatcagcaaacccgagcgacctttcgttgcgatcctgggtggagccaaggtcagcgacaagatcaacgtgatcaacaacttgctcggcatctgtgatgcggtcttgatcggtggtgcgatggcttacacgttttcgttagccagtggcggtaaagtcggcaagtcattggtcgagaaagacaaggtcgagttggcaaaggagttgatggcaaagggtggcgacaagctacagcttcccgtcgacacgcactgcggtgacgacttcggaaacatcgctggttgcaacaaaaaggttgttgctgcaggtgaaattcctgacgacatggaaggtttggacatcggtcctgaaacggcgaagaagtacgcagaggtcatcaagtcggccaagaccatcgtctggaacggaccgatgggcgtgtttgaaaaaccaccaatggatgaaggcaccaaagccgtcgctcaagcaatcgccgatggcgatgccgtcagcatcatcggtggtggtgacagcgctgctgctgttgatcaactcgggttcgccgacgatgtcagccacgtcagcaccggtggcggagccagcttggcaatgttggaaggccaagccttcgcagccgtcgatttgctcgacgaagcttga

SEQ ID NO: 10767 - protein, 397 aa, Rhodopirellula baltica
MAKKTIDQIDVQDKTVLMRVDFNVPLDESLAITDDRRIRMALPSIKSVIDRGGKVILMSHLGRPTGGEGDEKYSLAPAAKRLGELLGSTVHFATDTVGDDASSKASSLAAGEVLVLENLRFNPGEKKGDSEFAGKLAAMADAYCNDAFGTCHRKDASMVAVPEAMAGKPRVVGHLVAKEIQYLTDAISKPERPFVAILGGAKVSDKINVINNLLGICDAVLIGGAMAYTFSLASGGKVGKSLVEKDKVELAKELMAKGGDKLQLPVDTHCGDDFGNIAGCNKKVVAAGEIPDDMEGLDIGPETAKKYAEVIKSAKTIVWNGPMGVFEKPPMDEGTKAVAQAIADGDAVSIIGGGDSAAAVDQLGFADDVSHVSTGGGASLAMLEGQAFAAVDLLDEA

SEQ ID NO: 10768 - DNA, 1197 bp, Rhodopseudomonas palustris
  CDS (1)..(1197)
atgacaaagacattccgcaccctcgacgacgtcgatgtgaagggcaagcgcgtgctgctgcgcgtcgatctcaacgtgccgatggacgccggcaaggtgaccgacaccacccggctcgaacgcgtgatgccgaccatcaccgagctgtcgggcaagggcgccaaggtgatcctgctggcgcatttcggccggccgaagggccgcgacgacaagaactcgctcaagccggtcgctgctgcgctggccgacgtcatcaagaagccggtcggcttcgccgacgactgcatcggcgagcccgccgccaaggcgatcgccgcgatggccgacggcgacatcctgtgcctggaaaacacccgcttccatcccgaggaagagaagaacgatccggcgttcgtcgccaagctcgccgagctcggcgacatctgggtcaacgacgcgttctcggccgcgcaccgcgcccacgccaccaccgaaggcctcggccacaagctgccggcttacgcgggccgcaccatgcaggccgagctcgtcgcgctgaacaaggcgctggaagcgccggtgaagccggtgatcgcgatcgtcggcggcgccaaggtgtcgaccaagatcgacctgctcgaaaacctggtcaccaaggtgcaggcgctggtgatcggcggcggcatggccaacaccttcctgcacgcccagggcgtcaaggtcggaaagtctctgtgcgagaaggacctggctccgactgcgctgcgcatcctcgataaggccgaagctgccaactgcgccatcatcctgccggtcgacgccaccgtggcctatcacttcgaggccaacgcgccgtcgttcgcctacgggctcgacgccatcccggacgatgccatgatcctcgacgtcggcccgcgctcgatcgagcgcattcacgccgcgatcgacgatgccgcgaccctggtgtggaacggcccggtcggcgcgttcgagctgacgccgttcgacaagggcacggtcgaagccgccaagcacgccgccaagcgcaccaaggccggcaagctggtgtcggtcgccggcggcggcgacaccgtcgcggcgctcaaccatgccggcgtggccgacgacttcacctacatctcgaccgccggcggcgccttcctggaatggatggaaggcaagccgctgccgggcgtcgaagtgctccaggtcaagtga

SEQ ID NO: 10769 - protein, 398 aa, Rhodopseudomonas palustris
MTKTFRTLDDVDVKGKRVLLRVDLNVPMDAGKVTDTTRLERVMPTITELSGKGAKVILLAHFGRPKGRDDKNSLKPVAAALADVIKKPVGFADDCIGEPAAKAIAAMADGDILCLENTRFHPEEEKNDPAFVAKLAELGDIWVNDAFSAAHRAHATTEGLGHKLPAYAGRTMQAELVALNKALEAPVKPVIAIVGGAKVSTKIDLLENLVTKVQALVIGGGMANTFLHAQGVKVGKSLCEKDLAPTALRILDKAEAANCAIILPVDATVAYHFEANAPSFAYGLDAIPDDAMILDVGPRSIERIHAAIDDAATLVWNGPVGAFELTPFDKGTVEAAKHAAKRTKAGKLVSVAGGGDTVAALNHAGVADDFTYISTAGGAFLEWMEGKPLPGVEVLQVK

SEQ ID NO: 10770 - DNA, 1462 bp, Schistosoma mansoni
  CDS (4)..(1254)
gtgatgggtttgtcgaagcttagtatttcagatgttgaccttaaaggaaaacgtgttcttattcgagttgattttaacgtccctatgaaagatgggaaagtcactaacactcaaagaatagcagctgccataccaactattaaatatgctttggataagggggccaaaagtgtcgtcttaatgtcccatttaggtcggccagatgggcacaaagttgataagtattctctaaagcctgtgtgccctgaagtgtcaaagttgttaggcaaagaagttacgttcctcaatgattgtgttgggcctgacgtagttaacgcatgtgccaatcctgctcccggaagcgtttttttgctagagaatctacgctttcacgttgaagaggaaggaaaaggtgtctcaccaaccggcgaaaaaacaaaagccactgctgaccaaatcaaggctttcagtgagagtctaacaaaacttggtgatgtctacgtcaacgatgcctttgggacggcacatagagctcatgcttctatggtcggctgccaactaccacaaaaagcctgtggatttctcatgaataaagaattgacatacttcgccaaagctctggaaaatccagaacgccctttcttagctattttaggaggtgccaaggttagcgacaagatccagttgatcaataatatgcttgacaaagttaatgaattaatcatcggtggtgggatggcgtatacatttcttaagcaaatacacaatatgcatataggaaatagtttatttgatgcaccgggtgcagaaattgttcataaagtaatggaaactgcaaaggctaaaaatgttgcaattcacttaccggttgatttcgtaactgccgataaatttgctgatgatgcgaacaccgaaataagaactatacaatccggaattgccgatggttggatgggattagatattggtccaaaaacaattgaagaattcagtaaagtgattagtcgtgccaaaactattgtttggaacggtccgatgggtgtttttgaaatggacaaatttgcaacaggaacaaaagcagcaatggatgaagtagtcaaagctactaaaaatggtgctacaactattattggtggtggtgacaccgcaacatgctgcgccaaatgggacacagaagacaaagttagtcatgtcagtactggtggtggtgctagtcttgaacttctcgaaggtaaacaattacccggagttgttgcacttacggatgctcattaatacgttcggttataatatcccttaacttcataattaattataattagtgttcttaactttgaattgtcacaattgttcccagttttatggttactttttactgttatatatctgttcttgatttgacggatatattttctctttaatttctgtacgtgtagatgtatttctgccatatgcgcatttgctgccaatagaaatttcctgt

SEQ ID NO: 10771 - protein, 416 aa, Schistosoma mansoni
MGLSKLSISDVDLKGKRVLIRVDFNVPMKDGKVTNTQRIAAAIPTIKYALDKGAKSVVLMSHLGRPDGHKVDKYSLKPVCPEVSKLLGKEVTFLNDCVGPDVVNACANPAPGSVFLLENLRFHVEEEGKGVSPTGEKTKATADQIKAFSESLTKLGDVYVNDAFGTAHRAHASMVGCQLPQKACGFLMNKELTYFAKALENPERPFLAILGGAKVSDKIQLINNMLDKVNELIIGGGMAYTFLKQIHNMHIGNSLFDAPGAEIVHKVMETAKAKNVAIHLPVDFVTADKFADDANTEIRTIQSGIADGWMGLDIGPKTIEEFSKVISRAKTIVWNGPMGVFEMDKFATGTKAAMDEVVKATKNGATTIIGGGDTATCCAKWDTEDKVSHVSTGGGASLELLEGKQLPGVVALTDAH

SEQ ID NO: 10772 - DNA, 1176 bp, Shewanella oneidensis
  CDS (1)..(1176)
atggcaattatcaatatgtcagatttagatctccaaggtaagcgagtgcttattcgtgaagatctcaatgtgcctgtcagcaatggcgtcgtcaccagtgatgcgcgccttagagcctctctccccactatcgagttagcccttgccaaaggcgcggcggtaatggtgatgtctcacttgggtcgtccaaccgaaggtgagtacaacagcgaattttccatgcaacctgtggtcgattacttggccaaagccctgtcttgtcctgtgcgcttagcgaccgactacttagacggcgttgaagtggctgtaggtgaagtggtggtgtttgaaaacgttcgcttcaataaaggcgagaagaaaaacgacgaagcgttatctaagaagatggcagcgttatgtgatgtgtatgtgatggatgctttcggcacggctcaccgcgcagaagcctcaacgaatggcgttggtttatacgcgccaattgcttgtgctggtccattactggcgcaagagttagatgctttaggtaaggcgttagataatccagcgcgtccattagtggcaatcgttggtggctctaaagtgtcgactaagctcaccgtattagaaagcttatcaggcattgtggatcaattagtggttggtggtggtatcgctaacacctttatcgctgcggcgggccacaacgtgggtaaatccttatacgaagcggatttaattgatgaagctaagcgcttagtggcgaacgcgcaaagccgcggtggcgatattcccgtacctaccgatgtggttgtggcgggtgagtttagcccaacggcagctgctaccttaaaagcagtgagtgatgttggcgatagcgatatgattttcgacatcggccccgacagtgccgaagcgttagcgaaaatcattgagtctgctggcactatcgtatggaacggcccagttggtgtgttcgagtttgaccaattcggtgaaggcactaagcgcatcgctcacgcgattgcggattccaaagccttctctatcgctggcggtggtgacaccttggcggcggtcgataaatacggtatcgccgataaagtttcttatatctctacgggcggtggcgctttcctcgagttcctcgaaggtaaagagttacctgctgtagctatgctaaaaaaacgtggtgcttaa

SEQ ID NO: 10773 - protein, 391 aa, Shewanella oneidensis
MAIINMSDLDLQGKRVLIREDLNVPVSNGVVTSDARLRASLPTIELALAKGAAVMVMSHLGRPTEGEYNSEFSMQPVVDYLAKALSCPVRLATDYLDGVEVAVGEVVVFENVRFNKGEKKNDEALSKKMAALCDVYVMDAFGTAHRAEASTNGVGLYAPIACAGPLLAQELDALGKALDNPARPLVAIVGGSKVSTKLTVLESLSGIVDQLVVGGGIANTFIAAAGHNVGKSLYEADLIDEAKRLVANAQSRGGDIPVPTDVVVAGEFSPTAAATLKAVSDVGDSDMIFDIGPDSAEALAKIIESAGTIVWNGPVGVFEFDQFGEGTKRIAHAIADSKAFSIAGGGDTLAAVDKYGIADKVSYISTGGGAFLEFLEGKELPAVAMLKKRGA

SEQ ID NO: 10774 - DNA, 1239 bp, Spiroplasma citri
  CDS (1)..(1239): transl_table=4
atgacaaacaaaaaagaattaaaagatgttcaagttaaaggaaaaaaagttttagtccgtgttgattttaatgtgccaatgaaggatggtcaagttactgatgataatcgtattattgcagctttaccaacaattaaatatttgatagcacaagaagcaaaagtaattttattttctcatttagggaaagttaaaacagctgatgatttagaaaaacgtgatatggctccagtagcaaaggtattagaacaaaaattaggacaaccagttaaatttattaatgcctttgaaggaaaacaattggaagaagctattaacgaaatgcacaataaagaggtcattttatttcaaaatacacgctttgctgacattattaatagtaatggtcaaattagtgttgatagtgagggcaaagcagcggcaaaacgagaaagtaaaaatgattctgctttagggaaatattgagcaagtttaggagatgtttttgttaatgatgcatttggaactgcacatcgtgctcatgcttcaaatgttggtattgcagaaaatattactgaatcatgtttaggctttttagtggaaaaagaagtaaaaatgttatcacaatgcgtagacaatccagttaaaccatttgttgctattattggtggtgcaaaagtttcagataaaattggggtaattgaacatttattaacaaaagcagataagattctaattggtggtggaatggcatatactttttttgctgcacaaggtcacaaaattggaaactcattattagaagttgataaagttgaaattgctaaaacctttttagcaaaaggacaagggaaaattattttaccaattgatgcgttagaagcaccagaatttgctgatgttccagcaaaagttacaacaggttttgatattgatgatggttatatgggattagatattggtcccaaaacaattgaattgtttaaaaaagaattagcagatgcaaaaacagttacttgaaatgggccaatgggagtttttgaatttaaaaattatagtattggaacaaaagctgtttgtgaagcaattgctgaactaaaaggagcctttactttaattggaggaggagattcagcggcagcagcaattcaattagggtataaagataagtttacgcatatatcaactggtggtggtgctagcttagaatatatggaaggtaaaccgctacctggaattgaagctgttcaaagtaaataa

SEQ ID NO: 10775 - protein, 412 aa, Spiroplasma citri
MTNKKELKDVQVKGKKVLVRVDFNVPMKDGQVTDDNRIIAALPTIKYLIAQEAKVILFSHLGKVKTADDLEKRDMAPVAKVLEQKLGQPVKFINAFEGKQLEEAINEMHNKEVILFQNTRFADIINSNGQISVDSEGKAAAKRESKNDSALGKYWASLGDVFVNDAFGTAHRAHASNVGIAENITESCLGFLVEKEVKMLSQCVDNPVKPFVAIIGGAKVSDKIGVIEHLLTKADKILIGGGMAYTFFAAQGHKIGNSLLEVDKVEIAKTFLAKGQGKIILPIDALEAPEFADVPAKVTTGFDIDDGYMGLDIGPKTIELFKKELADAKTVTWNGPMGVFEFKNYSIGTKAVCEAIAELKGAFTLIGGGDSAAAAIQLGYKDKFTHISTGGGASLEYMEGKPLPGIEAVQSK

SEQ ID NO: 10776 - DNA, 1191 bp, Staphylococcus epidermidis
  CDS (1)..(1191)
atggctaaaaaaatcgtttcagacttagatttaaaaggtaaagttgttcttgagcgcgctgattttaacgttccaattaaagatggtgaaatcactaatgacaacagaattgttcaagcattaccaacaatcgaatatattattgaacaaggtggtaaattagttttattctctcacttaggtaaagttaaagaagagagtgataaagaaggactttcacttaagcctgttgctgaaaacttatctaagaaattaggtaaagaagttatattcgttcctgaaacacgtggcgaaaaactcgaaacagcaattgaaaacttaaatgaaggcgatgttttattagttgaaaatacacgtttcgaagatttagatggtaaaaaagaatctaaaaatgatcctgaattaggtaaatattgggcgtcattaggtgatgtatttgttaatgatgcatttggtacagcgcaccgtgaacatgcgtcaaacgtaggtatttctactcatctagaaacagcagctggttacttaatggaaaaagaaattaaatttattggtggcgtagtgaatgatccacaaaaaccagtagttgctattttaggtggcgctaaagtttcagataaaattaatgttatcaaaaatttagttaatatcgcagataaaatcttaatcggtggcggtatggcttatacatttattaaagcgcaaggtaaggaaataggtctttcattattggaagaagacaaaattgattttgctaaagacttgttagagaataatggcgatcaaatagtattacctgtagattgtaaaatcgctaaagaattttctaatgatgcaaaaatcactgaagtatctatcaatgaaatcccttcagatcaagaagcaatggatattggacctaaaacagtagaattatttaataaagaattacaaggtgcacatactgtagtatggaatggacctatgggtgtattcgaatttagtaattttgctaaaggtacaatcggtgtatgtgagtctattgctaaattggaagacgctactactattattggtggtggtgactctgccgcagcagcaatttcattaggtttcgaagatgactttacacacatctctactggtggaggagcatcattagaatacttagaaggtaaagaattacctggtataaaagctattaatgataaataa

SEQ ID NO: 10777 - protein, 396 aa, Staphylococcus epidermidis
MAKKIVSDLDLKGKVVLERADFNVPIKDGEITNDNRIVQALPTIEYIIEQGGKLVLFSHLGKVKEESDKEGLSLKPVAENLSKKLGKEVIFVPETRGEKLETAIENLNEGDVLLVENTRFEDLDGKKESKNDPELGKYWASLGDVFVNDAFGTAHREHASNVGISTHLETAAGYLMEKEIKFIGGVVNDPQKPVVAILGGAKVSDKINVIKNLVNIADKILIGGGMAYTFIKAQGKEIGLSLLEEDKIDFAKDLLENNGDQIVLPVDCKIAKEFSNDAKITEVSINEIPSDQEAMDIGPKTVELFNKELQGAHTVVWNGPMGVFEFSNFAKGTIGVCESIAKLEDATTIIGGGDSAAAAISLGFEDDFTHISTGGGASLEYLEGKELPGIKAINDK

SEQ ID NO: 10778 - DNA, 1212 bp, Streptomyces avermitilis
  CDS (1)..(1212)
atgaagacgatcgacgaacttctcgccgaaggcgtggacggcaagcgggtcttcgtccgcgccgacctgaacgtgccgctggccgacggcctcatcaccgacgacggccgcatccgcgccgtcctgccgacggtcaaggcgctggccgaggccggtgccaaggtggtcgtcgcctcgcacctgggccgccccaagggcgccccggacccggccttctccctgctgcccgcggcggagcggctcggtgaactcctcggcgcgcccgtcgcgttcgcccaggacaccgtgggccccgccgcccacgacgccgtgaacggcctccagcccggccaggtagcggtcatcgagaacctgcgcttcaacgcgggcgagacgtccaaggacgacgccgagcgcggcgcgttcgccgaccggctggcggccctggccgacatctacgtgggcgacggtttcggcgccgtgcaccgcaagcacgcctccgtgtacgacctcccggcacgcctgccgcactacgcgggctacctcatcgccaccgaggtcaacgtcctgaagaagctcaccgaggacgtcaagcgcccctacgtggtcgcactcggcggcgccaaggtctccgacaagctcgccgtcatcgaccagctgctcggcaaggccgaccgcctgctgatcggcggcggcatggcctacaccttcctcaaggccaagggctacgaggtcggcatctccctcctccaggaggaccagatcccgaccgtcaaggagtacatggagcgcgcggagaagaacggcgtcgagctggtcctccccgtcgacgtgctggtctccacggagttcccggacctcaagacgaaggccccggccaaccccaccaccgtcgccgcggacgccatcccggccgaccaggagggtctcgacatcggtcctgagacccgcaagctgtacgcatcgaagctcgccgacgcggccaccgtcttctggaacggccccatgggcgtcttcgagcaccccgactacgccgagggcaccaaggcggtcgcccaggccctcgtcgactcccaggccttcacggtcgtcggcggtggcgactccgccgcggccgtccgcatcctgggcttcgacgagacggcattcggccacatctcgaccggcggcggcgcctccctcgaatacctcgagggcaagacgctccccggccttgccgcactggaggactga

SEQ ID NO: 10779 - protein, 403 aa, Streptomyces avermitilis
MKTIDELLAEGVDGKRVFVRADLNVPLADGLITDDGRIRAVLPTVKALAEAGAKVVVASHLGRPKGAPDPAFSLLPAAERLGELLGAPVAFAQDTVGPAAHDAVNGLQPGQVAVIENLRFNAGETSKDDAERGAFADRLAALADIYVGDGFGAVHRKHASVYDLPARLPHYAGYLIATEVNVLKKLTEDVKRPYVVALGGAKVSDKLAVIDQLLGKADRLLIGGGMAYTFLKAKGYEVGISLLQEDQIPTVKEYMERAEKNGVELVLPVDVLVSTEFPDLKTKAPANPTTVAADAIPADQEGLDIGPETRKLYASKLADAATVFWNGPMGVFEHPDYAEGTKAVAQALVDSQAFTVVGGGDSAAAVRILGFDETAFGHISTGGGASLEYLEGKTLPGLAALED

SEQ ID NO: 10780 - DNA, 1500 bp, Streptococcus thermophilus
  CDS (301)..(1500)
agtataccatcaaaactaagtatttcctcatttatgggatatttataggaaaagagtgtttgtttaaaagtaagaaagaagaggaataagtgtaagtatgaggattatatttaaatcgaaattagcttttttctgaattttatttaggtgtttttttattgctattctgactttctattttgattatatgataaaagtagcctactagcaattagctagaaatccttctgattttgctatctcttttatgcattttgtgatataatgataacgtattaaaaaattaaggagtctgatcaaatggctaaattgactgttaaagatgttgagttgaaaggaaaaaaagttctcgttcgtgttgacttcaacgtacctgtaaaagatggcgtgatcactaacgacaaccgtatcactgctgcccttccaactatcaagtatatccttgaacaaggtggacgtgcaatcctcttctctcaccttggacgtgtaaaagaagaagctgataaagaaggtaaatcacttgctcctgtagctgctgacttggctgctaaattgggtcaagatgttaagtttattccaggtgttacacgtggtgctgaattggaagcagctgttaactctcttgaagatgggcaagttctcttggttgaaaacactcgttttgaagatgttgatggcaagaaagaatctaaaaatgatcctgaacttggtaaatactgggcatcacttggagatggtatcttcgtaaacgatgcattcggtacagctcaccgtgcacacgcatctaacgttggtatctcagcaaacgttgaaaaagctgttgctggattccttcttgaaaacgaaattgcatacatccaagaagcagttgaaaatccagaacgtccattcgtggctatccttggtggttcaaaagtttcagataagatcggtgttatcgaaaacttgcttgaaaaagctgataaagttcttatcggtggtgggatgacttacacatttttcaaagcgcaaggtatcgaaatcggtaactcacttgtggaagaagacaaattggatgtagcgaaagctcttcttgaaaaatcaaatggtaaattgatcttgccagttgactcaaaagaagcaaacgcatttgctgactacactgaagtgaaatatactgaaggtgaagcagtagacccaggtttccttggtcttgatatcggtccaaaatctatcgctaaattcgacgaagctttgactggtgctaaaacagttgtatggaatggacctatgggtgtatttgaaaaccctgacttccaggctggtacaatcggtgtgatggacgctatcgtgaaacaaccaggtgttaaatcaatcatcggtggtggtgactcagctgctgcagcaatcaaccttggatatgcagacaaattctcatggatctctactggtggtggtgcatctatggaactccttgaaggtaaagaacttccaggacttgcagctttgactgaaaaataa

SEQ ID NO: 10781 - protein, 399 aa, Streptococcus thermophilus
MAKLTVKDVELKGKKVLVRVDFNVPVKDGVITNDNRITAALPTIKYILEQGGRAILFSHLGRVKEEADKEGKSLAPVAADLAAKLGQDVKFIPGVTRGAELEAAVNSLEDGQVLLVENTRFEDVDGKKESKNDPELGKYWASLGDGIFVNDAFGTAHRAHASNVGISANVEKAVAGFLLENEIAYIQEAVENPERPFVAILGGSKVSDKIGVIENLLEKADKVLIGGGMTYTFFKAQGIEIGNSLVEEDKLDVAKALLEKSNGKLILPVDSKEANAFADYTEVKYTEGEAVDPGFLGLDIGPKSIAKFDEALTGAKTVVWNGPMGVFENPDFQAGTIGVMDAIVKQPGVKSIIGGGDSAAAAINLGYADKFSWISTGGGASMELLEGKELPGLAALTEK

SEQ ID NO: 10782 - DNA, 1248 bp, Sulfolobus tokodaii
  CDS (1)..(1248)
atgataaaagtagctgatcttaatattcctgttatagaagatttcgacataaatgggagaaaagttttactaagaatagatataaattcacccgtagaccgaaaaactggaaaattattagatgattccagaattaaagcccatgctgaaacaattagagaattactcgataagcaaaattctgtagtaataatttcccaccaaggtagaccaggagatgatgattttatttctttagaagaacactctaaaatcctatctaaatatgttggtagggaaattgagttcgtcgatgatgttataggtccttatgctagagaaaaaatatctaaactaggtaaaggggaagccatcttattagagaatgttagaatcgtatctgaagaattaatagaggctcctccacaacagcaatctaaaacttttttagtaagaaaattagccccattagtcgatttttacattaacgatgctttcgcaacagcacatagaagccaaccaagtctagtaggatttcctttagtaaaaccttcagctgcaggaagaataatggagaaagaagtttctgcattatctaagatctttaacaaggaagactctccaaaaatatttgttttgggaggaagtaaggttagtgatacattaaagataattgaacacctagcaaaaaatagagttgctgatagaatattaactggcggtttagtagcagaactatttgctgttgcgaaaggtataaatttaggtaagcctaatatgcaagttttagagaataagggtcttctgagcctaattccgagagctagaaaaatcttgctatctggtgcacctatagaaatccctgttgactttacagtggaaaaacctagtggagaattaagcaatgatccggagaataatgtgagtggtattataaaagatatagggaatactaccattgaaatttattcctcttttattaaggaaggcaaagtcattacattaagaggacctatgggagttattgaagatgaaagattcagaattggtactaaaagcttactgaaagcctctattgaaagcccgggatatgtaattattggtggcggtcatatgataagtatgcttgataaagacgtagaaataaatccaaataaaattcatgtatctaccggaggaggagcgttgcttttatttttagccggtgataagttaccggcattagaagctttacatatgtcatgggtgatgcaaagtggaaaaagttaa

SEQ ID NO: 10783 - protein, 415 aa, Sulfolobus tokodaii
MIKVADLNIPVIEDFDINGRKVLLRIDINSPVDRKTGKLLDDSRIKAHAETIRELLDKQNSVVIISHQGRPGDDDFISLEEHSKILSKYVGREIEFVDDVIGPYAREKISKLGKGEAILLENVRIVSEELIEAPPQQQSKTFLVRKLAPLVDFYINDAFATAHRSQPSLVGFPLVKPSAAGRIMEKEVSALSKIFNKEDSPKIFVLGGSKVSDTLKIIEHLAKNRVADRILTGGLVAELFAVAKGINLGKPNMQVLENKGLLSLIPRARKILLSGAPIEIPVDFTVEKPSGELSNDPENNVSGIIKDIGNTTIEIYSSFIKEGKVITLRGPMGVIEDERFRIGTKSLLKASIESPGYVIIGGGHMISMLDKDVEINPNKIHVSTGGGALLLFLAGDKLPALEALHMSWVMQSGKS

SEQ ID NO: 10784 - DNA, 1203 bp, Synechococcus elongatus
  CDS (1)..(1203)
atgtctaaaaaatccgtagcgcaattatccgctgccgacttagaaggaaagcgtgtcctcgtgcgggtggattttaatgtccccgtcgatgaaaagggcgtcatcaccgatgagactcgtatccgtgcggccctgcccaccattcaagacctgatcagcaaaggtgcaaaagtcattctggtcagccactttggccgtcccaagggcgtggatgagaagttgcgcctcacccctgtggcccagcggctctcagaactgctccacaaacccgtggccaagctcgatgactgcattggcgatgcggtgatcgcccacacccaagccatggccaacggggatgtctgcctactggagaatgtgcgcttccatccgggggaagaaaaaaacgatcccgaatttgccaagcaactggccgcctgtgcagaagtctatgtcaatgatgcctttggcactgcccaccgcgcccatgcctcaaccgctggggtgactcagtacctcagtccttgcgtggcgggctttttgatggagaaagaactggaatatctgcaaaatgccatcgaacatccccgccgtcccctggcggctattgtcgggggatcaaaagtctcttctaagattggtgtcattgaagcccttttagaaaaagtggataaattgctcattggcggcggcatgatcttcactttctataaagcgcgggggctcaatgttggcaagtctctcgtggaagaagacaaattggaactagccaagcacctggaaaccaaggcccaggagaaaggggtggagttgctcttgccaacagatgttgtcgtggcggataactttgccaacgatgccaatagccaagtggtcagtatcgaagcgattcctgacgactggatggggctagatattgggcctgcttctgtcaagcgcttccaagaggcactccaagattgcaaaacggtgatctggaacggcccaatgggggtgtttgagtttgatcaatttgccaaggggacagaggcgatcgcccgctatttggctgagcttaccagtcagggggtctgcacaattattggcggcggcgattctgtggctgctgtggaaaaagttggcgtcgccgatcgcatgagccacatttccaccggtggcggggcgagtcttgaactcctcgaaggcaaacaactgccaggtattgctgcccttgatgatgcctag

SEQ ID NO: 10785 - protein, 400 aa, Synechococcus elongatus
MSKKSVAQLSAADLEGKRVLVRVDFNVPVDEKGVITDETRIRAALPTIQDLISKGAKVILVSHFGRPKGVDEKLRLTPVAQRLSELLHKPVAKLDDCIGDAVIAHTQAMANGDVCLLENVRFHPGEEKNDPEFAKQLAACAEVYVNDAFGTAHRAHASTAGVTQYLSPCVAGFLMEKELEYLQNAIEHPRRPLAAIVGGSKVSSKIGVIEALLEKVDKLLIGGGMIFTFYKARGLNVGKSLVEEDKLELAKHLETKAQEKGVELLLPTDVVVADNFANDANSQVVSIEAIPDDWMGLDIGPASVKRFQEALQDCKTVIWNGPMGVFEFDQFAKGTEAIARYLAELTSQGVCTIIGGGDSVAAVEKVGVADRMSHISTGGGASLELLEGKQLPGIAALDDA

SEQ ID NO: 10786 - DNA, 1209 bp, Synechococcus sp
  CDS (1)..(1209)
atggcgaagcgttccctggccagccttaacgccggcgacctgagcggcaaacgcgttctcgtgcgggttgatttcaacgtgcccctgaacgaggccggtgcgatcaccgacgacacccgcatccgcgccgccctgcccacgatcaacgacctgatcggcaagggcgccaaggtcattctttctgctcacttcggccgccccaagggtcaggtgaacgacgccatgcgactcacccccgtggccgcccgcctgagcgaactgctgggcaagcccgtggccaagaccgacagctgcatcggccctgatgctgaagccaaggtgaacgccatggccgatggcgatgtggtgctgctggagaacgtgcgcttcttcgccgaggaggagaagaacgacgctgggttcgccgagaagcttgctggcttggctgaggtgtacgtgaacgatgccttcggcgccgcccaccgcgcccacgcctccaccgagggcgtgaccaagttcctcaagcccgcagtcgctggcttcctgatggaaaaggagcttcagtacctgcagggtgctgtggatgagcccaagcgtcctctcgctgccatcgtcggtggctccaaggtgagctccaagatcggcgtgctcgaggccctgatcgacaagtgcgacaaggtgctgatcggcggtggcatgatcttcaccttctacaaagcccgtggcctctcggtgggcaagagcctggtggaagaggacaagcttgaactggccaaggagctggaagccaaggccaaggccaagggcgttgagctgctgctgcccaccgatgtggtgctggccgacaacttcgcccccgatgccaacagccaggtggctgatgtcaccgccatccccgacggctggatgggtctggacatcggccctgatgcggtgaaggtgttccaggacgcccttggcgattgtcagaccgtgatctggaacggccccatgggcgtgttcgaattcgagaagttcgccaccggcaccaacgccatcgccacaaccctggcggagctcagcggcaagggctgctgcacgatcatcggcggtggtgactccgtggctgctgtggagaaggctggtctggccgacaagatgtcccacatctccaccggtggcggcgccagccttgaacttctagaaggcaaggtgctgcctggtgttgccgccctcaacgacgccgcctga

SEQ ID NO: 10787 - protein, 402 aa, Synechococcus sp
MAKRSLASLNAGDLSGKRVLVRVDFNVPLNEAGAITDDTRIRAALPTINDLIGKGAKVILSAHFGRPKGQVNDAMRLTPVAARLSELLGKPVAKTDSCIGPDAEAKVNAMADGDVVLLENVRFFAEEEKNDAGFAEKLAGLAEVYVNDAFGAAHRAHASTEGVTKFLKPAVAGFLMEKELQYLQGAVDEPKRPLAAIVGGSKVSSKIGVLEALIDKCDKVLIGGGMIFTFYKARGLSVGKSLVEEDKLELAKELEAKAKAKGVELLLPTDVVLADNFAPDANSQVADVTAIPDGWMGLDIGPDAVKVFQDALGDCQTVIWNGPMGVFEFEKFATGTNAIATTLAELSGKGCCTIIGGGDSVAAVEKAGLADKMSHISTGGGASLELLEGKVLPGVAALNDAA

SEQ ID NO: 10788 - DNA, 1206 bp, Synechocystis sp
  CDS (1)..(1206)
atgttgtctaagcaatcgatcgccaatttgacggaggcagacctcgcagggaaacgggtttttgtccgggtagattttaatgtgcccctagataacggcagcatcaccgacgacaccaggattcgggcagccttacccaccatcaaagacctgttgagcaaaggcgccaaagttattttgggcagtcattttggccgtcccaagggcaaagtagtggacagcatgcgcctcacccccgttggcgatcgcctaggggaattattgggccagccggtggtcaaatgcgacgattgcattggtgctgaagttacagccaaaattgctagcctacccaatggtggtgtggccctgttggaaaatctccgcttccatgccggggaagaaggtaacgatgctgaatttgccaaagctttagcggccaacgccgacctctacgttaacgatgcctttggtactgcccaccgggcccacgcttccaccgaaggggtcacccatttcctcagccccaacgttgctggttacctaatcgaaaaggaattacagttcctccaaggagccatcgaagcccccaaacgtcccctagtggcgatcgtgggaggttccaaagtgtccagtaaaatcggtgtgatcgaaaccctattggacaagtgcgataagttgatcatcggcggcggcatgattttcaccttctacaaagcccaaggtttaaacaccggcaaatccctggtggaagaagacaaattggacttggccaaatccctcatggctaaagccaaagaaaaaggcgtggaatttctcctgcccacggacgtagtagtggccgacaactttgcccccgatgccaatgcccaaaccgttggtgtcgatgcaattcccgatggttggatgggtctagacattggtcccgactccgtcaaaaccttccaggatgccctcgctggttgtggcactgtcatctggaacggccccatgggggtatttgaatttgacaaatttgccgttggtaccgaggcgatcgcctgcagcttggctgaattgaccgccagtggcactgtcaccatcatcggtggtggagattctgtcgccgcagtggaaaaagtgggagtggccgaaaaaatgagccatatttccaccggtgggggcgctagcctggaattgctagaaggtaaagttctgcccggcattgccgctttagatgaccgataa

SEQ ID NO: 10789 - protein, 401 aa, Synechocystis sp
MLSKQSIANLTEADLAGKRVFVRVDFNVPLDNGSITDDTRIRAALPTIKDLLSKGAKVILGSHFGRPKGKVVDSMRLTPVGDRLGELLGQPVVKCDDCIGAEVTAKIASLPNGGVALLENLRFHAGEEGNDAEFAKALAANADLYVNDAFGTAHRAHASTEGVTHFLSPNVAGYLIEKELQFLQGAIEAPKRPLVAIVGGSKVSSKIGVIETLLDKCDKLIIGGGMIFTFYKAQGLNTGKSLVEEDKLDLAKSLMAKAKEKGVEFLLPTDVVVADNFAPDANAQTVGVDAIPDGWMGLDIGPDSVKTFQDALAGCGTVIWNGPMGVFEFDKFAVGTEAIACSLAELTASGTVTIIGGGDSVAAVEKVGVAEKMSHISTGGGASLELLEGKVLPGIAALDDR

SEQ ID NO: 10790 - DNA, 1227 bp, Thermoplasma acidophilum
  CDS (1)..(1227)
atggatgagttcttcttgatgaattctttcgatcttgcgggaaaaacagtatacttgagggtggatataaatgcacccgtcaatccgctgaccggtgagataatgggtattgacaggttcagggcccacatagacacgataaggaatttgagaaattccaaggtcgtcatagttgcccatcagagcagacctggaaaggacgattttatctcactcagacagcatgcacagatactttcgcaccttctcaacaagagggtgcagttcgtggatcagctcttcggaagccaggtcaacagggcggtatccgaaatgtcagatggggacatagtgatgctggagaattcaaggttttattcggaggaggttgacctaaccacgatcgaaagcatggaatcatcaaacatagtgagaagcctgtctccgctgtttgactacttcatcatagatgcctttgctgcaatacacagggcacagacaactctagttggattccacaggataaaaccaaacatagccggcactctcatagaaagggaggtcagcatgatagaacgattcagaaagataagggaaaagccgaagattgcaatacttggcggggctaagatagaggattcaatagcagtctcggagaacttcctatctagagggttcgtggataaaattctaactggcggagtcgttgccaacgctttcctgtgggcatccggatttgatataggaaaaaagaacagggaattcataatgaagaataacggagattacgaaaagctgctcgacaaatgcagggcaatcctttcaaaatacggagataaactggttatgccgacggatttcgtgatgaatccatcgggtcagaggatatcgataaacgagaagatcccggacgaccagatactggctgacatagggctggataccattgtagaatattccgagataattgacggagcaagggccatattcatgaatggacctatgggtatgtacgaaatagaggattattcttccggtaccagggaagtgttcaccgctgttgcacattccaaggcattcaagcttgcaggaggcggacacacgctcagcgcccttgacaaactaggtctgaccaagatgatcgatcatgcatccaccggaggtggtgcgttgataagctatttaagtggtgaaacaatgcctgtccttgaggcattgaaggaaagcaaaaagctgtttgagggatga

SEQ ID NO: 10791 - protein, 408 aa, Thermoplasma acidophilum
MDEFFLMNSFDLAGKTVYLRVDINAPVNPLTGEIMGIDRFRAHIDTIRNLRNSKVVIVAHQSRPGKDDFISLRQHAQILSHLLNKRVQFVDQLFGSQVNRAVSEMSDGDIVMLENSRFYSEEVDLTTIESMESSNIVRSLSPLFDYFIIDAFAAIHRAQTTLVGFHRIKPNIAGTLIEREVSMIERFRKIREKPKIAILGGAKIEDSIAVSENFLSRGFVDKILTGGVVANAFLWASGFDIGKKNREFIMKNNGDYEKLLDKCRAILSKYGDKLVMPTDFVMNPSGQRISINEKIPDDQILADIGLDTIVEYSEIIDGARAIFMNGPMGMYEIEDYSSGTREVFTAVAHSKAFKLAGGGHTLSALDKLGLTKMIDHASTGGGALISYLSGETMPVLEALKESKKLFEG

SEQ ID NO: 10792 - DNA, 1173 bp, Thermus thermophilus
  CDS (1)..(1173)
atgcggacccttttggacctggaccccaagggcaagagggtcctggtgcgggtggactacaacgtccccgtccaagacgggaaggtccaggacgagacccggatcctggagagcctccccaccctccgccacctcctcgccgggggggcttccctcgtcctcctctcccacctgggccgccccaagggtcccgaccccaggtactccctggcccccgtgggggaggccttgagggcccacctcccggaggcccgcttcgcccccttccctccgggctcggaggaggcgaggcgggaggcggaggccctgaggcccggggaggtcctcctcctggagaacgtccgctttgagccgggggaggagaagaacgacccggagctttccgcccgctacgccaggctcggggaggccttcgtcctggacgccttcgggagcgcccaccgggcccacgccagcgtggtgggggtggcgaggctcctccccgcctacgccggcttcctcatggagaaggaggtcagggccctttcccgcctcctcaaggacccggaaaggccctacgccgtggtgctgggcggggccaaggtctcggacaagatcggggtcattgagagcctccttccccgcatagaccgcctcctcatcggcggggccatggccttcaccttcctcaaggccctagggggggaggtggggaagagcctggtggaggaggaccggctggacctggccaaggacctcttggggcgggccgaggccttgggggtcagggtctacctccccgaggacgtggtggcggcggagcgcatagaggcgggggtggagacccgggtcttcccggcccgggccatccccgtcccctacatgggcctggacatcggccccaagacccgggaggcctttgcccgggccctggaaggggcgaggacggtcttctggaacgggcccatgggggtctttgaggtgcctccctttgacgaggggaccttggccgtggggcgggccatcgccgccctcgagggcgccttcaccgtggtgggcgggggcgactcggtggcggcggtgaaccgcctgggccttaaggaccgcttcggccacgtctccaccgggggcggggcgagcctggagttcctggaaaagggcaccctgcccggcctcgaggtcctggaaggctaa

SEQ ID NO: 10793 - protein, 390 aa, Thermus thermophilus
MRTLLDLDPKGKRVLVRVDYNVPVQDGKVQDETRILESLPTLRHLLAGGASLVLLSHLGRPKGPDPRYSLAPVGEALRAHLPEARFAPFPPGSEEARREAEALRPGEVLLLENVRFEPGEEKNDPELSARYARLGEAFVLDAFGSAHRAHASVVGVARLLPAYAGFLMEKEVRALSRLLKDPERPYAVVLGGAKVSDKIGVIESLLPRIDRLLIGGAMAFTFLKALGGEVGKSLVEEDRLDLAKDLLGRAEALGVRVYLPEDVVAAERIEAGVETRVFPARAIPVPYMGLDIGPKTREAFARALEGARTVFWNGPMGVFEVPPFDEGTLAVGRAIAALEGAFTVVGGGDSVAAVNRLGLKDRFGHVSTGGGASLEFLEKGTLPGLEVLEG

SEQ ID NO: 10794 - DNA, 1185 bp, Thermoanaerobacter tengcongensis
  CDS (1)..(1185)
atgaaaaagaaaactgtgagagacatagacgttagcggaaaaagagttttagttagagtagattttaacgtgccgatggatgaaaataaaaacataacagatgacaggcgcataagagaagctcttcccaccattgagtatttaataaatcacaacgcaaaagtgatactggtatctcacctggggagacctaaggggaaattcaatccggattactctttaaagcctgttgcaaaaaggctgtctgagcttttgaaaaagcctgtaattatggcagaggatgtgattggagaagatgctaaggtaaaagctgctgccttaaaagaaggggaagttctccttttggaaaatgttagattccatgcagaagaggagaagaatgaccctgaatttgcaaaagagcttgcatctttagcagatatatacgtaaatgatgcttttggcactgctcacagggctcacgcttctactgcaggagttgccaagtatcttccagcagtggcaggttttttaattgaaaaagagctttctataatgggagaagcgttggagaatcctaagagaccttttgtggcgattttaggtggagctaaagtttctgataaaattggggttataacaaatcttctggaaaaagtggacagcctgttaattggcggtggaatggcttatacctttattaaggcgaagggctacgaaatagggaaatctcttttggaagaggataaaattgaactagcaaaggaaataatggaaaaagcaaagcagaagggcgtaaatttcatgcttcctgttgatacagttatcgcgaaagagttaaaatccggggtaccttatgaagtggttgacattgacaaaatgccagaagaccagataggagttgacattgggcctaaaacaatagaagagtattcaaaagtgataaagcatgccatgacagttgtatggaatggaccaatgggagtttttgaaatacctgaatttgccaaaggtacaaaagctatcgcaaaggctttgagcgagtgcaaaggtacaacaatagtaggaggaggagattctgcagctgccatagaacagcttggctatgctgataaagtcacccacatttcaactggaggcggtgcgtcactggaatttttagaggggaaagtcttgccgggaattgacattttgaatgataagtaa

SEQ ID NO: 10795 - protein, 394 aa, Thermoanaerobacter tengcongensis
MKKKTVRDIDVSGKRVLVRVDFNVPMDENKNITDDRRIREALPTIEYLINHNAKVILVSHLGRPKGKFNPDYSLKPVAKRLSELLKKPVIMAEDVIGEDAKVKAAALKEGEVLLLENVRFHAEEEKNDPEFAKELASLADIYVNDAFGTAHRAHASTAGVAKYLPAVAGFLIEKELSIMGEALENPKRPFVAILGGAKVSDKIGVITNLLEKVDSLLIGGGMAYTFIKAKGYEIGKSLLEEDKIELAKEIMEKAKQKGVNFMLPVDTVIAKELKSGVPYEVVDIDKMPEDQIGVDIGPKTIEEYSKVIKHAMTVVWNGPMGVFEIPEFAKGTKAIAKALSECKGTTIVGGGDSAAAIEQLGYADKVTHISTGGGASLEFLEGKVLPGIDILNDK

SEQ ID NO: 10796 - DNA, 1260 bp, Treponema denticola
  CDS (1)..(1260)
atgattaagactgtaaaagatgtaaatttaaaggataaacgcataataatgcgtgtagattttaacgttcctatgaaggacggagtagtgcaggatgatacgcggattagggcggctcttcctacaataaaatatatattggaacaaggagcaagaagccttgttttgatgagccatttgggtgatccttcaaaagatgcaaaaaaagccaaggaaaaggccgaaaaagacggaaaaccctttgatgaggaagcttatattaacggaaagcataggatgaaacctgttgcagaatacttatccggccttcttaaacttcctgttgattttgctccctcctgcatgggacagcttgaaagggtaaaagctcttccacagggcggaattctaatgcttgaaaacacccgcttccacaaagaagaaacttcaaaggaaaaggccgagcagcaaatcttggcaaaagaactcagcttgtacggtgatatctatgtaaatgatgcttttggaacggctcaccgctctcatgcttctacagccgaaattgccaactttgtcaatacaagggtagccggctttcttatggaaaaggaaattaaataccttgagccaatgttaaataatcctgcaaagccaatgacggcaattataggaggagcaaaggtttcttccaaaattgcagttttggaaagtcttttaaaaaatgcatcttctttaattataggaggaggaatggcctacaccttcttaaaggttcaaggaaaaaagatcggtaaatccttatttgaagaagattttatggatactgctaaaaatcttttggataaggctgaaaaacagggtgtaaagataatccttcctgttgatcatatctgttccgaaaccttttctcccaatgccgaagccgttttagttgaaagcacagatattcccgataatcttatgggaatggatgtaggccctaagaccttggctctttataaagagattattttgtcgtcaaagtccattgtctggaacggccccgtaggcgtttttgagtttgaggctttttcaaagggaacggaagaaactgcccgccttgtagcagctgcaacggaaaaaggtgcacttacaatcgtaggcggaggtgattcggttgctgccgtaaataagttcaatcttgccgataagatgagtcatgtttctaccggcggcggagcttccctcgaattccttgaaggaaaagttctccccggcattgcctgtcttgatactatttaa

SEQ ID NO: 10797 - protein, 419 aa, Treponema denticola
MIKTVKDVNLKDKRIIMRVDFNVPMKDGVVQDDTRIRAALPTIKYILEQGARSLVLMSHLGDPSKDAKKAKEKAEKDGKPFDEEAYINGKHRMKPVAEYLSGLLKLPVDFAPSCMGQLERVKALPQGGILMLENTRFHKEETSKEKAEQQILAKELSLYGDIYVNDAFGTAHRSHASTAEIANFVNTRVAGFLMEKEIKYLEPMLNNPAKPMTAIIGGAKVSSKIAVLESLLKNASSLIIGGGMAYTFLKVQGKKIGKSLFEEDFMDTAKNLLDKAEKQGVKIILPVDHICSETFSPNAEAVLVESTDIPDNLMGMDVGPKTLALYKEIILSSKSIVWNGPVGVFEFEAFSKGTEETARLVAAATEKGALTIVGGGDSVAAVNKFNLADKMSHVSTGGGASLEFLEGKVLPGIACLDTI

SEQ ID NO: 10798 - DNA, 1188 bp, Tropheryma whipplei
  CDS (1)..(1188)
atgagaactcttggcggtttcacctttccttgtgatgctcctgtttttgtccgggttgatttcaatgtgcctatggatgaggtcggcacaataacggatgatctgcgtataagagcttcccttccgactatagaaagcttgcttggccgtggcgcgccacttatattgatttctcatctcgggcgaccggttaaaaatgagcagcaaggattttccctaaaaccctgtgctgagcgactatcggaatatatcggagtcaatgtaccgcttgtggattttcttgatctagatacaaagctttatggtgaacttactaggcatctggacaagtctgggatagttctttttgaaaatatacgattttttgccgaggaaacttcaaaggcacaggctgatcgaaggattctggctgagcaacttgcgccttttgcgggtgcgtatgtcaatgatgcctttggtgcttcccacaggaggcatgctagtgtgtatgagcttgcacaggctttctcaaataaggcggcaggctttctcattgaatcagagatgcaggctttttcacatcttgccagcgaggccaagcgtccctataccgttattctcggcggggcaaaattatcggacaagctacggcttatagagaatatcctgccaacggttgatcgtctgttactgtgtggtggaatggcatttacatttctagcggcacaggggtgtgaaacaggcaaaagtctcctggaagagagttttatctcggaggcaaataaaatcattgattttgctaagcaaaataatgttgaacttatacttccggtagatgttattgaggcgcgaagcctaacttcaccccttggggttgtaagtaaagctgaatctatatcttatatgggtcttgatataggtcctgaaactcagagtatctttagaaatgtaatacaagattcgaaaactgttttttggaatggcccggctggtttatttgaaaacccaagcttttcaaacggaacacgtgcactgcttgatgcattgtcgtcttctagcgcgtttacatttatcggaggaggcgatacagcagcagctgtcagccttcttggttttgattatggagattttagtcatgtttcaacaggcggtggtgcctgccttgaactgctagagggaaaaatattgccagcattagaggttttgtaa

SEQ ID NO: 10799 - protein, 395 aa, Tropheryma whipplei
MRTLGGFTFPCDAPVFVRVDFNVPMDEVGTITDDLRIRASLPTIESLLGRGAPLILISHLGRPVKNEQQGFSLKPCAERLSEYIGVNVPLVDFLDLDTKLYGELTRHLDKSGIVLFENIRFFAEETSKAQADRRILAEQLAPFAGAYVNDAFGASHRRHASVYELAQAFSNKAAGFLIESEMQAFSHLASEAKRPYTVILGGAKLSDKLRLIENILPTVDRLLLCGGMAFTFLAAQGCETGKSLLEESFISEANKIIDFAKQNNVELILPVDVIEARSLTSPLGVVSKAESISYMGLDIGPETQSIFRNVIQDSKTVFWNGPAGLFENPSFSNGTRALLDALSSSSAFTFIGGGDTAAAVSLLGFDYGDFSHVSTGGGACLELLEGKILPALEVL

SEQ ID NO: 10800 - DNA, 1164 bp, Vibrio cholerae
  CDS (1)..(1164)
atgtctgtaatcaagatgattgacctggatcttgcaggtaaacgcgtatttatccgtgctgacctgaacgtaccagtaaaagacggcaaagtgacttctgatgcacgtatccttgcatcactacctaccattaagcactgcttggaagcgggcgcgaaagtaatggtcacttctcacctaggtcgtccaacggaaggtgagtacgctgaagagttctctctactgcctgtggttaactacctgaacgatgctctcgattgcgaagttcgcctagtgaaagactacctagacggcgttgaactgaacgcaggtgaactggttgttctggaaaacgttcgtttcaacaaaggcgaaaagaaaaacgaagaagcgctgtctaagaaatacgcggcactgtgtgacgtattcgtgatggatgcgtttggtactgcgcaccgtgctcaagcttctactcacggtgttggtatgtttgctcctattgcgtgtgcaggccctctactggctgacgaacttgaagcgctaggcaaagcgatggacaaaccagctcgcccaatggtggctatcgttggtggttcaaaagtatcaactaagctgactgtacttgagtcactgtcaaaaattgctgaccaactggtggttggcggtggtattgcgaacactttcatcgctgcagcgggtcacaacgtaggtaagtctctgtatgaagctgaccttgttgaaacagcgaaaaaactgatggaagagtgcgcgattcctgtggcgactgacgtagcttgtgccaaagctttcgatgagaacgcagaagccgaaatcaaacacgtttctgaagttcaagatgacgacatgattttcgacttgggtccaaactcaacggctgaactggctgagatcctgaaaaacgcgaaaactatcctgtggaacggcccagtaggcgtattcgaattcaagaactttgaagcgggtactcgtggtatcgcagaagcgatcgcacaatcagaaggcttctctgttgctggtggcggtgacacgctagcggcgatcgacaagtttggcatcaaagccgatgtttcttacatctctactggtggcggcgcgttccttgagttcgttgaaggcaaaaaactgcctgcagtagaaatgctggaagcacgcgctaaagcgtaa

SEQ ID NO: 10801 - protein, 387 aa, Vibrio cholerae
MSVIKMIDLDLAGKRVFIRADLNVPVKDGKVTSDARILASLPTIKHCLEAGAKVMVTSHLGRPTEGEYAEEFSLLPVVNYLNDALDCEVRLVKDYLDGVELNAGELVVLENVRFNKGEKKNEEALSKKYAALCDVFVMDAFGTAHRAQASTHGVGMFAPIACAGPLLADELEALGKAMDKPARPMVAIVGGSKVSTKLTVLESLSKIADQLVVGGGIANTFIAAAGHNVGKSLYEADLVETAKKLMEECAIPVATDVACAKAFDENAEAEIKHVSEVQDDDMIFDLGPNSTAELAEILKNAKTILWNGPVGVFEFKNFEAGTRGIAEAIAQSEGFSVAGGGDTLAAIDKFGIKADVSYISTGGGAFLEFVEGKKLPAVEMLEARAKA

SEQ ID NO: 10802 - DNA, 1161 bp, Vibrio parahaemolyticus
  CDS (1)..(1161)
atgtctgtaatcaagatgactgacctggatcttgcaggtaaacgtgtattcatccgtgctgacctaaacgtgccagtaaaagacggtaaagtaacttctgatgcacgtatcatcgcatctcttccaactattaagcactgcctagaagctggcgctaaagtaatggttacttctcacctaggtcgtccaactgaaggtgaatacgctgaagagttctctctacaaccagttgttaactacctaaacgacgcactagattgcgaagttaaacttgctaaagattacctagatggcctagaactaaacgctggtgagcttgttgttctagaaaacgttcgcttcaacaaaggcgagaagaaaaacgaagaagagctatctaagaaatacgcagcactatgtgacgtattcgtaatggatgcattcggtacggctcaccgtgctcaagcgtcaactcacggcgttggtatgcacgctcctgtagcttgtgctggtcctctactagcaaacgaactagaagctctaggcaaagcaatggacaagcctgctcgtccaatggttgctatcgtaggtggttcaaaagtttctactaagctaactgttcttgaatctctatctaaaatcgctgaccaacttgttgttggtggtggtattgctaacacattcatcgctgctgctggtcacaacgttggtaaatctctatacgaagctgacctagtagacactgctaagaagctaatggacgagtgtgcaattccagtggcaactgacgttgcatgtgcgaaagcattcgacgagaacgcagaagcagaaatcaaacacgtttctgaagtacaagacgacgacatgatcttcgaccttggtccagaatcaacagctgcactagctgaaatccttaaaaacgcgaaaactatcctatggaacggtcctgtaggtgtattcgaattcaagaacttcgaagccggtactaaaggtatctctgaagctatcgcagcttctgaaggtttctctgttgcaggtggtggtgacacgctagcagctatcgacaagttcggtatcaaagctgacgtatcgtacatctctactggcggcggcgctttccttgagttcgtagaaggtaaagttcttccagcagtagaaatgctagaagcacgcgctaagtaa

SEQ ID NO: 10803 - protein, 386 aa, Vibrio parahaemolyticus
MSVIKMTDLDLAGKRVFIRADLNVPVKDGKVTSDARIIASLPTIKHCLEAGAKVMVTSHLGRPTEGEYAEEFSLQPVVNYLNDALDCEVKLAKDYLDGLELNAGELVVLENVRFNKGEKKNEEELSKKYAALCDVFVMDAFGTAHRAQASTHGVGMHAPVACAGPLLANELEALGKAMDKPARPMVAIVGGSKVSTKLTVLESLSKIADQLVVGGGIANTFIAAAGHNVGKSLYEADLVDTAKKLMDECAIPVATDVACAKAFDENAEAEIKHVSEVQDDDMIFDLGPESTAALAEILKNAKTILWNGPVGVFEFKNFEAGTKGISEAIAASEGFSVAGGGDTLAAIDKFGIKADVSYISTGGGAFLEFVEGKVLPAVEMLEARAK

SEQ ID NO: 10804 - DNA, 1185 bp, Wigglesworthia glossinidia brevipalpis
  CDS (1)..(1185)
atgaaaataataaaagttacagatttaaatttaaaagacaaaaaagtgcttataaggtctgatcttaatgttcctattaaaaatggtaaaattatgtgtaatatgcgaataataaaatctttagaaactataaatttcgtaataaaaaatgaagctaaatgtgttattgtagcatcccaccttgggaatcctatagaagaaaagtacgactataatttttctctaacacacattgtaaatcatatgaaaaaaattataaaatatccaataagattaatacaaaattatttaaacggttttgaagcaaaagaaaaagaaattattgttttagaaaacgtaagattcaatccaggagaaagaaaaaatgacaaaaatttatcaaaaaaatatgctaatttatgtgatatattagtcatggattctttcggatcttctcatagatcagaatcatcaacaacaggtattattaagtttgcacctattagttgcataggacttctttttttaaaagaaataaaatatttaaaaaaagcattatttaattctaaaagaccaatagttacaatttttggaggatcaaaaatatcaactaaattaggagttatagaaaaattatctaacatttctgaaaatgttttagtaggaggaggaatagcaaatactattcttttttctaaaggacataatataggaaaatctttacacgataaaaataatataagtaaaattaaaaaatttttatataaaaaaaatataataattccaaaagattttatagttactgataatattaataaattttcttcgtacaaagaaaaatctataaaagaaataaaaaacgaggattatatagttgatatagggaaaaaatcctgcgaatgttttattaaaattataaaaaaagcaaaaacaatattttggaacgggcctctaggcttgatagagattaaacaatttagaaatggaactaaagaaatagctaattctgtaattcatagttcagcaaaatcaataataggaggaggagaaacagttcttgctatgagaatgttcaattttattgatcgtttttcatatatttctacaggaggaggagcatttttatcttttatagaaaaacaagaacttcctgttctatcagaattaaaaaaattcaaaaaatatacaaactttaaacaaaactaa

SEQ ID NO: 10805 - protein, 394 aa, Wigglesworthia glossinidia brevipalpis
MKIIKVTDLNLKDKKVLIRSDLNVPIKNGKIMCNMRIIKSLETINFVIKNEAKCVIVASHLGNPIEEKYDYNFSLTHIVNHMKKIIKYPIRLIQNYLNGFEAKEKEIIVLENVRFNPGERKNDKNLSKKYANLCDILVMDSFGSSHRSESSTTGIIKFAPISCIGLLFLKEIKYLKKALFNSKRPIVTIFGGSKISTKLGVIEKLSNISENVLVGGGIANTILFSKGHNIGKSLHDKNNISKIKKFLYKKNIIIPKDFIVTDNINKFSSYKEKSIKEIKNEDYIVDIGKKSCECFIKIIKKAKTIFWNGPLGLIEIKQFRNGTKEIANSVIHSSAKSIIGGGETVLAMRMFNFIDRFSYISTGGGAFLSFIEKQELPVLSELKKFKKYTNFKQN

SEQ ID NO: 10806 - DNA, 1197 bp, Wolbachia pipientis wMel
  CDS (1)..(1197)
atgaatatacctagtatagaaaattgtgatcttcacaataaaaccgtcttactcagagttgacttcaatgttcctataaaagatggagaaattcgtgacgtcactcgtattttgagagcattgcctactattcagtatttagtgaatgcgagtgcaaagattattattatatcacattttggacgcccaaaggccagagacaataatctgtcgctaaaaaatgtaattgacactttatcgcagttactaaataaaaaagtgaaattcattgacgattgctttggtgaaaaagtacaaagagcagtaagtgttatggatgcaggagatataatattactagagaatctaagattttataaagaggaagagcaaagtgactcaaattttgccaaacaactagcatctctagcggatatatatgtaaatgatgcattttcttgctctcacagagctcacgcttctatttcacgcattacagaatttttaccctcttatgcagggttttgcttgcaagatgagctaaagtatcttgaaaaagctgtatcgtttaaagctaaacctattactgcgatagttgggggagctaaaatatcaactaaaataaaagtgcttatgaagctaacagaaaaggttaattacctagttctaggtggtgcaatagccaataattttttgtcattcagcaaagtaaatatagggaaatctttctttcaaaatggtgttgacgaccttctgcataatattcttgaaacagcaaataaaaacaattgcaaaatagttgtgccagaagacgtgctggttgcagtaaactctgattacagcactagtatttcaagaagaactgagtccattttggacggtgatataattttggatatcggaccacaaactttgagtacaataagcagtataatagcaagcagtaagactctgctgtggaatggacctattggtgtttttgaacattcagcttttgcaagcggtacaataggggtaatgaaaatcgtaagtgacttaacgcacaaaggaaagttaaccagcataatagggggaggcgatagtctatctgcaataagcgctgcaggccttgccgataaggattttacatatgtttccactggtggaggagcatttttagattggttaagtggcgatgaaatgccgggagttgctgctctgcaaaaacgattagattaa

SEQ ID NO: 10807 - protein, 398 aa, Wolbachia pipientis wMel
MNIPSIENCDLHNKTVLLRVDFNVPIKDGEIRDVTRILRALPTIQYLVNASAKIIIISHFGRPKARDNNLSLKNVIDTLSQLLNKKVKFIDDCFGEKVQRAVSVMDAGDIILLENLRFYKEEEQSDSNFAKQLASLADIYVNDAFSCSHRAHASISRITEFLPSYAGFCLQDELKYLEKAVSFKAKPITAIVGGAKISTKIKVLMKLTEKVNYLVLGGAIANNFLSFSKVNIGKSFFQNGVDDLLHNILETANKNNCKIVVPEDVLVAVNSDYSTSISRRTESILDGDIILDIGPQTLSTISSIIASSKTLLWNGPIGVFEHSAFASGTIGVMKIVSDLTHKGKLTSIIGGGDSLSAISAAGLADKDFTYVSTGGGAFLDWLSGDEMPGVAALQKRLD

SEQ ID NO: 10808 - DNA, 1206 bp, Wolinella succinogenes
  CDS (1)..(1206)
atggtagcgggtatcaatttaatgcaggaaaccaaaagcatcagagatgttgagatcgaggggaagcgggtcttaatccgtgtcgatttcaacgtgcccatggatagtgattttaatatctccgacgacactcgaattagggaggcgattcctacgatcaatcattgcatcgacaatggcgccaaaagcattgtccttgtaagtcatctaggaagacccagaggaaaaagttcggagttttcactcaagcatatcctcaaacgcctagagcgcctgctcaatcgtagcgtgatttttgtcgagagccttgagggcgtctcttcggtaatggcaaccctgccccagaagagcgtgattttgcttgaaaatattcgattccttgagggggaagagaagaatgacgaaaagctctccaagaacctcgcatcgctttgtgacatctacatcaatgatgcttttggagcttcacaccgcaagcatgcttccacctatggtgtggcgaagtttgcccctgtgaaggtggcgggattgcttcttaaaaaggagatcgattcttttgccaaggcgctcgctagtccgcttaagcctgtgcttttgatcgtgggaggatccaaggtctcttctaaaatcactctccttagcaacatccttgatgtggtcgataagattgtgattggtggggcgatgagtaacaccttcttgaagtcgctaggctatgatatgcagcgatcactagtggaagatcctcttgttcctgaagcggccaaaatcctagggctcgccaagcaaaaaggggtgaaaatttatcttcccgtggatgtggtttgcaccgatgacattaaaaatcccaaagagattaaaatcacccccgcccaagatgttcctgaaaacttccttgccgcggatattggacctgcaagcgtgaagctctttggcgaggtgattagggattgcgagacgatcatctggaatggacctatgggggtctatgaggtgcaaaacttctctcgaggaaccttccaattggcgcatgtggtggctgacacctatgcctatagcgtcattggagggggagatacggccgatgcgattgatagggcaggtgagaaagacaatatgagtttcacctccacggggggtggggcgagtttggagcttcttgaagggaagattcttcctgcttttgaggtgctagagcgaaaatag

SEQ ID NO: 10809 - protein, 401 aa, Wolinella succinogenes
MVAGINLMQETKSIRDVEIEGKRVLIRVDFNVPMDSDFNISDDTRIREAIPTINHCIDNGAKSIVLVSHLGRPRGKSSEFSLKHILKRLERLLNRSVIFVESLEGVSSVMATLPQKSVILLENIRFLEGEEKNDEKLSKNLASLCDIYINDAFGASHRKHASTYGVAKFAPVKVAGLLLKKEIDSFAKALASPLKPVLLIVGGSKVSSKITLLSNILDVVDKIVIGGAMSNTFLKSLGYDMQRSLVEDPLVPEAAKILGLAKQKGVKIYLPVDVVCTDDIKNPKEIKITPAQDVPENFLAADIGPASVKLFGEVIRDCETIIWNGPMGVYEVQNFSRGTFQLAHVVADTYAYSVIGGGDTADAIDRAGEKDNMSFTSTGGGASLELLEGKILPAFEVLERK

SEQ ID NO: 10810 - DNA, 1176 bp, Xanthomonas campestris
  CDS (1)..(1176)
atgtccattgtccgcatgaccgacctcgatctttccggcaagcgcgtgctgatccgccaggatctcaacgtgccgatcgacaacggccagatcacctccgaacagcgcatcaccgcctcggtgcccaccatcaagctggcgctggaaaagggcgccgcggtgatggtgacctcgcacctgggccgcccgaaggaaggcacctggagcgaggaagattcgctggcgccggtggccgcgcgactgaccaccctgctgggcttggacgtgccgctggtgcgtgactgggtcgatggcgtggacgtggcgccgggccaggtggtgctgctggaaaattgccgcatgaacgtgggcgagggcaaggatgacgaagcgctcgcgcgtaagtacgccgcgctgtgcgatgtgtttgtcatggacgccttcggcaccgcgcatcgtgcgcaggcctccacgcatggcgtgatccggttcgcgccggtggcagccggtggcccgctgctgatggccgagctcgacgcgctggccaaggcgctggacaacccggccaagccgctgctggcgatcgtggccggcagcaaggtttcgaccaagctggaactgctctccaacctggtcaacaaggtcgaccagttgatcgtgggcggcggcatcgccaataccttcatcgccgcggccggccacgacgtgggcaagtcgctcagcgagccggacctgatcccgaccgccaaccagatcgtcgccgatgccaaggcacgcggcgcggagattccgttgcccaccgacgtggtggtggccaagcagttcctgcccgatgccgaggcgagcgtgaagtcgctcgaccaggtggatgccgacgatctgatcctggacatcggcccgcagaccgcggcgcactatgccgaactgattgccaatgccggcaccgtggtctggaacggcccggtcggcgtgttcgagttcgagcccttcagccatggcaccgagaccctggcgcgtgccattgccgcgtccaaggcgttctcgatcgccggtggtggtgacacgttggcggccgtggacaaatacgccatcgccaaggacgtcacctacatctccaccggcggcggcgcgttcctggaatttctggaaggcaaaaccttgccggcggttgccgcgctcgaggcccgcgggcagtga

SEQ ID NO: 10811 - protein, 391 aa, Xanthomonas campestris
MSIVRMTDLDLSGKRVLIRQDLNVPIDNGQITSEQRITASVPTIKLALEKGAAVMVTSHLGRPKEGTWSEEDSLAPVAARLTTLLGLDVPLVRDWVDGVDVAPGQVVLLENCRMNVGEGKDDEALARKYAALCDVFVMDAFGTAHRAQASTHGVIRFAPVAAGGPLLMAELDALAKALDNPAKPLLAIVAGSKVSTKLELLSNLVNKVDQLIVGGGIANTFIAAAGHDVGKSLSEPDLIPTANQIVADAKARGAEIPLPTDVVVAKQFLPDAEASVKSLDQVDADDLILDIGPQTAAHYAELIANAGTVVWNGPVGVFEFEPFSHGTETLARAIAASKAFSIAGGGDTLAAVDKYAIAKDVTYISTGGGAFLEFLEGKTLPAVAALEARGQ

SEQ ID NO: 10812 - DNA, 1360 bp, Xanthobacter flavus
  CDS (56)..(1249)
cgacacggccgtcgccatgggcaagctgggctgaccgggaaaagggggcgccatcatgatcgccttccgcaccctcgatgacgccgtggacctcgccgacaagcgggtcctcgtccgtgtcgacctcaacgttcccatggagagcgggcgcgtcaccgacgccacccgtctcaaggccatcctgcccaccattcgggacatcaccggcaagggcggcaaggccgtcctgctggcgcacttagggcggcccaagggccgcgacgaaagccagtcgctcgcccccgtcgccaaggccctcgagggtgaactcggccgcaaggtcgcgttcgcctctgattgcatcggcgacgaggcgaagagcgccgtctcccgcctcgcctccggcgaggtgatcgtgctggagaacacccgcttccatgcgggcgaggagaagaacgcgccggacttcatcgaagccctcgcgagcctcggcgatatctatgtcaacgatgccttttccaccgcccaccgcgcgcacgcctccaccgaggggctggcccgcaagctgccggcctatgccggccgctccatggaaagcgagatcgaggcgctgaccaaggccctcgaggcgccccagcgccccgtgctcgccgtggtcggcggctccaaggtgtccagcaagctcgaactgctcggcaacctcgtgaagaaggtggacatcctcgtcatcggcggcggcatggccaacaccttcctcgccgctctcggcaagaaggtgggcaagtcgctctgcgagcacgacctggccaacaccgcgcgggacatcctgaagaaggccgaggcggccggatgcgagatcgtcctgccggtggacgcggtggtcgccaccgagttcaaggccaatgccgcgcaccgcgtcaccagcgtcgatgacgtgaaggacgacgagatgatgctggacgccggtccggagacggtcggcatcgtcaagcagaagctcgacggggcgaagacggtggtctggaacgggccgttcggcgcgttcgagatgacgccgttcgatgcggcgacggtggccgtggcccgctatgtcggcgacctcacccacaaggggcggttgctgtcggttgcgggcggcggcgacacggtggccgcgctgaaccatgcggggacggcggagcgcttctcctacgtctcgacggccggcggtgccttcctcgagtggctcgagggcaaggcgcttccgggcgtggaggccctgcggcgctgatattgcgctgcgggataaaatgacgaagattgcgcccgcccggccctccgcggcgggcgcttttcgggtagggcaccggtcgggaacccggtgctggctccgggacttgca

SEQ ID NO: 10813 - protein, 397 aa, Xanthobacter flavus
MIAFRTLDDAVDLADKRVLVRVDLNVPMESGRVTDATRLKAILPTIRDITGKGGKAVLLAHLGRPKGRDESQSLAPVAKALEGELGRKVAFASDCIGDEAKSAVSRLASGEVIVLENTRFHAGEEKNAPDFIEALASLGDIYVNDAFSTAHRAHASTEGLARKLPAYAGRSMESEIEALTKALEAPQRPVLAVVGGSKVSSKLELLGNLVKKVDILVIGGGMANTFLAALGKKVGKSLCEHDLANTARDILKKAEAAGCEIVLPVDAVVATEFKANAAHRVTSVDDVKDDEMMLDAGPETVGIVKQKLDGAKTVVWNGPFGAFEMTPFDAATVAVARYVGDLTHKGRLLSVAGGGDTVAALNHAGTAERFSYVSTAGGAFLEWLEGKALPGVEALRR

SEQ ID NO: 10814 - DNA, 1176 bp, Xylella fastidiosa
  CDS (1)..(1176)
atgtccatcgtccgcatgactgatctcgctttatccggtaaacgcgtactgattcgtcaggacttgaatgtaccgattgatcagggtcgtattacttccgagcagcgcattattgcttcgcttccgacgatccgtgtagcgctggagcgtggtgcggcggtcatggtgacttcgcatctgggccgtccgaaggagggcgtgtggagtgaggaggattcattggcacccgtggcgaagcgtttgtctcaattgttggggattgaggttccgttgcgtcgcgattgggtggatggcgtgcaggttgcgccagggcagttggtgttattggaaaactgccgaatgaatgtcggcgaagctgagaatgacgaggcgttggcaaggaagtatgcggcgttatgtgatgtgttcgtgatggatgcgtttggcactgcgcaccgtgcccaggcatcaacgcatggggtgatctgttgtgctgcgattgctgccggcggtccgttgttgatggctgagttggatgctttgagccggggattgaagcatccggtgaagccgctgctggcgattgtggggggcagtaaggtatcgacgaaattggagttgctttccaatttggtgaataacgttgagcaattgattacggggggaggcattgccaatacgttccttgccgcagccggttaccccatcggtaagtcactgtatgaggcggatttgatcgagactgctcgggagattattactgtggcgaaagcgcgtggcgctgagattccgttacccacggatgtggttgttgccaagcagtttttgcctggagtcacggcaacggtgaagacggtggatgcaatcgttgccgatgatcttattttggacattggtccgcagacggcacggcactatgctgccttgattgaaacggcggctacggtggtctggaatggtccagtgggtgtgtttgagttcgatgccttcagcaaggggaccgaggtgttagcgcgggccgttgctgcctcgtctgcgttttcgattgccggtggcggcgataccttggctgctattgataagtatggtgttgcggaccagatcagttacatctccacaggcggcggtgcttttctggagtttttggaaggtaagacgttgccggcggtggctgcgttgcaggcgcgcagcggataa

SEQ ID NO: 10815 - protein, 391 aa, Xylella fastidiosa
MSIVRMTDLALSGKRVLIRQDLNVPIDQGRITSEQRIIASLPTIRVALERGAAVMVTSHLGRPKEGVWSEEDSLAPVAKRLSQLLGIEVPLRRDWVDGVQVAPGQLVLLENCRMNVGEAENDEALARKYAALCDVFVMDAFGTAHRAQASTHGVICCAAIAAGGPLLMAELDALSRGLKHPVKPLLAIVGGSKVSTKLELLSNLVNNVEQLITGGGIANTFLAAAGYPIGKSLYEADLIETAREIITVAKARGAEIPLPTDVVVAKQFLPGVTATVKTVDAIVADDLILDIGPQTARHYAALIETAATVVWNGPVGVFEFDAFSKGTEVLARAVAASSAFSIAGGGDTLAAIDKYGVADQISYISTGGGAFLEFLEGKTLPAVAALQARSG

SEQ ID NO: 10816 - DNA, 1899 bp, Brachydanio rerio
  CDS (36)..(1289)
cccgggagagttttgaggcacaaaccacaggcaaaatgtctctttcgaacaaacttcatttggacaaggtggacgtgaaaggaaagcgggtgatcatgagggtggacttcaatgtccctatgaagaacaatgtgatcacaaataaccagagaatcaaggctgcagtaccatctatccagcactgtttagataattgtgccaaagctgtggtcctgatgagccacttgggccggcctgatggagtccctatgccagacaaatactctctggagcctgtggctgcagaactcaagaacctgctgggaaaagacgttcagttcctgaaagactgtgtgggtccagatgtggagaaagcctgtgcagaccctcctgcaggatctgtcattctgctggagaatctgcgctttcatgtggctgaggagggcaagggcaaagatgcatcgggtaacaagaccaaagcaagtcaggcagagatcgatgctttccgagcctccctgtccaaactgggtgacgtatacgtcaacgatgctttcggaactgcacatagagctcacagctctatggttggagtgaatctccctcagaaggctgctggttttctgatgaagaaagagctagactactttgccatggcccttgagaaaccacagaggcctttcttggccatcctcggaggggccaaggtcaaagataagattcagctgatcaacaacatgttggacaaggtgaatgagatgatcattggtggaggaatggcctttaccttcctcaaggttctcaagaacatggagatcggcacttccctgtttgatgaagagggttccacaattgtgaaagatctcatggccaaagcagaaaagaatggtgtaaagatcacacttccagtcgactttatcactgcagacaaattcgatgagaaggcgacaacagggaccgcaacggtagcagaaggtattcctgctggctggatgggtctagactgtggtcctgagagctcaaagctctatgcagaggctgtggccagagccaagcagattgtgtggaacggacccgttggcgtgttcgagtgggacaactttgctcatggaaccaagaacatgatggacaaagttgtagaagcgaccaaaaatggctgcatcaccattatcggtgggggagacacagctacctgctgtgccaagtgggacactgaggacaaggtcagccatgtgagcacagggggcggagccagtctggagctgctggagggtaaagtgctgcccggtgtcgatgccctcagtaacgtataagtgctttaaggctcttctgccagaggttgagtgatcgtctcccaagaagctgtcatccttacttagcgctttgttcagcacttctgtcacctcttggggatgcaaatgacaactactccactctctatgaacggccaacagtacatgctagactctgacccatactctttcagtttgcttttcttctgtcaaattactttaagaagtttccatcggcaaatggctgacgttggcagcaattagttgtgatggctctatttgagagatgggtcgtttgttttaccggagtaagtgttaatgtgtgtcccactgtagtctgaatgtgcgctttcggtgtaaacggttgtgttgtaattctaaagtttattacctgatatttgtggccttcccacagatgttgagttgttgttgtaatactgtagacactttcctccccataatgcacttgtcatcctcgacctgcagcttgtgagatagatgtttcgcactggaattttaatgaggggctaatgttagacccagaccacctgtcgtaaagtaaaaactaaaataataataattaaaatacatattataaaaactgtcaaaaaaaaaaaaaaaaaaaaaaaaa

SEQ ID NO: 10817 - protein, 417 aa, Brachydanio rerio
MSLSNKLHLDKVDVKGKRVIMRVDFNVPMKNNVITNNQRIKAAVPSIQHCLDNCAKAVVLMSHLGRPDGVPMPDKYSLEPVAAELKNLLGKDVQFLKDCVGPDVEKACADPPAGSVILLENLRFHVAEEGKGKDASGNKTKASQAEIDAFRASLSKLGDVYVNDAFGTAHRAHSSMVGVNLPQKAAGFLMKKELDYFAMALEKPQRPFLAILGGAKVKDKIQLINNMLDKVNEMIIGGGMAFTFLKVLKNMEIGTSLFDEEGSTIVKDLMAKAEKNGVKITLPVDFITADKFDEKATTGTATVAEGIPAGWMGLDCGPESSKLYAEAVARAKQIVWNGPVGVFEWDNFAHGTKNMMDKVVEATKNGCITIIGGGDTATCCAKWDTEDKVSHVSTGGGASLELLEGKVLPGVDALSNV

SEQ ID NO: 10818 - DNA, 1296 bp, Methanococcus maripaludis
  CDS (1)..(1296)
atgttacaaagaacgaatttaaccaaatcgcgaaaaaacggaggaataataatgtttttaactcttgacgactttgaattggaaggaaaaacggttgcattgagagttgacattaatagccctattgatgttaatactggagatattttagatgatacaaggattaaggcatgcagtgatacgataaaaagtctttcagaaaaaggagcaaaggttgttattttagcacaccagagcaggcctggaaaaaaagattttacgactcttgaagctcacgcgaaaaaactgtccgaagtattaaatatggaagttacacacgtagatggattaatctgcgcgtctgcacgtgaagcaattcttgcaatggataatggggaaataatacttcttgaaaacgtaaggcttcttgcagaagaagttttatccgattggaagtcttgggaagaaattactccagaaaaacaggctaaaacagtcatgattaagaaattacatccttttttcgattattttgttaacgatgcatttgcagcagctcacagggctcaaccttctcttgttggattttcttactatgttccaatgttatgcggaagggtcatggaaaaagaattatttacacttacaaaagttctcaaaaaccctgaaagaccttgcgtgtttgcattgggtggtgcaaaagctgacgacagtattgaagtattgaaaaacgttcttgaaaaacagaccgccgatcaggttttaacaagtggtgttgttgcaaatatctttttagttgcaaaaggttacaaaatcgggccaaatgaaaatgtaattgctgacatgggatacaccaaccagatagaaattgcaaaagagttaatttcaaaatatggggacaaaatcgtggttccaatcgatgcagcattaaatgtcgatggtgaacgggttgaaaaagaactcgacttaaacgaagaaataacttaccctattcacgacatgggcgaaaaaaccatgaaactctacgaagaaattttaaaagatgcaaaaacggttgttgcaaacggacctgctggagttttcgaaaataaaaatttcttaaaaggaacagaagaacttttaaaaagcactgcaaattcaaaaggcttttcggttatcggtggaggacacctctcagcagctgccgaagttgtagggttggcaggaaaaatggaccacatcagcactggtggcggtgcatgtatcgaatttttagctggtaaaaaacttcctgtaattgaaatgctgtccaaatcttacgaaaaacataaactttaa

SEQ ID NO: 10819 - protein, 431 aa, Methanococcus maripaludis
MLQRTNLTKSRKNGGIIMFLTLDDFELEGKTVALRVDINSPIDVNTGDILDDTRIKACSDTIKSLSEKGAKVVILAHQSRPGKKDFTTLEAHAKKLSEVLNMEVTHVDGLICASAREAILAMDNGEIILLENVRLLAEEVLSDWKSWEEITPEKQAKTVMIKKLHPFFDYFVNDAFAAAHRAQPSLVGFSYYVPMLCGRVMEKELFTLTKVLKNPERPCVFALGGAKADDSIEVLKNVLEKQTADQVLTSGVVANIFLVAKGYKIGPNENVIADMGYTNQIEIAKELISKYGDKIVVPIDAALNVDGERVEKELDLNEEITYPIHDMGEKTMKLYEEILKDAKTVVANGPAGVFENKNFLKGTEELLKSTANSKGFSVIGGGHLSAAAEVVGLAGKMDHISTGGGACIEFLAGKKLPVIEMLSKSYEKHKL

SEQ ID NO: 10820 - DNA, 22 bp, Artificial sequence
  Primer sequence
atgtctgtaattaagatgaccg

SEQ ID NO: 10821 - DNA, 23 bp, Artificial sequence
  Primer sequence
ttacttcttagcgcgctcttcga

SEQ ID NO: 10822 - DNA, 2374 bp, Escherichia coli K12; identical to SEQ ID NO: 1805
  CDS (86)..(2281)

SEQ ID NO: 10823 - protein, 731 aa, Escherichia coli K12; identical to SEQ ID NO: 1806

SEQ ID NO: 10824 - DNA, 2961 bp, Hafnia alvei; identical to SEQ ID NO: 1807
  CDS (185)..(2404)

SEQ ID NO: 10825 - protein, 739 aa, Hafnia alvei; identical to SEQ ID NO: 1808

SEQ ID NO: 10826 - DNA, 4341 bp, Escherichia coli; identical to SEQ ID NO: 1809
  CDS (660)..(2858)

SEQ ID NO: 10827 - protein, 732 aa, Escherichia coli; identical to SEQ ID NO: 1810

SEQ ID NO: 10828 - DNA, 1850 bp, Bacillus subtilis; identical to SEQ ID NO: 1811
  CDS (312)..(1784)

SEQ ID NO: 10829 - protein, 490 aa, Bacillus subtilis; identical to SEQ ID NO: 1812

SEQ ID NO: 10830 - DNA, 3091 bp, Lactobacillus sp; identical to SEQ ID NO: 1813
  CDS (572)..(2767)

SEQ ID NO: 10831 - protein, 731 aa, Lactobacillus sp; identical to SEQ ID NO: 1814

SEQ ID NO: 10832 - DNA, 1449 bp, Bacillus halodurans; identical to SEQ ID NO: 1815
  CDS (1)..(1449)

SEQ ID NO: 10833 - protein, 482 aa, Bacillus halodurans; identical to SEQ ID NO: 1816

SEQ ID NO: 10834 - DNA, 2196 bp, Sinorhizobium meliloti; identical to SEQ ID NO: 1817
  CDS (1)..(2196)

SEQ ID NO: 10835 - protein, 731 aa, Sinorhizobium meliloti; identical to SEQ ID NO: 1818

SEQ ID NO: 10836 - DNA, 1380 bp, Listeria innocua; identical to SEQ ID NO: 1819
  CDS (1)..(1380)

SEQ ID NO: 10837 - protein, 459 aa, Listeria innocua; identical to SEQ ID NO: 1820

SEQ ID NO: 10838 - DNA, 2307 bp, Yersinia pestis; identical to SEQ ID NO: 1821
  CDS (1)..(2307)

SEQ ID NO: 10839 - protein, 768 aa, Yersinia pestis; identical to SEQ ID NO: 1822

SEQ ID NO: 10840 - DNA, 2145 bp, Salmonella enterica subsp. enterica serovar Typhi; identical to SEQ ID NO: 1823
  CDS (1)..(2145)

SEQ ID NO: 10841 - protein, 714 aa, Salmonella enterica subsp. enterica serovar Typhi; identical to SEQ ID NO: 1824

SEQ ID NO: 10842 - DNA, 1467 bp, Nostoc sp. PCC 7120; identical to SEQ ID NO: 1825
  CDS (1)..(1467)

SEQ ID NO: 10843 - protein, 488 aa, Nostoc sp. PCC 7120; identical to SEQ ID NO: 1826

SEQ ID NO: 10844 - DNA, 2163 bp, Yersinia pestis; identical to SEQ ID NO: 1827
  CDS (1)..(2163)

SEQ ID NO: 10845 - protein, 720 aa, Yersinia pestis; identical to SEQ ID NO: 1828

SEQ ID NO: 10846 - DNA, 2271 bp, Salmonella enterica subsp. enterica serovar Typhi; identical to SEQ ID NO: 1829
  CDS (1)..(2271)

SEQ ID NO: 10847 - protein, 756 aa, Salmonella enterica subsp. enterica serovar Typhi; identical to SEQ ID NO: 1830

SEQ ID NO: 10848 - DNA, 2148 bp, Escherichia coli; identical to SEQ ID NO: 1831
  CDS (1)..(2148)

SEQ ID NO: 10849 - protein, 715 aa, Escherichia coli; identical to SEQ ID NO: 1832

SEQ ID NO: 10850 - DNA, 2835 bp, Escherichia coli; identical to SEQ ID NO: 1833
  CDS (571)..(2712)

SEQ ID NO: 10851 - protein, 713 aa, Escherichia coli; identical to SEQ ID NO: 1834

SEQ ID NO: 10852 - DNA, 1446 bp, Clostridium acetobutylicum; identical to SEQ ID NO: 1835
  CDS (1)..(1446)

SEQ ID NO: 10853 - protein, 481 aa, Clostridium acetobutylicum; identical to SEQ ID NO: 1836

SEQ ID NO: 10854 - DNA, 1464 bp, Clostridium acetobutylicum; identical to SEQ ID NO: 1837
  CDS (1)..(1464)

SEQ ID NO: 10855 - protein, 487 aa, Clostridium acetobutylicum; identical to SEQ ID NO: 1838

SEQ ID NO: 10856 - DNA, 2256 bp, Pseudomonas aeruginosa; identical to SEQ ID NO: 1839
  CDS (1)..(2256)

SEQ ID NO: 10857 - protein, 751 aa, Pseudomonas aeruginosa; identical to SEQ ID NO: 1840

SEQ ID NO: 10858 - DNA, 2853 bp, Mycobacterium leprae; identical to SEQ ID NO: 1841
  CDS (1)..(2853)

SEQ ID NO: 10859 - protein, 950 aa, Mycobacterium leprae; identical to SEQ ID NO: 1842

SEQ ID NO: 10860 - DNA, 2202 bp, Vibrio cholerae; identical to SEQ ID NO: 1843
  CDS (1)..(2202)

SEQ ID NO: 10861 - protein, 733 aa, Vibrio cholerae; identical to SEQ ID NO: 1844

SEQ ID NO: 10862 - DNA, 2163 bp, Vibrio cholerae; identical to SEQ ID NO: 1845
  CDS (1)..(2163)

SEQ ID NO: 10863 - protein, 720 aa, Vibrio cholerae; identical to SEQ ID NO: 1846

SEQ ID NO: 10864 - DNA, 2163 bp, Haemophilus influenzae; identical to SEQ ID NO: 1847
  CDS (1)..(2163)

SEQ ID NO: 10865 - protein, 720 aa, Haemophilus influenzae; identical to SEQ ID NO: 1848

SEQ ID NO: 10866 - DNA, 2844 bp, Mycobacterium tuberculosis; identical to SEQ ID NO: 1849
  CDS (1)..(2844)

SEQ ID NO: 10867 - protein, 947 aa, Mycobacterium tuberculosis; identical to SEQ ID NO: 1850

SEQ ID NO: 10868 - DNA, 1476 bp, Streptococcus pneumoniae; identical to SEQ ID NO: 1851
  CDS (1)..(1476)

SEQ ID NO: 10869 - protein, 491 aa, Streptococcus pneumoniae; identical to SEQ ID NO: 1852

SEQ ID NO: 10870 - DNA, 1476 bp, Bacillus halodurans; identical to SEQ ID NO: 1853
  CDS (1)..(1476)

SEQ ID NO: 10871 - protein, 491 aa, Bacillus halodurans; identical to SEQ ID NO: 1854

SEQ ID NO: 10872 - DNA, 2349 bp, Sinorhizobium meliloti; identical to SEQ ID NO: 1855
  CDS (1)..(2349)

SEQ ID NO: 10873 - protein, 782 aa, Sinorhizobium meliloti; identical to SEQ ID NO: 1856

SEQ ID NO: 10874 - DNA, 1476 bp, Streptococcus pneumoniae; identical to SEQ ID NO: 1857
  CDS (1)..(1476)

SEQ ID NO: 10875 - protein, 491 aa, Streptococcus pneumoniae; identical to SEQ ID NO: 1858

SEQ ID NO: 10876 - DNA, 2271 bp, Escherichia coli; identical to SEQ ID NO: 1859
  CDS (1)..(2271)

SEQ ID NO: 10877 - protein, 756 aa, Escherichia coli; identical to SEQ ID NO: 1860

SEQ ID NO: 10878 - DNA, 1443 bp, Bacillus subtilis; identical to SEQ ID NO: 1861
  CDS (1)..(1443)

SEQ ID NO: 10879 - protein, 480 aa, Bacillus subtilis; identical to SEQ ID NO: 1862

SEQ ID NO: 10880 - DNA, 1452 bp, Synechocystis sp; identical to SEQ ID NO: 1863
  CDS (1)..(1452)

SEQ ID NO: 10881 - protein, 483 aa, Synechocystis sp; identical to SEQ ID NO: 1864

SEQ ID NO: 10882 - DNA, 2307 bp, Yersinia pseudotuberculosis IP 32953; identical to SEQ ID NO: 1865
  CDS (1)..(2307)

SEQ ID NO: 10883 - protein, 768 aa, Yersinia pseudotuberculosis IP 32953; identical to SEQ ID NO: 1866

SEQ ID NO: 10884 - DNA, 1467 bp, Symbiobacterium thermophilum; identical to SEQ ID NO: 1867
  CDS (1)..(1467)

SEQ ID NO: 10885 - protein, 488 aa, Symbiobacterium thermophilum; identical to SEQ ID NO: 1868

SEQ ID NO: 10886 - DNA, 1410 bp, Symbiobacterium thermophilum; identical to SEQ ID NO: 1869
  CDS (1)..(1410)

SEQ ID NO: 10887 - protein, 469 aa, Symbiobacterium thermophilum; identical to SEQ ID NO: 1870

SEQ ID NO: 10888 - DNA, 2154 bp, Erwinia carotovora; identical to SEQ ID NO: 1871
  CDS (1)..(2154)

SEQ ID NO: 10889 - protein, 717 aa, Erwinia carotovora; identical to SEQ ID NO: 1872

SEQ ID NO: 10890 - DNA, 2790 bp, Acinetobacter sp; identical to SEQ ID NO: 1873
  CDS (1)..(2790)

SEQ ID NO: 10891 - protein, 929 aa, Acinetobacter sp; identical to SEQ ID NO: 1874

SEQ ID NO: 10892 - DNA, 1482 bp, Bacillus thuringiensis; identical to SEQ ID NO: 1875
  CDS (1)..(1482)

SEQ ID NO: 10893 - protein, 493 aa, Bacillus thuringiensis; identical to SEQ ID NO: 1876

SEQ ID NO: 10894 - DNA, 1422 bp, Bacillus thuringiensis; identical to SEQ ID NO: 1877
  CDS (1)..(1422)

SEQ ID NO: 10895 - protein, 473 aa, Bacillus thuringiensis; identical to SEQ ID NO: 1878

SEQ ID NO: 10896 - DNA, 2358 bp, Rhodopseudomonas palustris; identical to SEQ ID NO: 1879
  CDS (1)..(2358)

SEQ ID NO: 10897 - protein, 785 aa, Rhodopseudomonas palustris; identical to SEQ ID NO: 1880

SEQ ID NO: 10898 - DNA, 2837 bp, Shigella boydii; identical to SEQ ID NO: 1881
  CDS (165)..(2435)

SEQ ID NO: 10899 - protein, 756 aa, Shigella boydii; identical to SEQ ID NO: 1882

SEQ ID NO: 10900 - DNA, 1380 bp, Listeria monocytogenes; identical to SEQ ID NO: 1883
  CDS (1)..(1380)

SEQ ID NO: 10901 - protein, 459 aa, Listeria monocytogenes; identical to SEQ ID NO: 1884

SEQ ID NO: 10902 - DNA, 1482 bp, Bacillus cereus; identical to SEQ ID NO: 1885
  CDS (1)..(1482)

SEQ ID NO: 10903 - protein, 493 aa, Bacillus cereus; identical to SEQ ID NO: 1886

SEQ ID NO: 10904 - DNA, 1422 bp, Bacillus cereus; identical to SEQ ID NO: 1887
  CDS (1)..(1422)

SEQ ID NO: 10905 - protein, 473 aa, Bacillus cereus; identical to SEQ ID NO: 1888

SEQ ID NO: 10906 - DNA, 1458 bp, Mycobacterium paratuberculosis; identical to SEQ ID NO: 1889
  CDS (1)..(1458)

SEQ ID NO: 10907 - protein, 485 aa, Mycobacterium paratuberculosis; identical to SEQ ID NO: 1890

SEQ ID NO: 10908 - DNA, 2853 bp, Mycobacterium paratuberculosis; identical to SEQ ID NO: 1891
  CDS (1)..(2853)

SEQ ID NO: 10909 - protein, 950 aa, Mycobacterium paratuberculosis; identical to SEQ ID NO: 1892

SEQ ID NO: 10910 - DNA, 2100 bp, Lactobacillus johnsonii; identical to SEQ ID NO: 1893
  CDS (1)..(2100)

SEQ ID NO: 10911 - protein, 699 aa, Lactobacillus johnsonii; identical to SEQ ID NO: 1894

SEQ ID NO: 10912 - DNA, 3625 bp, Vibrio parahaemolyticus; identical to SEQ ID NO: 1895
  CDS (1451)..(3625)

SEQ ID NO: 10913 - protein, 724 aa, Vibrio parahaemolyticus; identical to SEQ ID NO: 1896

SEQ ID NO: 10914 - DNA, 2142 bp, Shigella flexneri; identical to SEQ ID NO: 1897
  CDS (1)..(2142)

SEQ ID NO: 10915 - protein, 713 aa, Shigella flexneri; identical to SEQ ID NO: 1898

SEQ ID NO: 10916 - DNA, 2181 bp, Vibrio vulnificus; identical to SEQ ID NO: 1899
  CDS (1)..(2181)

SEQ ID NO: 10917 - protein, 726 aa, Vibrio vulnificus; identical to SEQ ID NO: 1900

SEQ ID NO: 10918 - DNA, 2307 bp, Photorhabdus luminescens; identical to SEQ ID NO: 1901
  CDS (1)..(2307)

SEQ ID NO: 10919 - protein, 768 aa, Photorhabdus luminescens; identical to SEQ ID NO: 1902

SEQ ID NO: 10920 - DNA, 1404 bp, Gloeobacter violaceus; identical to SEQ ID NO: 1903
  CDS (1)..(1404)

SEQ ID NO: 10921 - protein, 467 aa, Gloeobacter violaceus; identical to SEQ ID NO: 1904

SEQ ID NO: 10922 - DNA, 2259 bp, Chromobacterium violaceum; identical to SEQ ID NO: 1905
  CDS (1)..(2259)

SEQ ID NO: 10923 - protein, 752 aa, Chromobacterium violaceum; identical to SEQ ID NO: 1906

SEQ ID NO: 10924 - DNA, 1251 bp, Chromobacterium violaceum; identical to SEQ ID NO: 1907
  CDS (1)..(1251)

SEQ ID NO: 10925 - protein, 416 aa, Chromobacterium violaceum; identical to SEQ ID NO: 1908

SEQ ID NO: 10926 - DNA, 2352 bp, Fusobacterium nucleatum subsp; identical to SEQ ID NO: 1909
  CDS (1)..(2352)

SEQ ID NO: 10927 - protein, 783 aa, Fusobacterium nucleatum subsp; identical to SEQ ID NO: 1910

SEQ ID NO: 10928 - DNA, 2196 bp, Shigella flexneri; identical to SEQ ID NO: 1911
  CDS (1)..(2196)

SEQ ID NO: 10929 - protein, 731 aa, Shigella flexneri; identical to SEQ ID NO: 1912

SEQ ID NO: 10930 - DNA, 2271 bp, Bordetella pertussis; identical to SEQ ID NO: 1913
  CDS (1)..(2271)

SEQ ID NO: 10931 - protein, 756 aa, Bordetella pertussis; identical to SEQ ID NO: 1914

SEQ ID NO: 10932 - DNA, 2271 bp, Bordetella parapertussis; identical to SEQ ID NO: 1915
  CDS (1)..(2271)

SEQ ID NO: 10933 - protein, 756 aa, Bordetella parapertussis; identical to SEQ ID NO: 1916

SEQ ID NO: 10934 - DNA, 1422 bp, Bacillus cereus; identical to SEQ ID NO: 1917
  CDS (1)..(1422)

SEQ ID NO: 10935 - protein, 473 aa, Bacillus cereus; identical to SEQ ID NO: 1918

SEQ ID NO: 10936 - DNA, 1422 bp, Bacillus anthracis; identical to SEQ ID NO: 1919
  CDS (1)..(1422)

SEQ ID NO: 10937 - protein, 473 aa, Bacillus anthracis; identical to SEQ ID NO: 1920

SEQ ID NO: 10938 - DNA, 2271 bp, Shigella flexneri; identical to SEQ ID NO: 1921
  CDS (1)..(2271)

SEQ ID NO: 10939 - protein, 756 aa, Shigella flexneri; identical to SEQ ID NO: 1922

SEQ ID NO: 10940 - DNA, 2136 bp, Shigella flexneri; identical to SEQ ID NO: 1923
  CDS (1)..(2136)

SEQ ID NO: 10941 - protein, 711 aa, Shigella flexneri; identical to SEQ ID NO: 1924

SEQ ID NO: 10942 - DNA, 2127 bp, Escherichia coli; identical to SEQ ID NO: 1925
  CDS (1)..(2127)

SEQ ID NO: 10943 - protein, 708 aa, Escherichia coli; identical to SEQ ID NO: 1926

SEQ ID NO: 10944 - DNA, 1563 bp, Oryza sativa; identical to SEQ ID NO: 1927
  CDS (1)..(1563)

SEQ ID NO: 10945 - protein, 520 aa, Oryza sativa; identical to SEQ ID NO: 1928

SEQ ID NO: 10946 - DNA, 2181 bp, Vibrio parahaemolyticus; identical to SEQ ID NO: 1929
  CDS (1)..(2181)

SEQ ID NO: 10947 - protein, 726 aa, Vibrio parahaemolyticus; identical to SEQ ID NO: 1930

SEQ ID NO: 10948 - DNA, 4026 bp, Vibrio parahaemolyticus; identical to SEQ ID NO: 1931
  CDS (1779)..(3914)

SEQ ID NO: 10949 - protein, 711 aa, Vibrio parahaemolyticus; identical to SEQ ID NO: 1932

SEQ ID NO: 10950 - DNA, 1461 bp, Clostridium tetani; identical to SEQ ID NO: 1933
  CDS (1)..(1461)

SEQ ID NO: 10951 - protein, 486 aa, Clostridium tetani; identical to SEQ ID NO: 1934

SEQ ID NO: 10952 - DNA, 1416 bp, Clostridium tetani; identical to SEQ ID NO: 1935
  CDS (1)..(1416)

SEQ ID NO: 10953 - protein, 471 aa, Clostridium tetani; identical to SEQ ID NO: 1936

SEQ ID NO: 10954 - DNA, 2766 bp, Bradyrhizobium japonicum; identical to SEQ ID NO: 1937
  CDS (1)..(2766)

SEQ ID NO: 10955 - protein, 921 aa, Bradyrhizobium japonicum; identical to SEQ ID NO: 1938

SEQ ID NO: 10956 - DNA, 2517 bp, Bradyrhizobium japonicum; identical to SEQ ID NO: 1939
  CDS (1)..(2517)

SEQ ID NO: 10957 - protein, 838 aa, Bradyrhizobium japonicum; identical to SEQ ID NO: 1940

SEQ ID NO: 10958 - DNA, 2181 bp, Vibrio vulnificus; identical to SEQ ID NO: 1941
  CDS (1)..(2181)

SEQ ID NO: 10959 - protein, 726 aa, Vibrio vulnificus; identical to SEQ ID NO: 1942

SEQ ID NO: 10960 - DNA, 2109 bp, Vibrio vulnificus; identical to SEQ ID NO: 1943
  CDS (1)..(2109)

SEQ ID NO: 10961 - protein, 702 aa, Vibrio vulnificus; identical to SEQ ID NO: 1944

SEQ ID NO: 10962 - DNA, 2163 bp, Shewanella oneidensis; identical to SEQ ID NO: 1945
  CDS (1)..(2163)

SEQ ID NO: 10963 - protein, 720 aa, Shewanella oneidensis; identical to SEQ ID NO: 1946

SEQ ID NO: 10964 - DNA, 1419 bp, Oceanobacillus iheyensis; identical to SEQ ID NO: 1947
  CDS (1)..(1419)

SEQ ID NO: 10965 - protein, 472 aa, Oceanobacillus iheyensis; identical to SEQ ID NO: 1948

SEQ ID NO: 10966 - DNA, 2154 bp, Escherichia coli O6; identical to SEQ ID NO: 1949
  CDS (1)..(2154)

SEQ ID NO: 10967 - protein, 717 aa, Escherichia coli O6; identical to SEQ ID NO: 1950

SEQ ID NO: 10968 - DNA, 2271 bp, Escherichia coli O6; identical to SEQ ID NO: 1951
  CDS (1)..(2271)

SEQ ID NO: 10969 - protein, 756 aa, Escherichia coli O6; identical to SEQ ID NO: 1952

SEQ ID NO: 10970 - DNA, 2370 bp, Escherichia coli O6; identical to SEQ ID NO: 1953
  CDS (1)..(2370)

SEQ ID NO: 10971 - protein, 789 aa, Escherichia coli O6; identical to SEQ ID NO: 1954

SEQ ID NO: 10972 - DNA, 2136 bp, Escherichia coli O6; identical to SEQ ID NO: 1955
  CDS (1)..(2136)

SEQ ID NO: 10973 - protein, 711 aa, Escherichia coli O6; identical to SEQ ID NO: 1956

SEQ ID NO: 10974 - DNA, 2208 bp, Escherichia coli O6; identical to SEQ ID NO: 1957
  CDS (1)..(2208)

SEQ ID NO: 10975 - protein, 735 aa, Escherichia coli O6; identical to SEQ ID NO: 1958

SEQ ID NO: 10976 - DNA, 2142 bp, Escherichia coli O6; identical to SEQ ID NO: 1959
  CDS (1)..(2142)

SEQ ID NO: 10977 - protein, 713 aa, Escherichia coli O6; identical to SEQ ID NO: 1960

SEQ ID NO: 10978 - DNA, 1488 bp, Thermoanaerobacter tengcongensis; identical to SEQ ID NO: 1961
  CDS (1)..(1488)

SEQ ID NO: 10979 - protein, 495 aa, Thermoanaerobacter tengcongensis; identical to SEQ ID NO: 1962

SEQ ID NO: 10980 - DNA, 1419 bp, Thermoanaerobacter tengcongensis; identical to SEQ ID NO: 1963
  CDS (1)..(1419)

SEQ ID NO: 10981 - protein, 472 aa, Thermoanaerobacter tengcongensis; identical to SEQ ID NO: 1964

SEQ ID NO: 10982 - DNA, 2352 bp, Fusobacterium nucleatum; identical to SEQ ID NO: 1965
  CDS (1)..(2352)

SEQ ID NO: 10983 - protein, 783 aa, Fusobacterium nucleatum; identical to SEQ ID NO: 1966

SEQ ID NO: 10984 - DNA, 1431 bp, Clostridium perfringens; identical to SEQ ID NO: 1967
  CDS (1)..(1431)

SEQ ID NO: 10985 - protein, 476 aa, Clostridium perfringens; identical to SEQ ID NO: 1968

SEQ ID NO: 10986 - DNA, 1455 bp, Clostridium perfringens; identical to SEQ ID NO: 1969
  CDS (1)..(1455)

SEQ ID NO: 10987 - protein, 484 aa, Clostridium perfringens; identical to SEQ ID NO: 1970

SEQ ID NO: 10988 - DNA, 2280 bp, Ralstonia solanacearum; identical to SEQ ID NO: 1971
  CDS (1)..(2280)

SEQ ID NO: 10989 - protein, 759 aa, Ralstonia solanacearum; identical to SEQ ID NO: 1972

SEQ ID NO: 10990 - DNA, 2271 bp, Salmonella typhimurium; identical to SEQ ID NO: 1973
  CDS (1)..(2271)

SEQ ID NO: 10991 - protein, 756 aa, Salmonella typhimurium; identical to SEQ ID NO: 1974

SEQ ID NO: 10992 - DNA, 2136 bp, Salmonella typhimurium; identical to SEQ ID NO: 1975
  CDS (1)..(2136)

SEQ ID NO: 10993 - protein, 711 aa, Salmonella typhimurium; identical to SEQ ID NO: 1976

SEQ ID NO: 10994 - DNA, 2199 bp, Salmonella typhimurium; identical to SEQ ID NO: 1977
  CDS (1)..(2199)

SEQ ID NO: 10995 - protein, 732 aa, Salmonella typhimurium; identical to SEQ ID NO: 1978

SEQ ID NO: 10996 - DNA, 2142 bp, Salmonella typhimurium; identical to SEQ ID NO: 1979
  CDS (1)..(2142)

SEQ ID NO: 10997 - protein, 713 aa, Salmonella typhimurium; identical to SEQ ID NO: 1980

SEQ ID NO: 10998 - DNA, 2136 bp, Vibrio vulnificus; identical to SEQ ID NO: 1981
  CDS (1)..(2136)

SEQ ID NO: 10999 - protein, 711 aa, Vibrio vulnificus; identical to SEQ ID NO: 1982

SEQ ID NO: 11000 - DNA, 2163 bp, Pasteurella multocida; identical to SEQ ID NO: 1983
  CDS (1)..(2163)

SEQ ID NO: 11001 - protein, 720 aa, Pasteurella multocida; identical to SEQ ID NO: 1984

SEQ ID NO: 11002 - DNA, 2139 bp, Moritella japonica; identical to SEQ ID NO: 1985
  CDS (1)..(2139)

SEQ ID NO: 11003 - protein, 712 aa, Moritella japonica; identical to SEQ ID NO: 1986

SEQ ID NO: 11004 - DNA, 1479 bp, Streptomyces coelicolor; identical to SEQ ID NO: 1987
  CDS (1)..(1479)

SEQ ID NO: 11005 - protein, 492 aa, Streptomyces coelicolor; identical to SEQ ID NO: 1988

SEQ ID NO: 11006 - DNA, 2130 bp, Eikenella corrodens; identical to SEQ ID NO: 1989
  CDS (1)..(2130)

SEQ ID NO: 11007 - protein, 709 aa, Eikenella corrodens; identical to SEQ ID NO: 1990

SEQ ID NO: 11008 - DNA, 2271 bp, Escherichia coli; identical to SEQ ID NO: 1859
  CDS (4)..(2271)

SEQ ID NO: 11009 - protein, 755 aa, Escherichia coli; identical to SEQ ID NO: 1992

SEQ ID NO: 11010 - DNA, 2196 bp, Lactobacillus sp; identical to SEQ ID NO: 1993
  CDS (1)..(2196)

SEQ ID NO: 11011 - protein, 731 aa, Lactobacillus sp; identical to SEQ ID NO: 1814

SEQ ID NO: 11012 - DNA, 1482 bp, Bacillus anthracis; identical to SEQ ID NO: 1995
  CDS (1)..(1482)

SEQ ID NO: 11013 - protein, 493 aa, Bacillus anthracis; identical to SEQ ID NO: 1996

SEQ ID NO: 11014 - DNA, 1383 bp, Bacillus cereus; identical to SEQ ID NO: 1997
  CDS (1)..(1383)

SEQ ID NO: 11015 - protein, 460 aa, Bacillus cereus; identical to SEQ ID NO: 1998

SEQ ID NO: 11016 - DNA, 20 bp, Artificial sequence
  Primer sequence
atggggcagggttttccacc

SEQ ID NO: 11017 - DNA, 25 bp, Artificial sequence
  Primer sequence
ttacttcaacacataaccgtacaac

SEQ ID NO: 11018 - DNA, 2280 bp, Escherichia coli K12
  CDS (470)..(1951)
gctgcatcagcacgaaattcttaaagccctggttacgtaccagtgacataccgataactgacgtgaatataaccagcacgagggtcagcaatacccccaatacatgggcaacctgaataaagattgaaatctcaatatagacataaaggaaaatggcaataaaaggtaaccagcgcaaaggtttctcctgtaatagcagccggttaaccccggctacctgaatgggttgcgaatcgcgtttagcttatattgtggtcattagcaaaatttcaagatgtttgcgcaactatttttggtagtaatcccaaagcggtgatctatttcacaaattaataattaaggggtaaaaaccgacacttaaagtgatccagattacggtagaaatcctcaagcagcatatgatctcgggtattcggtcgatgcaggggataatcgtcggtcgaaaaacattcgaaaccacatatattctatgtgtttaaagcaaatcattggcagcttgaaaaagaaggttcacatgtcaaacaacattcgtatcgaagaagatctgttgggtaccagggaagttccagctgatgcctactatggtgttcacactctgagagcgattgaaaacttctatatcagcaacaacaaaatcagtgatattcctgaatttgttcgcggtatggtaatggttaaaaaagccgcagctatggcaaacaaagagctgcaaaccattcctaaaagtgtagcgaatgccatcattgccgcatgtgatgaagtcctgaacaacggaaaatgcatggatcagttcccggtagacgtctaccagggcggcgcaggtacttccgtaaacatgaacaccaacgaagtgctggccaatatcggtctggaactgatgggtcaccaaaaaggtgaatatcagtacctgaacccgaacgaccatgttaacaaatgtcagtccactaacgacgcctacccgaccggtttccgtatcgcagtttactcttccctgattaagctggtagatgcgattaaccaactgcgtgaaggctttgaacgtaaagctgtcgaattccaggacatcctgaaaatgggtcgtacccagctgcaggacgcagtaccgatgaccctcggtcaggaattccgcgctttcagcatcctgctgaaagaagaagtgaaaaacatccaacgtaccgctgaactgctgctggaagttaaccttggtgcaacagcaatcggtactggtctgaacacgccgaaagagtactctccgctggcagtgaaaaaactggctgaagttactggcttcccatgcgtaccggctgaagacctgatcgaagcgacctctgactgcggcgcttatgttatggttcacggcgcgctgaaacgcctggctgtgaagatgtccaaaatctgtaacgacctgcgcttgctctcttcaggcccacgtgccggcctgaacgagatcaacctgccggaactgcaggcgggctcttccatcatgccagctaaagtaaacccggttgttccggaagtggttaaccaggtatgcttcaaagtcatcggtaacgacaccactgttaccatggcagcagaagcaggtcagctgcagttgaacgttatggagccggtcattggccaggccatgttcgaatccgttcacattctgaccaacgcttgctacaacctgctggaaaaatgcattaacggcatcactgctaacaaagaagtgtgcgaaggttacgtttacaactctatcggtatcgttacttacctgaacccgttcatcggtcaccacaacggtgacatcgtgggtaaaatctgtgccgaaaccggtaagagtgtacgtgaagtcgttctggaacgcggtctgttgactgaagcggaacttgacgatattttctccgtacagaatctgatgcacccggcttacaaagcaaaacgctatactgatgaaagcgaacagtaatcgtacagggtagtacaaataaaaaaggcacgtcagatgacgtgccttttttcttgtgagcagtaacttaaaaataacaatctaatatcaacttgttaaaaaacaaggaaggctaatatgctagttgtagaactcatcatagttttgctggcgatcttcttgggcgccagattggggggaataggtattggttttgcaggcggattgggggtgctggttcttgccgctattggcgttaaacccggtaacatcccgttcgatgtcatctccattatcatggcggttatcgccgctatttctgccatgcaggttgctggcggtctggacta

SEQ ID NO: 11019 - protein, 493 aa, Escherichia coli K12
MCLKQIIGSLKKKVHMSNNIRIEEDLLGTREVPADAYYGVHTLRAIENFYISNNKISDIPEFVRGMVMVKKAAAMANKELQTIPKSVANAIIAACDEVLNNGKCMDQFPVDVYQGGAGTSVNMNTNEVLANIGLELMGHQKGEYQYLNPNDHVNKCQSTNDAYPTGFRIAVYSSLIKLVDAINQLREGFERKAVEFQDILKMGRTQLQDAVPMTLGQEFRAFSILLKEEVKNIQRTAELLLEVNLGATAIGTGLNTPKEYSPLAVKKLAEVTGFPCVPAEDLIEATSDCGAYVMVHGALKRLAVKMSKICNDLRLLSSGPRAGLNEINLPELQAGSSIMPAKVNPVVPEVVNQVCFKVIGNDTTVTMAAEAGQLQLNVMEPVIGQAMFESVHILTNACYNLLEKCINGITANKEVCEGYVYNSIGIVTYLNPFIGHHNGDIVGKICAETGKSVREVVLERGLLTEAELDDIFSVQNLMHPAYKAKRYTDESEQ

SEQ ID NO: 11020 - DNA, 1770 bp, Arabidopsis thaliana
  CDS (84)..(1559)
gtcgccacgcgccgacttgatccgtcgtcttctctcagtctccatctccgtcttccaagttttactgtcaggcagaagaatccatgtcgatttacgtcgcgtcggcactctccggcggaacaactgtgacggcgctgcgttatgccacctctctgagatcttattcgacctcgtttagggaggagagggacaccttcgggccgattcaagttccttccgataaattgtggggagcccagacgcagagatcgctgcagaacttcgaaatcggtggtgagcgcgagcgcatgcctgaaccaattgtccgcgcttttggcgtcttgaagaaatgcgctgccaaggttaacatggaatacggtcttgatccgacgattgggaaagcaattatgcaagctgctcaggaagtagctgagggaaagctcaatgatcatttcccccttgttgtctggcaaactggtagtgggactcagagtaatatgaatgctaatgaggtcattgctaatagagcagctgagattcttggtcgcaaacgtggtgagaaatgtgtgcacccaaatgaccatgtgaacagatcacaatcttctaacgacacttttcctaccgtcatgcacattgcagctgcaaccgagattaattcgaggctcatccctagtttaaaaactttgcatcgcactttggaatctaagtccttcgagttcaaagatattgtgaaaattggaagaactcacactcaagatgctacacctttgacactaggacaggaatttggtggctatgctactcaagttaagtacggactaaatagagtcacctgcactcttcctcgcctctatcagcttgcacaaggtggaactgcggttgggacaggattaaacactaagaaagggtttgatgtaaagatagctgctgcagtagctgaagaaacaaacttgccatttgtcactgcagaaaacaagtttgaagctctggctgcacacgatgcttgtgttgaaaccagtgggtcacttaacacaatcgccacatcgctgatgaagatcgccaatgatatacgttttcttggaagtggcccaagatgtggtcttggtgaacttgtactacctgaaaatgagccaggaagcagtatcatgcctgggaaggtaaatcctacacagtgtgaggccttgactatggtttgtgcacaggttatgggaaaccatgtagctgtgacagttggtgggtcaaatggtcatttcgaattgaatgtattcaagccggtgacgtcgagtgctcttttacattccgtcagattaatagcagatgcttcagcttcgttcgagaaaaactgtgtgaggggcattgaggccaacagagaaaggatctcaaagctattgcacgagtctcttatgcttgtgacatcattgaatcggaaaatcgggtgtgacaatgctgcagcagttgccaagaaagctcacaaagaaggatgtacattgaaggaagcggctctgaatttaggcgtgcttactgcggaagagtttgatacacttgttgttcctgagaagatgattggtccctccgattgatagttgtttttggagccaaagcttcaagtaccattattcttctgatgcttttatttaggttataataaaaatgagcaaatccagaaacaattcaaattttcttgggagggcaacattgttcttcatcttacggctaaactatgatcttctttatgtatcaattttttttttgtgttgaataagagagtgagtactcagcgagaagaatttc

SEQ ID NO: 11021 - protein, 491 aa, Arabidopsis thaliana
MSIYVASALSGGTTVTALRYATSLRSYSTSFREERDTFGPIQVPSDKLWGAQTQRSLQNFEIGGERERMPEPIVRAFGVLKKCAAKVNMEYGLDPTIGKAIMQAAQEVAEGKLNDHFPLVVWQTGSGTQSNMNANEVIANRAAEILGRKRGEKCVHPNDHVNRSQSSNDTFPTVMHIAAATEINSRLIPSLKTLHRTLESKSFEFKDIVKIGRTHTQDATPLTLGQEFGGYATQVKYGLNRVTCTLPRLYQLAQGGTAVGTGLNTKKGFDVKIAAAVAEETNLPFVTAENKFEALAAHDACVETSGSLNTIATSLMKIANDIRFLGSGPRCGLGELVLPENEPGSSIMPGKVNPTQCEALTMVCAQVMGNHVAVTVGGSNGHFELNVFKPVTSSALLHSVRLIADASASFEKNCVRGIEANRERISKLLHESLMLVTSLNRKIGCDNAAAVAKKAHKEGCTLKEAALNLGVLTAEEFDTLVVPEKMIGPSD

SEQ ID NO: 11022 - DNA, 1512 bp, Arabidopsis thaliana
  CDS (1)..(1479)
atgtcgatttacgtcgcgtcgcgacggctctccggcggaacaactgtgacggcgctgcgttatgccacctctctgagatcttattcgacctcgtttagggaggagagggacaccttcgggccgattcaagttccttccgataaattgtggggagcccagacgcagagatcgctgcagaacttcgaaatcggtggtgagcgcgagcgaatgcctgaaccaattgtccgcgcttttggcgtcttgaagaaatgcgctgccaaggttaacatggaatacggtcttgatccgacgattgggaaagcaattatgcaagctgctcaggaagtagctgagggaaagctcaatgatcatttcccccttgttgtctggcaaactggtagtgggactcagagtaatatgaatgctaatgaggtcattgctaatagagcagctgagattcttggtcgcaaacgtggtgagaaatgtgtgcacccaaatgaccatgtgaacagatcacaatcttctaacgacacttttcctaccgtcatgcacattgcagctgcaaccgagattaattcgaggctcatccctagtttaaaaactttgcatagcactttggaatctaagtccttcgagttcaaagatattgtgaaaattggaagaactcacactcaagatgctacacctttgacactaggacaagaatttggtggctatgctactcaagttaagtatggactaaatagagtcacctgcactcttcctcgcctctatcagcttgcacaaggtggaactgcggttgggacaggattaaacactaagaaagggtttgatgtaaagatagctgctgcagtagctgaagaaacaaacttgccatttgtcactgcagaaaacaagtttgaagctctggctgcacacgatgcttgtgttgaaaccagtgggtcacttaacacaatcgccacatcgctgatgaagatcgccaatgatatacgttttcttggaagtggcccaagatgtggtcttggtgaacttgtactacctgaaaatgagccaggaagcagtatcatgcctgggaaggtaaatcctacacagtgtgaggccttgactatggtttgtgcacaggttatgggaaaccatgtagctgtgacagttggtgggtcaaatggtcatttcgaattgaatgtattcaagccggtgatcgcgagtgctcttttacattccgtcagattaatagcagatgcttcagcttcgttcgagaaaaactgtgtgaggggcattgaggccaacagagaaagaatctcaaagctattgcacgagtctcttatgcttgtgacatcattgaatccgaaaatcgggtatgacaatgctgcagcagttgccaagaaagctcacaaagaaggatgtacattgaaggaagcggctctgaatttaggcgtgcttactgcggaagagtttgatacacttgttgttcctgagaagatgattggtccctccgattgatagttgtttttggagccaaagcttcaagtacca

SEQ ID NO: 11023 - protein, 492 aa, Arabidopsis thaliana
MSIYVASRRLSGGTTVTALRYATSLRSYSTSFREERDTFGPIQVPSDKLWGAQTQRSLQNFEIGGERERMPEPIVRAFGVLKKCAAKVNMEYGLDPTIGKAIMQAAQEVAEGKLNDHFPLVVWQTGSGTQSNMNANEVIANRAAEILGRKRGEKCVHPNDHVNRSQSSNDTFPTVMHIAAATEINSRLIPSLKTLHSTLESKSFEFKDIVKIGRTHTQDATPLTLGQEFGGYATQVKYGLNRVTCTLPRLYQLAQGGTAVGTGLNTKKGFDVKIAAAVAEETNLPFVTAENKFEALAAHDACVETSGSLNTIATSLMKIANDIRFLGSGPRCGLGELVLPENEPGSSIMPGKVNPTQCEALTMVCAQVMGNHVAVTVGGSNGHFELNVFKPVIASALLHSVRLIADASASFEKNCVRGIEANRERISKLLHESLMLVTSLNPKIGYDNAAAVAKKAHKEGCTLKEAALNLGVLTAEEFDTLVVPEKMIGPSD

SEQ ID NO: 11024 - DNA, 1500 bp, Arabidopsis thaliana
  CDS (1)..(1500)
atggccgctttgacaatgcagtttgaaggagagaagaaaaacgtatccgaagttgcagacgtaaccctcaagcaagaagatgaacaacaagaacgtagatcttattcgacgccgtttagggaagagagagacacctttggcccgatccaagttccttccgataaattatggggagcacagacgcagagatcgcttcagaacttcgagattggtggtgaccgcgagcgaatgcccgaaccaatcgtccgagcttttggtgtcttgaagaaatgtgctgccaaggttaacatggagtatggtcttgatccaatgattggggaagccataatggaagctgcacaagaagtagcagaaggaaagctcaatgatcatttccctcttgttgtatggcaaactggtagtgggacgcagagtaatatgaatgctaatgaggtcattgccaatagagcagctgagattcttggtcacaaacgtggtgaaaaaattgtgcacccaaatgaccatgtgaacagatcacaatcttctaatgacacttttccaactgtcatgcacattgcagctgcaaccgagattacttcgaggctaatccctagtttgaaaaatttgcatagctctttggaatctaagtccttcgagtttaaagatatagtgaaaatcggaagaactcatactcaagatgctacacctttgacattaggacaagaatttggtggctatgctactcaagttgagtatggacttaatagagtcgcatgtactctaccccgcatctatcagcttgcacaaggtggaactgctgttgggaccggattaaacactaagaaagggtttgatgtaaagatcgctgctgcagtagctgaagaaacaaacttgccattcgtcaccgcagaaaacaagtttgaagctctggctgcacacgatgcttgtgttgaaacaagtggatctcttaacacaatcgccacatcattgatgaagattgccaatgatatacgttttcttggaagtggtccaagatgtggtcttggtgaactttctctgcctgagaatgaaccaggaagcagtattatgcctggaaaggtaaatcctacacagtgtgaggccttgactatggtttgtgctcaagttatgggaaaccatgtagccgtgacaattggtgggtcgaatggtcattttgaattgaatgtattcaagccggttatcgcaagcgctctcttacattccattagactaatagcagatgcttcagcttcatttgagaaaaactgtgttagaggcattgaggccaacagagaaaggatctcaaagctattgcacgagtctcttatgcttgtgacatcattgaatcctaaaattggctatgacaatgctgcagcagtagccaaaagagctcacaaagaaggatgcacattaaagcacgcagctatgaagttaggtgttcttacttcggaagagtttgatactcttgttgttcccgagaagatgattggtccatctgattaa

SEQ ID NO: 11025 - protein, 499 aa, Arabidopsis thaliana
MAALTMQFEGEKKNVSEVADVTLKQEDEQQERRSYSTPFREERDTFGPIQVPSDKLWGAQTQRSLQNFEIGGDRERMPEPIVRAFGVLKKCAAKVNMEYGLDPMIGEAIMEAAQEVAEGKLNDHFPLVVWQTGSGTQSNMNANEVIANRAAEILGHKRGEKIVHPNDHVNRSQSSNDTFPTVMHIAAATEITSRLIPSLKNLHSSLESKSFEFKDIVKIGRTHTQDATPLTLGQEFGGYATQVEYGLNRVACTLPRIYQLAQGGTAVGTGLNTKKGFDVKIAAAVAEETNLPFVTAENKFEALAAHDACVETSGSLNTIATSLMKIANDIRFLGSGPRCGLGELSLPENEPGSSIMPGKVNPTQCEALTMVCAQVMGNHVAVTIGGSNGHFELNVFKPVIASALLHSIRLIADASASFEKNCVRGIEANRERISKLLHESLMLVTSLNPKIGYDNAAAVAKRAHKEGCTLKHAAMKLGVLTSEEFDTLVVPEKMIGPSD

SEQ ID NO: 11026 - DNA, 1865 bp, Solanum tuberosum
  CDS (66)..(1547)
ctcagactcagcatcaacattcccaccaactcgcatacaggcggcggcgcattgactgctgagatatggcgatgttaaatgcggctcgtcgattatcagctggatcagctttatcagattcactgcgttatacttcttcctggaggtttttctctacgtctttcagggaggaaagagatacgtttggtcctattctcgttccatcggacaagttatggggggctcaaactcaaagatcattgcagaattttgaaattgggggtgatcgtgaaagaatgcctgagccaatcatacgtgcattcggtattattaaaaagtgtgcagccaaggtgaacatggactatggccttgaccaatctattggaaaagcaataatgcaagcagctgaagaggttgcagaaggaaaattaaatgaccattttcctttggtggtttggcagactggcagtggcactcaaagtaacatgaatgctaacgaggttattgcaaatcgagcagctgaaatacttggccataaccgcggagacaaacatgtgcatccaaatgaccatgtaaataaatcgcaatcttcaaatgatactttctctacggtgatgcacattgctgcagcaatggagctaaataaaagattagtaccaaaccttgaaacagttgcatactcactaaattcaaagtcagtcgaattcaaggacattatcaagattgggcgaacccacacacaagatgcaacacctttgactcttggacaagagtttagtggctatgcaactcaagtgaaatatggaatcgatagagtcttatgcacgcttcagcgcatgtatcagctcgcacaagggggcacagcagtagggacaggattgaatacaaagaaagggtttgacataaaaattgctgcagcagttgcagaggaaacaaatttcccatttgttacagctgaaaacaagtttgaagcattggctgctcatgatgcatttgctgaaactagtggagccttaaataccctggctgcttcccttatgaagattgggaatgatatacgcttcttgggaagtggtccccgctgtggtcttggcgagctcagtcttcctgaaaatgaacccggaagcagtataatgcctggcaaggtaaatcctactcagtgtgaggctctcaccatggtctgtgctcaggttatggggaatcatgtggctgttactgttggtgcatcaaatggccattttgagctgaatgtcttcaagccgatgattgctaatgctctcctacattcagtaagattgctaggcgatgcatctgcttcctttgaaaagaattgtgtgagggatatccaagctaacagagacagaattgctaaattgttgcacgagtcactcatgctcgttacatgtttgaacccaaaaattggttatgataatgctgctgcagttgccaagaaagcccacaaggagggaaccagtttgaaggaagctgctctcaatctaggagtcctcaccagtgaagagtttgatcaacttgtagtccctgagaaaatgattggtccaactgactgatctgattcattagctcttcgaaatgagaaagaggaccatggctagcttcttctgtccatcagattcgaacgagggaaataaacatttgacacaattcttgaggttttcttattcctggtaatttatcagtgttttttactgtgagaatgcctccatttttttttttgtaatgagtccctggagcgatagccaagtaaataatgaactgaattagtattttttatgaggttgggccatgaataatgagggagaaaatcatcttttatgaaatggagacggggaaatgatcaaaatggtcttatgtatgggttttgattc

SEQ ID NO: 11027 - protein, 493 aa, Solanum tuberosum
MAMLNAARRLSAGSALSDSLRYTSSWRFFSTSFREERDTFGPILVPSDKLWGAQTQRSLQNFEIGGDRERMPEPIIRAFGIIKKCAAKVNMDYGLDQSIGKAIMQAAEEVAEGKLNDHFPLVVWQTGSGTQSNMNANEVIANRAAEILGHNRGDKHVHPNDHVNKSQSSNDTFSTVMHIAAAMELNKRLVPNLETVAYSLNSKSVEFKDIIKIGRTHTQDATPLTLGQEFSGYATQVKYGIDRVLCTLQRMYQLAQGGTAVGTGLNTKKGFDIKIAAAVAEETNFPFVTAENKFEALAAHDAFAETSGALNTLAASLMKIGNDIRFLGSGPRCGLGELSLPENEPGSSIMPGKVNPTQCEALTMVCAQVMGNHVAVTVGASNGHFELNVFKPMIANALLHSVRLLGDASASFEKNCVRDIQANRDRIAKLLHESLMLVTCLNPKIGYDNAAAVAKKAHKEGTSLKEAALNLGVLTSEEFDQLVVPEKMIGPTD

SEQ ID NO: 11028 - DNA, 1616 bp, Arabidopsis thaliana
  CDS (44)..(1576)
acacgtttaataggcccgaagttgctatctagcagttgtagccatggccgctttgacaatgcagtttgaaggagagaagaaaaacgtatccgaagttgcagacgtaaccctcaagcaagaagatgaacaacaagaacgtagatcttattcgacgccgtttagggaagagagagacacctttggcccgatccaagttccttccgataaattatggggagcacagacgcagagatcgcttcagaacttcgagattggtggtgaccgcgagcgaatgcccgaaccaatcgtccgagcttttggtgtcttgaagaaatgtgctgccaaggttaacatggagtatggtcttgatccaatgattggggaagccataatggaagctgcacaagaagtagcagaaggaaagctcaatgatcatttccctcttgttgtatggcaaactggtagtgggacgcagagtaatatgaatgctaatgaggtcattgccaatagagcagctgagattcttggtcacaaacgtggtgaaaaaattgtgcacccaaatgaccatgtgaacagatcacaatcttctaatgacacttttccaactgtcatgcacattgcagctgcaaccgagattacttcgaggctaatccctagtttgaaaaatttgcatagctctttggaatctaagtccttcgagtttaaagatatagtgaaaatcggaagaactcatactcaagatgctacacctttgacattaggacaagaatttggtggctatgctactcaagttgagtatggacttaatagagtcgcatgtactctaccccgcatctatcagcttgcacaaggtggaactgctgttgggaccggattaaacactaagaaagggtttgatgtaaagatcgctgctgcagtagctgaagaaacaaacttgccattcgtcaccgcagaaaacaagtttgaagctctggctgcacacgatgcttgtgttgaaacaagtggatctcttaacacaatcgccacatcattgatgaagattgccaatgatatacgttttcttggaagtggtccaagatgtggtcttggtgaactttctctgcctgagaatgaaccaggaagcagtattatgcctggaaaggtaaatcctacacagtgtgaggccttgactatggtttgtgctcaagttatgggaaaccatgtagccgtgacaattggtgggtcgaatggtcattttgaattgaatgtattcaagccggttatcgcaagcgctctcttacattccattagactaatagcagatgcttcagcttcatttgagaaaaactgtgttagaggcattgaggccaacagagaaaggatctcaaagctattgcacgagtctcttatgcttgtgacatcattgaatcctaaaattggctatgacaatgctgcagcagtagccaaaagagctcacaaagaaggatgcacattaaaggtaaacaataaactattaacgttttcatcactaaataaatcggaatttaaacccatttttagcaagagaaaacatgttcatgtttgttacaatatatttgttgttctattttggatttaaaccttctccagtgaaaattatataatacaatacctttgag

SEQ ID NO: 11029 - protein, 510 aa, Arabidopsis thaliana
MAALTMQFEGEKKNVSEVADVTLKQEDEQQERRSYSTPFREERDTFGPIQVPSDKLWGAQTQRSLQNFEIGGDRERMPEPIVRAFGVLKKCAAKVNMEYGLDPMIGEAIMEAAQEVAEGKLNDHFPLVVWQTGSGTQSNMNANEVIANRAAEILGHKRGEKIVHPNDHVNRSQSSNDTFPTVMHIAAATEITSRLIPSLKNLHSSLESKSFEFKDIVKIGRTHTQDATPLTLGQEFGGYATQVEYGLNRVACTLPRIYQLAQGGTAVGTGLNTKKGFDVKIAAAVAEETNLPFVTAENKFEALAAHDACVETSGSLNTIATSLMKIANDIRFLGSGPRCGLGELSLPENEPGSSIMPGKVNPTQCEALTMVCAQVMGNHVAVTIGGSNGHFELNVFKPVIASALLHSIRLIADASASFEKNCVRGIEANRERISKLLHESLMLVTSLNPKIGYDNAAAVAKRAHKEGCTLKVNNKLLTFSSLNKSEFKPIFSKRKHVHVCYNIFVVLFWI

SEQ ID NO: 11030 - DNA, 1416 bp, Nostoc sp. PCC 7120
  CDS (1)..(1416)
atgactacaaatacagattttcgtattgaacgcgattcgatgggcgatcgccaaattgctagtgatgtttattacggtattcaaactctccgagccgttgaaaatttccccattagtggtcttaagcccttacctacttacgtagatgctggtcttttaattaaaaaagctacagcaattgtcaatggagaactaggttgtattccccaagatattagccaagcgattgtgcaagcaaccgatgaaattctggcagggaagttaagagatcagttcgtcgttgatgtctatcaagctggtgcaggcacatcccaccacatgaacattaacgaagtcctagcaaatcgggctttggaaattttgggtgcagaaaagggcaattaccaacgagttagccctaatgatcatgtgaactacgggcagtctaccaacgatgttattcccacagcaattcgcatcggtggcttattggcactgaccaaaacattacagccagcattagaaaaagcgatcgccgccttagaacacaaagctgtagaatttcaagatattgtcaaatctggcagaacccatttacaggatgccgttcccgtccgcttgggtgataatttcgccgcttgggcgcatatcctctcagaacatcaaaaccgcatttacactgcctctggagacttgatggtactcggtttaggtggtagtgcggcgggaacaggcttaaacacccatcctcaataccgcgcccgtgtggtggaagtactggcagaattactaaacttaccactccaacccgccccccatctcatggctgccatgcagagtatgtccccatttgtgaacgtttccggggcgatacgcaacctagcccaagacttagcgaaaatttcccacgacttgaggctgatggactccgggccaaaaactggtttaaaagaaattcaactacccccagtccaacccggttcctcaatcatgccaggcaaatataaccccgttatggcagagatgacatcgatggtgtgtttccaggtgatgggttacgatcaggcgatcgctcttgcagcccaagccggacaattagaattaaacgtgatgatgccgttgattgcctatgatttgatccacagcatcgaaattctggggtcaaccatcgccgcccttacagaacgctgcattcaaggaattaccgccaacaaagaacgctgtttagcctacgccgaaggcagtttagctttagttaccgccctcaacactcacattggttatttaaatgccgcagatgtcgccaaagaatccttaaacacaggaaaatctctaaggcagattgtgttagaaaaaggactgatgagcgaagcagagttagccaccgtgttaaatctagaagaaatgagtagtatattgccactccaaacagagtaa

SEQ ID NO: 11031 - protein, 471 aa, Nostoc sp. PCC 7120
MTTNTDFRIERDSMGDRQIASDVYYGIQTLRAVENFPISGLKPLPTYVDAGLLIKKATAIVNGELGCIPQDISQAIVQATDEILAGKLRDQFVVDVYQAGAGTSHHMNINEVLANRALEILGAEKGNYQRVSPNDHVNYGQSTNDVIPTAIRIGGLLALTKTLQPALEKAIAALEHKAVEFQDIVKSGRTHLQDAVPVRLGDNFAAWAHILSEHQNRIYTASGDLMVLGLGGSAAGTGLNTHPQYRARVVEVLAELLNLPLQPAPHLMAAMQSMSPFVNVSGAIRNLAQDLAKISHDLRLMDSGPKTGLKEIQLPPVQPGSSIMPGKYNPVMAEMTSMVCFQVMGYDQAIALAAQAGQLELNVMMPLIAYDLIHSIEILGSTIAALTERCIQGITANKERCLAYAEGSLALVTALNTHIGYLNAADVAKESLNTGKSLRQIVLEKGLMSEAELATVLNLEEMSSILPLQTE

SEQ ID NO: 11032 - DNA, 1437 bp, Salmonella enterica subsp. enterica serovar Typhi
  CDS (1)..(1437)
atgtcaaacaacattcgtatcgaagaagatctgttgggtaccagggaagttccagctgaagcctactatggtgttcacactctgagagcgattgaaaacttctacattagcaataacaaaatcagcgacatccctgaatttgtgcgtggcatggttatggtaaaaaaagcggcggcgctggccaacaaagagctgcaaaccattcctaagagtgtggcgaatgccatcattgccgcatgtgatgaagtccttaacaacggtaagtgcatggaccagttcccggtagatgtctaccagggcggcgcgggcacttccgtcaacatgaataccaacgaagtgctggccaacatcgggctggaactgatgggtcatcagaaaggtgaatatcagtacctgaacccgaacgaccacgtgaataaatgtcaatccactaacgacgcctatccgacaggcttccgtgtagcggtttacgcctctatcgtcaaactgatcgatgccatcaaccagttgcgtgaaggtttcgaacgtaaagcggttgaattccaggacatcctgaaaatgggtcgtacccagttgcaggacgccgtaccgatgacgcttggtcaagaattccgtgcgttcagcattctgctgaaagaagaagtgaaaagcatcgagcgtactgctgagctgctgctggaagtcaaccttggcgcaacggcaatcggtactggtctgaacacgccgaaagaatactctccgctggcggtgaaaaaactggctgaagtcactggtttcgcctgtgttccggctgaagatctgattgaggcgacatctgactgtggcgcgtatgttatggttcacagcgcgctgaaacgtctggcagtgaagatgtccaaaatctgtaacgacctgcgcttgctctcttctggtcctcgtgccggcctgaacgagatcaacctgccggaactgcaggcgggctcttccatcatgccagccaaagtgaacccggtagtaccggaagtcgtaaaccaggtatgctttaaagtcatcggtaacgacaccaccgttacgatggcggcggaagccggtcagttgcagttgaacgttatggagccggttatcggtcaggcgatgttcgaatccatccacattctgagcaacgcgtgctacaacctgctggaaaaatgcgttaacggcattaccgcgaataaagaagtgtgcgaagggtacgtttataactccatcggtatcgtcacttacctcaacccgttcatcggccaccacaacggcgacatcgtcggtaaaatctgtgctgaaaccggtaagagcgtacgtgaagttgtgctagagcgcggcctgttaacggaagccgagctggacgatattttctccgtacagaacttgatgcacccggcttataaagctaaacgttatactgatgaaagcgaacagtaa

SEQ ID NO: 11033 - protein, 478 aa, Salmonella enterica subsp. enterica serovar Typhi
MSNNIRIEEDLLGTREVPAEAYYGVHTLRAIENFYISNNKISDIPEFVRGMVMVKKAAALANKELQTIPKSVANAIIAACDEVLNNGKCMDQFPVDVYQGGAGTSVNMNTNEVLANIGLELMGHQKGEYQYLNPNDHVNKCQSTNDAYPTGFRVAVYASIVKLIDAINQLREGFERKAVEFQDILKMGRTQLQDAVPMTLGQEFRAFSILLKEEVKSIERTAELLLEVNLGATAIGTGLNTPKEYSPLAVKKLAEVTGFACVPAEDLIEATSDCGAYVMVHSALKRLAVKMSKICNDLRLLSSGPRAGLNEINLPELQAGSSIMPAKVNPVVPEVVNQVCFKVIGNDTTVTMAAEAGQLQLNVMEPVIGQAMFESIHILSNACYNLLEKCVNGITANKEVCEGYVYNSIGIVTYLNPFIGHHNGDIVGKICAETGKSVREVVLERGLLTEAELDDIFSVQNLMHPAYKAKRYTDESEQ

SEQ ID NO: 11034 - DNA, 1452 bp, Brucella melitensis
  CDS (1)..(1452)
atgacaaccctggaaaatattcatcccctgacacggcgcgagcaggattcccttggggagcgcgatattcccatggatgcctatttcggcatccagaccctacgggcagttgaaaacttctcgctttccgatgttgcgctgaaccatattcctgccctcgttcgcgcccttgcaatggtcaagaaagcggctgccaccgccaattacaagctgcggcagctgccggagcccaaatatgcggccatcgtcgccgcctgcgacaacatcattgacgggcttttgatggagcaattcgtcgtggatgtgtttcagggcggcgcgggcacctcaagcaatatgaacgcaaatgaggttatcgcaaaccgcgcccttgaacatctggggcggccgcgaggcgactaccagacgatccatcccaatgatgacgtcaacatgtcgcagtccaccaatgatgtgtatccaaccgcggtaaggctggcgcttcttctcagccagaaccaggttcagacggcgctgcaccggctgattgccgcctttgaagcaaaggggcgggaattcgcgacggtcatcaagatcgggcgcacacagttgcaggatgcggttccgatcactcttggacaggagttcgaggcatttgccgcaacgttgcgggaggacacagcccggctggaggaggttgccgcgcttttccgcgaagtaaacctcgatggaaccgctatcggcacgcgcatcaacgcctcgcacgcctatgccgaacaggccatcgcggaactttcgcagatttccggtatcgaactgaaagccgccggcaatctcgtggaagcgagctgggataccggtgcgttcgtcaccttttccgggatattgcgccggatcgcagtcaagctttccaagatcgccaacgatctgcggctactctcaagcgggccgcgaagcggccttggtgaaatccgcctgcctgcggttcagccgggatcgtcgatcatgccgggaaaggtcaatccggtcataccggaatcggtcaatcaggtctgctatcaggtgatcggcaatgacctaactgtaaccatggcagccgaaagcgggcaattgcagctcaacgcgttcgagccgctgatcgtctacaatatcctcagttccatgcgactgctcggccgcgccatgaccaatctggccgaacgttgcgtcgacggaatcgaagccaatgtggaacgctgtcgcgcaggcgcggaggaaagcatttcgcttgcaaccgccctcgtcccggtcgtgggctatgccagggcggcagagatcgccaagcaggcgcttgcctcagggcagaccgtcatggaagtggcgatttccaaggggctggacgcatctgcgctcacgataatgcttgaccccttgagaatggcattcccgccggaaacgcacgacaaggaggcacatcatgcatctgtcggctaa

SEQ ID NO: 11035 - protein, 483 aa, Brucella melitensis
MTTLENIHPLTRREQDSLGERDIPMDAYFGIQTLRAVENFSLSDVALNHIPALVRALAMVKKAAATANYKLRQLPEPKYAAIVAACDNIIDGLLMEQFVVDVFQGGAGTSSNMNANEVIANRALEHLGRPRGDYQTIHPNDDVNMSQSTNDVYPTAVRLALLLSQNQVQTALHRLIAAFEAKGREFATVIKIGRTQLQDAVPITLGQEFEAFAATLREDTARLEEVAALFREVNLDGTAIGTRINASHAYAEQAIAELSQISGIELKAAGNLVEASWDTGAFVTFSGILRRIAVKLSKIANDLRLLSSGPRSGLGEIRLPAVQPGSSIMPGKVNPVIPESVNQVCYQVIGNDLTVTMAAESGQLQLNAFEPLIVYNILSSMRLLGRAMTNLAERCVDGIEANVERCRAGAEESISLATALVPVVGYARAAEIAKQALASGQTVMEVAISKGLDASALTIMLDPLRMAFPPETHDKEAHHASVG

SEQ ID NO: 11036 - DNA, 1416 bp, Bacillus halodurans
  CDS (1)..(1416)
atgacagactatcgtgtagagcgagatttaattggtgaaaagaaagtaccgaaagaggcatattatggaattcaaacgatgagagcgagggaaaacttccccattacagggtatccccctcatgaggaattgattcgcgcctttggctttgtcaaaaaggctgctgcgatggcgaatcgggatgtaggggtgttgccagctaacattgtcgatgcgatcattaccgcagcagacgaagtgatcgaaggaacgttcaacgatcaatttatcgttgatgcgatccaaggtggtgcaggtacttcttttaatatgaatgcaaatgaagtgattgccaatcgtgcgattgaaatccttggaggagagaagggggaatacctccgcgtaagcccaaatactcacgtgaacatggcgcaatcgacaaacgatgctttcccgacagctattcatattgcctgtctttatttagccaaaggattaattcaatcactagaagacctgattgcagccattaaggaaaaggaacaacagtttgacgatgtgttaaaaatggggcgaacccatttacaggatgcagttccgatacggatgggacaagaatttggcgcttaccgccgcgtgctcactcgtgatttgggacgaatccgcagctcaattgatcatatgcatgaaattaatatgggggcgacagcagtagggacaggacttaacgcaaagcctgaatatatggaaaaagtggttgcctatttaagtgacattactgaatttccgttccgccatgcagcagatttagtggacgcgacgcaaaatacggatgcttacacagaattatcgagtgcgctgaaaattttggcgatcaatttatcaaaaatggcgaatgacatccgcttgatgagctctgggccacgcacggggttaaatgaaatcaaccttccaccgcgtcaaccagggtcgtcgatcatgccaggaaaggtaaatccagtaatggctgaagtgatcaaccaaatttcgttccaagtcatcggcaatgaccatacgattagcttagcgtcagaagctgggcagcttgaactaaacgttatggagccggttctcgtctttaacttacttcaatcgttatcgatcctgcaaaacgggatgaaggtgttccgtcagcacgcgattgaaggaatgacggccaacgtagagcgctgcaaagaaatggtggagagcagtgttgggatcattactgcgatcaacccccatgtaggatatgaaacagcctctcgaatcgcaaaggaagcgatccaaacagggcgtccagtacgagaaatttgtctagaacgagggattttaacagaagaggaactaaacgaaattttggatccgaaagaaatgacgaagcctggtattgctggggcaaggttcatttacggataa

SEQ ID NO: 11037 - protein, 471 aa, Bacillus halodurans
MTDYRVERDLIGEKKVPKEAYYGIQTMRARENFPITGYPPHEELIRAFGFVKKAAAMANRDVGVLPANIVDAIITAADEVIEGTFNDQFIVDAIQGGAGTSFNMNANEVIANRAIEILGGEKGEYLRVSPNTHVNMAQSTNDAFPTAIHIACLYLAKGLIQSLEDLIAAIKEKEQQFDDVLKMGRTHLQDAVPIRMGQEFGAYRRVLTRDLGRIRSSIDHMHEINMGATAVGTGLNAKPEYMEKVVAYLSDITEFPFRHAADLVDATQNTDAYTELSSALKILAINLSKMANDIRLMSSGPRTGLNEINLPPRQPGSSIMPGKVNPVMAEVINQISFQVIGNDHTISLASEAGQLELNVMEPVLVFNLLQSLSILQNGMKVFRQHAIEGMTANVERCKEMVESSVGIITAINPHVGYETASRIAKEAIQTGRPVREICLERGILTEEELNEILDPKEMTKPGIAGARFIYG

SEQ ID NO: 11038 - DNA, 1428 bp, Haemophilus influenzae
  CDS (1)..(1428)
atgattacaatgactcaatttagaaaagaagtagatttacttggcgaacgtgatgtgcctgcagaagcatattgggggattcatacattaagagcggtagaaaatttcaatatttctaacgtaaccatttctgacgtgcctgagtttgtgcgtggtatggtaatggtaaaaaaagcaacagctttagccaatggcgaattaggtgcaattccaagtgatattgcaaaagcgattgtagcagcttgtgatgaaattcttaccactggaaaatgcttagatcaattcccatcagacgtatatcaaggtggtgcaggtacgtctgtcaatatgaatactaatgaagtggttgctaatcttgcccttgaaaaaattggtcataaaaaaggcgaatataacgtgattaatccgatggatcacgttaatgcaagccaatcgaccaacgatgcgtatcctaccggtttccgtattgcggtgtacaacagcatcttaaaattgatcgataaaattcaatatttacacgacagttttgataataaagcaaaagagtttgcaaatatcttaaaaatgggtcgtacccaattgcaagatgcggtgccaatgactgttggtcaagaattcaaagctttcgccgtattacttgaagaagaagtgcgtaacttaaaacgtacagcaggtttattacttgaagtaaaccttggtgcaacggcaatcggtactggtttaaatacgccacaaggctatacagaattagttgtaaaacatcttgctgaagtgactggattagcttgtgtaccagcagaaaacttaattgaagcaacatctgactgtggtgcttatgtcatggttcacggtgcattaaaacgtactgcagtgaaactttctaaagtatgtaatgacttacgtttactttcttctggcccacgtgcaggtttaaaagaaattaatcttcctgaattacaagcgggttcttctattatgccagcaaaagtaaacccagttgttccagaggtggtaaaccaagtgtgctttaaagtaattggtaacgataccactgtgaccttcgcatctgaagcaggtcaattacaattaaacgtaatggaaccagtgattggtcaagcaatgtttgaatctatcgatatcttaaccaatgcttgtgtgaacttacgcgataaatgtgtggatggcatcactgtaaacaaagaaatttgtgaaaactacgtgtttaattcaattggtattgtgacttacttgaatccatttatcggtcaccacaacggcgacttagtgggtaaaatctgtgcacaaacaggcaaaggcgtacgtgaagttgtgttagaaaaaggtttattaacagaagaacaattagatgacattctttctgtagaaaacttaatgaatccaacttacaaagcgaaattaaataaataa

SEQ ID NO: 11039 - protein, 475 aa, Haemophilus influenzae
MITMTQFRKEVDLLGERDVPAEAYWGIHTLRAVENFNISNVTISDVPEFVRGMVMVKKATALANGELGAIPSDIAKAIVAACDEILTTGKCLDQFPSDVYQGGAGTSVNMNTNEVVANLALEKIGHKKGEYNVINPMDHVNASQSTNDAYPTGFRIAVYNSILKLIDKIQYLHDSFDNKAKEFANILKMGRTQLQDAVPMTVGQEFKAFAVLLEEEVRNLKRTAGLLLEVNLGATAIGTGLNTPQGYTELVVKHLAEVTGLACVPAENLIEATSDCGAYVMVHGALKRTAVKLSKVCNDLRLLSSGPRAGLKEINLPELQAGSSIMPAKVNPVVPEVVNQVCFKVIGNDTTVTFASEAGQLQLNVMEPVIGQAMFESIDILTNACVNLRDKCVDGITVNKEICENYVFNSIGIVTYLNPFIGHHNGDLVGKICAQTGKGVREVVLEKGLLTEEQLDDILSVENLMNPTYKAKLNK

SEQ ID NO: 11040 - DNA, 1398 bp, Neisseria meningitidis
  CDS (1)..(1398)
atgactgtccgtatcgaacacgatttattgggcgaccgcgagattcccgccgaagtgtattggggcatccacaccctgcgcgccattgaaaactttaaaatctccacacaaaaaatttctgacgtgccgcagtttgtccgcagtatggtgatggtgaaaaaggcgacggcacaggcaaacggtgagttgggcgcggtcaagcccgaaatcgccgccgccattgaaaaagcctgcgacgaagttctgctgaacaaccgctgcctcgaccaattcccgtccgacgtgtatcagggcggtgcgggtacttcggtcaatatgaacaccaacgaagtcatcgccaacctcgcattggaagtcttgggatacgaaaaaggccgctacgacatcgtcaatccgatggatcacgtcaatgccagccaatcgaccaacgatgcctatcccacgggcttccgccttgccgtgtattacagcatcggcgaattgctcgacaaactgactgtcctgaaaaacgcctttgccgccaaagccgaagaatttaaagacgttttgaaaatgggccgcacccagcttcaagatgccgtgccgatgactgccggccaagaattccaatctttccaagtgttgttggaagaagaaatcctcaacctcgaccgcacccgccaactgctgttggaagtcaatttgggcgcaacggcaatcggcacgggcgtgaacacgcccaaaggctacgccgaactggtggtcaaaaaactctccgaagtcagcggcttgccttgcaaactgaccgaaaacctgattgaggcgacctccgactgcggcgcatatgtgatggtacacggcgcattgaagcgcacggcggtcaaactctccaaaatctgcaacgacttgcgcctgctctcttccggcccgcgtgccggcttgaaagaaatcaacctgcccgaattgcaggccggttcttccataatgcccgccaaagtcaatcccgtgattcccgaagtggtcaaccaagtctgcttcaaagtcatcggcaacgacacgacgattaccttcgccgccgaagccgggcaactgcaattaaacgtgatggagccggtcatcgcccaatgtatgtttgaaaccatttccctcttgggcaatgccgcagtcaacctgtccgacaaatgcgtcaaaggcattacggtcaaccgcgaaatctgcgaacgttacgttttcaactccatcggtttggtgacttatctgaatccgtatatcggacaccacaacggcgatttggtcggcaaaatctgcgcccaaaccggcaaaggcgtgcgcgaggttgtcttggaacgcgggctgttgagcgaagaagaactcaaccgcatcctctctcccgagaacctgatgaacccccatctgtaa

SEQ ID NO: 11041 - protein, 465 aa, Neisseria meningitidis
MTVRIEHDLLGDREIPAEVYWGIHTLRAIENFKISTQKISDVPQFVRSMVMVKKATAQANGELGAVKPEIAAAIEKACDEVLLNNRCLDQFPSDVYQGGAGTSVNMNTNEVIANLALEVLGYEKGRYDIVNPMDHVNASQSTNDAYPTGFRLAVYYSIGELLDKLTVLKNAFAAKAEEFKDVLKMGRTQLQDAVPMTAGQEFQSFQVLLEEEILNLDRTRQLLLEVNLGATAIGTGVNTPKGYAELVVKKLSEVSGLPCKLTENLIEATSDCGAYVMVHGALKRTAVKLSKICNDLRLLSSGPRAGLKEINLPELQAGSSIMPAKVNPVIPEVVNQVCFKVIGNDTTITFAAEAGQLQLNVMEPVIAQCMFETISLLGNAAVNLSDKCVKGITVNREICERYVFNSIGLVTYLNPYIGHHNGDLVGKICAQTGKGVREVVLERGLLSEEELNRILSPENLMNPHL

SEQ ID NO: 11042 - DNA, 1425 bp, Pseudomonas aeruginosa
  CDS (1)..(1425)
atgtcccccgttgcatcttcccgtatcgagaaagacctgctcggcaccctcgaagtgcccgctgacgcctactacggcatccagaccctgcgcgccgtgaacaacttccgcctctccggggtgccgctgtcgcactacccgaagctggtcgttgccctggccatggtcaagcaggccgccgccgacgccaaccgtcagctcggccatctcccggaagacaagcacgccgccatcagcgaggcctgcgcccgcctgatccgcggcgatttccacgagcagttcgtggtggacatgatccagggcggcgccggcacctccaccaacatgaacgcgaacgaagtgatcgcgaacatcgcgctggaagccatgggccacaccaagggtgagtacaagtacctgcacccgaacaacgatgtgaacatggcgcagtcgaccaacgacgcctacccaaccgccatccgcctgggcctgctgctcggccacgacaccctgctggccagcctcgacagcctgatccaggccttcgccgccaagggcgtcgaattcgccggcgtactgaagatgggccgcacccagttgcaggacgccgtgccgatgaccctcggccaggaattccacgctttcgccaccaccctcggcgaagacctcgaccgcctgcgtcgcctggcgccggagctgctcaccgaagtgaacctcggtggcaccgccatcggcaccggcatcaacgccgaccccggctaccagaagctcgccgtcgagcgcctggccgccatcagcgggcagccgctgaagccggccgccgacctgatcgaagccacctccgacatgggcgccttcgtgctgttctccggcatgctcaagcgcaccgcggtcaagctgtcgaagatctgcaacgacctgcgcctgctctccagcggcccgcgcaccggcatcaacgagatcaacctgccgccgcgccagccgggcagttcgatcatgccgggcaaggtcaacccggtgatcccggaagcggtcaaccaggtcgccttcgaagtgatcggcaacgacctcgccctgaccctggcggccgaaggcggccagttgcaactgaacgtgatggagccgctgatcgcctacaagatcttcgactcgatccgcctgctgcaacgcgccatggacatgctccgcgagcactgcatcaccggcatcaccgccaacgtcgagcgctgccacgaactggtcgagcacagcatcggtctggtcaccgcgctgaacccgtacatcggctacgagaactccacgcggatcgccaagaccgccctggagagcggccgcggcgtcctggaactggtacgcgaggaaaagctgctggacgaagccaccctggccgacatcctgctgccggaaaacatgatcgcgccgcgcctgattccgctgcgcgcctga

SEQ ID NO: 11043 - protein, 474 aa, Pseudomonas aeruginosa
MSPVASSRIEKDLLGTLEVPADAYYGIQTLRAVNNFRLSGVPLSHYPKLVVALAMVKQAAADANRQLGHLPEDKHAAISEACARLIRGDFHEQFVVDMIQGGAGTSTNMNANEVIANIALEAMGHTKGEYKYLHPNNDVNMAQSTNDAYPTAIRLGLLLGHDTLLASLDSLIQAFAAKGVEFAGVLKMGRTQLQDAVPMTLGQEFHAFATTLGEDLDRLRRLAPELLTEVNLGGTAIGTGINADPGYQKLAVERLAAISGQPLKPAADLIEATSDMGAFVLFSGMLKRTAVKLSKICNDLRLLSSGPRTGINEINLPPRQPGSSIMPGKVNPVIPEAVNQVAFEVIGNDLALTLAAEGGQLQLNVMEPLIAYKIFDSIRLLQRAMDMLREHCITGITANVERCHELVEHSIGLVTALNPYIGYENSTRIAKTALESGRGVLELVREEKLLDEATLADILLPENMIAPRLIPLRA

SEQ ID NO: 11044 - DNA, 1398 bp, Clostridium acetobutylicum
  CDS (1)..(1398)
atggattttaggattgagagtgattccataggtgataagaaggttcctaaggaggtatactatggagttcaaacattgagaggtgcggataattttaaaataacaggacttaggttaaatgaagagtttataaagagtgttgttcaaataaaaaaagcagctgcaattactaatttagaaattggagagctagaggttaacataggaaaagccataattaaagcctgtgatgaggtgatagctgggaagtttaatgaagactttataatagaccctattcaaggtggagcaggaacatctataaatatgaatgccaatgaggttattgcaaatagagctatagaaattttaggatatgaaaaaggaaattatagaattgtacatccaaacgatcatgtcaatatgggacaatcaactaatgatgttataccaacagcaggaaagataactgcattaagacttgtgatcaagaatttagacaaactcaaagaattaagcaatgcctttagtgagaaagcagaacaattcaaagatgtaattaaaatgggtagaacacagcttcaagatgctgtacctataacgttgggacaagaatttagtgcttacagtgcggttgtaaaaagagatatcgctaggattcaaaaagctcaagatgagctgaaagttgtaaatataggtggaactgcggttgggacaggtattaatgcagatagcagatatgtggatagaatagttccaaggctttcttttgtttctggattaaatttaaaaaaagctgacgatttaatcgatggtacacagaatttggatagctttgctagtttatccgcaacaataaaaacctgtgctttaaatctatctaaaatagccaatgacttaaggcttatgtcttctggaccaaggacggggttaggggagatcaatcttcctgcaaagcaaaatggatcatcaataatgcctggaaaagttaatcctgtaatacctgaagttataaatcaaatagcctttaatattgcaggaaatgatgtagctatttctatggctgttgaggcagggcagctagaactaaatgcttttgagccagttatattttataatatatttgaatctatccaaactttaacaaatggtgtagatacatttattaaaaattgtattctagatattactgcaaatgaagagatatgtagtgaatacgtaaataatagtgttggaatagttacagcactctgtccttatataggttatgcagaatcagcaaagatagcgaagatggctataaaaagtggagagtcaataaaaaaagtagttttaagagaaggcgttctcaaggaaaaggaacttaatagtattattaatccactaaaaatgactaaaccagggattgtaggaaaatag

SEQ ID NO: 11045 - protein, 465 aa, Clostridium acetobutylicum
MDFRIESDSIGDKKVPKEVYYGVQTLRGADNFKITGLRLNEEFIKSVVQIKKAAAITNLEIGELEVNIGKAIIKACDEVIAGKFNEDFIIDPIQGGAGTSINMNANEVIANRAIEILGYEKGNYRIVHPNDHVNMGQSTNDVIPTAGKITALRLVIKNLDKLKELSNAFSEKAEQFKDVIKMGRTQLQDAVPITLGQEFSAYSAVVKRDIARIQKAQDELKVVNIGGTAVGTGINADSRYVDRIVPRLSFVSGLNLKKADDLIDGTQNLDSFASLSATIKTCALNLSKIANDLRLMSSGPRTGLGEINLPAKQNGSSIMPGKVNPVIPEVINQIAFNIAGNDVAISMAVEAGQLELNAFEPVIFYNIFESIQTLTNGVDTFIKNCILDITANEEICSEYVNNSVGIVTALCPYIGYAESAKIAKMAIKSGESIKKVVLREGVLKEKELNSIINPLKMTKPGIVGK

SEQ ID NO: 11046 - DNA, 1446 bp, Agrobacterium tumefaciens
  CDS (1)..(1446)
atggaggaaaaagtgagtgtgacgcgcagggagcatgatttgctcgggacgaaggaaattccggctgatgtctattggggcgtgcacaccgcgcgcgccgtggaaaacttcaagatcaccggggtaaccattggccataacccttatctcgtcaggggactggcctatgtgaaggaggcagccgcacgcgcaaatcacgaactcggcctgctcgacaaggagcgcatggaagcgatcgcggaagcctgccgcgaaatccgcgccggcgcgctgcacgagcaattcgtggtcgacgagatccaggggggagccggcacttccactaacatgaacgccaacgaggtcatttccaaccgtgcgctggaactgctcggccacgaaaaaggcgattattcccgtcttcacccgaatgaccatgtcaatctcagccagtccaccaacgacgcctatccaacggcgatcaatgtcgggctgatcgaggcgatcgacgatctggcggtctccatgggcgtgctgaaagacgctttcgaccgcaaggcgcaggaatttgccggcttcatcaagatcggtcgcacccagctgcaggatgccgtgccgatgacgctcggccaggaattccgcactttcgtggtgatgctcggcgaagatcaggctcgcctgatcgaatccgccgcactgctgcacgaaatcaatctcggcgccaccgccatcggcaccggtctcaatgcgccgcgcggttatgccgagcttgcctgccagcatctggctaagctgaccggacggccactggtgacggcagcagacctgatcgaagccacacaggatcccggtgccttcgtgcacctttccggcgtgctgaagcgcgttgccgtcaagctgtccaagacctgcaacgaccttcgcctgctctcctccggtccgcgcgccggcatcggcgagatcaccctgccctccgttcaggcgggttccagcatcatgcctggcaagatcaacccggtcattcccgaagtggtcaaccaggtcgcctatgcggtgatcggcaacgacatcaccatcaccatggcggccgaagccgggcagctgcaattgaacgcctttgaacccatcatcgtgcgggcattgtcgcagagcatcagccagctcagcgccgcctgccgcacattggcggaacgctgcgttgagggcatcgtcgcaaaccccggcatcatggcgcagcgcgtggaagaatcgatcggtctcgccaccgcgctcaatccgctgatcggttattacgccgcgacggaagtggcgaaggaagcgcttgccagcggccgcaccgtgccgcaggtcgttctggaacggggttatctgacggaaacgcaattgcagcaggcgctcagcccgcgtcatcttgccaacctgcccgcggttaccgttacggctggcgaagccgatcttcgccgatga

SEQ ID NO: 11047 - protein, 481 aa, Agrobacterium tumefaciens
MEEKVSVTRREHDLLGTKEIPADVYWGVHTARAVENFKITGVTIGHNPYLVRGLAYVKEAAARANHELGLLDKERMEAIAEACREIRAGALHEQFVVDEIQGGAGTSTNMNANEVISNRALELLGHEKGDYSRLHPNDHVNLSQSTNDAYPTAINVGLIEAIDDLAVSMGVLKDAFDRKAQEFAGFIKIGRTQLQDAVPMTLGQEFRTFVVMLGEDQARLIESAALLHEINLGATAIGTGLNAPRGYAELACQHLAKLTGRPLVTAADLIEATQDPGAFVHLSGVLKRVAVKLSKTCNDLRLLSSGPRAGIGEITLPSVQAGSSIMPGKINPVIPEVVNQVAYAVIGNDITITMAAEAGQLQLNAFEPIIVRALSQSISQLSAACRTLAERCVEGIVANPGIMAQRVEESIGLATALNPLIGYYAATEVAKEALASGRTVPQVVLERGYLTETQLQQALSPRHLANLPAVTVTAGEADLRR

SEQ ID NO: 11048 - DNA, 1377 bp, Thermotoga maritima
  CDS (1)..(1377)
atgagaaaggaacgcgattacctcgggaaactggagatagaaggcgaagtctactatggaatacacacaaagagagccctcatgaacttcccatccacgggtgaaaagctcgacgaaactttcatctgggcctatttcatggtgaaaaaagcctgcgcccttttgaacacagagcttggttatctggacgaacgaacaggaaacgccattgtgaaagcctgtgacgaatgggaagacctgaaaaaacacgtggttgtggatccactctctggtggggctggaacttccataaacatgaacgtaaacgaagtgatcgcaaacagggctacggaaatactcggtggaaagaaaggagaatacctggtcgatcccatagaccacgtgaacctgcaccagtccacaaacgataccttcccaacgagtgcgaaaatcgccaccatcgtgaaactcagaagactcatagatgaagtgataaaccttcaggagaagattcaggagaaagagaaggagttctactccatcagaaaaccgggaagaacacagctcatggatggaccgcccatcatgttagggcaggaattcggtgccttcgcggatgccctcgcgagagacagatggaggctctacaaagtcgaagaaagaataagaagtgtaaacatcgggggaacggccatcggaacgggagttggggcgccgaaagactacatcctcaagatcgtggaaaaggtgagagaagtgacgaaagtgaagattgctaaagcagaaaacctcatagacgccacgcagaactgggacgtttttgccgaggttcatggtcttttgaaatcccttgctgtgaacctctacaagatttcaaacgacatcagactgctgggaagcggaccaaacaccgtgatcggggaactgattcttccagctgtgcaggcgggaagctccatcatgccaggaaaaataaacccggttgtttccgagtacgtaatgcaaatctgtcatatggttttcggtcacgacatgatcctgaaccatgcctgcgcgcttgggaatttagaactcaaccagttcgctcctctgatagttcacctcacactgaaatctctcacactcctcacaaacgcctgtagatcactcgccagctacatctcaaaaataaaagcgaacaacgagcggtgtgaggaacaccttcgaaggtctgtttcgaacctcacacctttgataaagttgtttggatacgaagcggtctctgaagcaataaaaaaagcgaattgggacataaagaaagccgttgaaattctatcccaggagaaaaacattcctgtcgaagagatactgaaggttctcaacctcaaaaagatgacggggcttggctactccttgtaa

SEQ ID NO: 11049 - protein, 458 aa, Thermotoga maritima
MRKERDYLGKLEIEGEVYYGIHTKRALMNFPSTGEKLDETFIWAYFMVKKACALLNTELGYLDERTGNAIVKACDEWEDLKKHVVVDPLSGGAGTSINMNVNEVIANRATEILGGKKGEYLVDPIDHVNLHQSTNDTFPTSAKIATIVKLRRLIDEVINLQEKIQEKEKEFYSIRKPGRTQLMDGPPIMLGQEFGAFADALARDRWRLYKVEERIRSVNIGGTAIGTGVGAPKDYILKIVEKVREVTKVKIAKAENLIDATQNWDVFAEVHGLLKSLAVNLYKISNDIRLLGSGPNTVIGELILPAVQAGSSIMPGKINPVVSEYVMQICHMVFGHDMILNHACALGNLELNQFAPLIVHLTLKSLTLLTNACRSLASYISKIKANNERCEEHLRRSVSNLTPLIKLFGYEAVSEAIKKANWDIKKAVEILSQEKNIPVEEILKVLNLKKMTGLGYSL

SEQ ID NO: 11050 - DNA, 1407 bp, Campylobacter jejuni
  CDS (1)..(1407)
atgggaacaagaaaagaacatgattttattggggaattggaaatctctgatgaggtttattatggagtgcaaacttttagagctgttgaaaattttgatatttctcatgatagattaaaagattttcctcgctttgttagggctttggctagagtaaaaaaagctgcagctatggcaaatcatgaattaggtcttttggataaaaatatccaagatgcgattattaaagcgtgtgataaaattttagaaggtgggtattatgatcaatttgtagtagatatgatccaaggaggtgctggaacaagtacaaatatgaatgctaatgaagttatagcaaacataggacttgaacttatgggtcataaaaaaggtgaataccaatatcttcatccaaatgatcatgttaatttaagccaaagtactaatgatgcttatcctacagctttacaccttgccttgcatgattatttaagtgatttggcaaaagctatggaacatctaaaaaaagcttatgagagaaaagctgaagaatttaaagatgttcttaaaatgggtagaacccaactgcaagatgctgtacctatgactttaggtcgtgaatttaaaacttttgccgtaatgataggtgaagatatacaaagagtattagaagctagaaaattgattttagagatcaatttgggtggaactgctattggaacaggaattaattctcatcctgattatccgaaggttgtagaaagaaaaataagagaagtgacaggttttgaatatactgtggctgaggatttaatcgaggcgactcaagatacgggagcttatgtacaaatttcaggtgttttaaaacgtgttgcaacaaaactttctaaagtatgtaatgacttaagacttttaagtagtggtccaaaatgtggtcttaatgagattaatcttccaaaaatgcaaccaggtagttctatcatgccaggtaaggtaaatcctgttattcctgaagtagttaatcaagtttgttattttgttattggagcagacgtaactgtaacttttgcttgtgagggtggacaattacaacttaatgtttttgaaccagttgtagcatatagcttatttaattctgttgtaatgctagaaaaagcaatgtatactttagctgataaatgtatagatggtattaccgcaaatgaaaaaatttgttcagactttgtctataattcagtaggtatagtaacagctttaaatccttatattggttatgaaaattcagcttctatagccaaagaggcaatgaacactggaaaaagagtggctgatattgcgcttgaaagagggcttttaagcaaagaacaaattgatgaaattttaactccatcaaatatgctaaatcctcacatggaagctaaaaaatag

SEQ ID NO: 11051 - protein, 468 aa, Campylobacter jejuni
MGTRKEHDFIGELEISDEVYYGVQTFRAVENFDISHDRLKDFPRFVRALARVKKAAAMANHELGLLDKNIQDAIIKACDKILEGGYYDQFVVDMIQGGAGTSTNMNANEVIANIGLELMGHKKGEYQYLHPNDHVNLSQSTNDAYPTALHLALHDYLSDLAKAMEHLKKAYERKAEEFKDVLKMGRTQLQDAVPMTLGREFKTFAVMIGEDIQRVLEARKLILEINLGGTAIGTGINSHPDYPKVVERKIREVTGFEYTVAEDLIEATQDTGAYVQISGVLKRVATKLSKVCNDLRLLSSGPKCGLNEINLPKMQPGSSIMPGKVNPVIPEVVNQVCYFVIGADVTVTFACEGGQLQLNVFEPVVAYSLFNSVVMLEKAMYTLADKCIDGITANEKICSDFVYNSVGIVTALNPYIGYENSASIAKEAMNTGKRVADIALERGLLSKEQIDEILTPSNMLNPHMEAKK

SEQ ID NO: 11052 - DNA, 1452 bp, Vibrio cholerae
  CDS (1)..(1452)
atggctaccctatctgaagcgcctaaaacagcgactccggctacccgcgttgaagaagatctgttaggtcaacgtcacgttcctgctgatgcttactacggtattcatacccttcgcgctgtcgaaaacttcaacatctctaacgttacgatctctgacgtgcctgaatttgtacgcggcatgatcatgaccaaaaaagcggccactctggcaaacaaagagctgggcgtgattcctaaagatgtggcgaactacatccttcaagcgtgtgatttgattcttgaaacaggtaagtgcatggatcaattcccgtcagatgtattccaaggtggtgcgggcacgtcagtgaacatgaacaccaacgaagtgattgctaacgttgcactcgagctgatgggcaaacaaaaaggtcaatacgagttcatcaaccccaatgaccacgtaaacaagagccaatcaaccaactgtgcatacccaacgggtttccgcatcgcggtttacaacagcatcctgaaagtgattgatgcgattgaatacctaaaaggctcattcgaacttaaagcggctgagtacaaaaacatcctgaaaatgggtcgtactcagttgcaagacgctgtacctatgaccgtaggtcaagaattccacgcatgggctgtgacgctgaatgaagagatccgcgcgctgcaatacacttcaaaactgcttttggaagtgaacttgggcgcaaccgcgatcggtactggcctgaacgccgctccgggttaccaagagctggccgtgaaatatctggcgcaagtgacaggtttagaaaccgttccagcagaagatctgattgaagccacctctgactgtggtgcttacgtgatgactcacggcgcgttgaaacgtctagcgatgaagctctctaagatctgtaacgatctacgtctgctctcttctggtccacgtgcaggtctgaatgaaatcaacttgcctgaactgcaagcgggttcgtccatcatgccagcgaaagtaaacccagtaatcccagaagtggtgaaccaagtttgctttaaagtattcggtaacgacaacaccattacattcgccgcagaagcgggtcaactgcagttgaacgtcatggagcctgtgattgctcaagcgatgtttgagtctatctctctgctgactaacgcctgtgtcaacctacgcgacaagtgcattgatggcatcacagtcaacaaagaaatctgtgaaaacttcgtgtttaactctatcggtatcgtgacttacttaaacccatacattggccaccatgagggtgacattgtcggtaagatctgtgccgaaaccggtaagagcgtacgcgaagtggtacttgagcgcggcttgctaactgaagagcagctcgatgacatcttctcggttgagaacctgatgcatcctcagtacaaagcaaaacgttacgaataa

SEQ ID NO: 11053 - protein, 483 aa, Vibrio cholerae
MATLSEAPKTATPATRVEEDLLGQRHVPADAYYGIHTLRAVENFNISNVTISDVPEFVRGMIMTKKAATLANKELGVIPKDVANYILQACDLILETGKCMDQFPSDVFQGGAGTSVNMNTNEVIANVALELMGKQKGQYEFINPNDHVNKSQSTNCAYPTGFRIAVYNSILKVIDAIEYLKGSFELKAAEYKNILKMGRTQLQDAVPMTVGQEFHAWAVTLNEEIRALQYTSKLLLEVNLGATAIGTGLNAAPGYQELAVKYLAQVTGLETVPAEDLIEATSDCGAYVMTHGALKRLAMKLSKICNDLRLLSSGPRAGLNEINLPELQAGSSIMPAKVNPVIPEVVNQVCFKVFGNDNTITFAAEAGQLQLNVMEPVIAQAMFESISLLTNACVNLRDKCIDGITVNKEICENFVFNSIGIVTYLNPYIGHHEGDIVGKICAETGKSVREVVLERGLLTEEQLDDIFSVENLMHPQYKAKRYE

SEQ ID NO: 11054 - DNA, 1413 bp, Clostridium acetobutylicum
  CDS (1)..(1413)
atgtttgatttgccttctgattttagaatagaaaaagacttacttggagaaaaaaacttacctaaagagtcctactacggaataaactctctaagagcctttgaaaactttaatataagcaataaaaaagtaaatttaaatttaatatatgcagtggtaattgtaaaaaaagcggctgctttagctcataaaaaactcaaggaacttaaagatgaaaaagcagatgctataataagcgcttgtgatgacatattaagtggaaaatttgacgatgagttcattacaaattctcttcaaggcggtgctggaacctcaaccaacatgaatgtaaatgaagtcattgcaaacagagctattgaattacttaatggctcaaagggtgactactctataatccacccaattgaagatgttaatatgtctcagtcaaccaatgatgtatacccaactgctcttagaattgcagctataaaacttctaaggcctttatctgatgctttaagtaaacttcaagaatcctttcaaataaaagaaaatgatttttcagatatacttatgcttggaaggacagaacttatggatgccttacctatgatggtaggtcagggctttggagcttatgcaaaagcctttgctagggatagatggcgaatatataaggttgaagagagacttcgtgagataaatattggaggaaatgccataggaactggaataaatgcttcctatgattatattttcactgttactgacatacttcaagatttaacaggactcgggcttgcaagaagtgattacccaatggatgtaacacaaaacatggatgtatttgtagaggtgtcaggtcttttaaaatcctgcgctgttaatcttataaaaatttcaaatgacataagacttttaaatagcggccctgtaggtggtataggagaatttattgttgaagaggttcaagctggttcatcaattatgccaggaaaagtaaaccctgttatatgtgaaatgacagctcaaacttctatgaaggttatggcaaacgatactgctatctccctcgcctcatcttttggacagcttcaattaaatgctttttctcctctaattgctgaaagccttttagaatctcttgaaatacttactaatgcagttaatgtgttcagggaaaaatgcatagattcaataaaaattaatgaagaaaaatgtcttgagaatttagaagcttctacagcactcgttacagccttagttcattatataggttatgataaagcatctattatagcaaaaaaagctctaaaagaaaaaaaatccatacgggaattactccttttagaaaaaattttaacaaaagaagaaatagataaaatacttaatccttatgagattacaaaacctggcataccaggactatag

SEQ ID NO: 11055 - protein, 470 aa, Clostridium acetobutylicum
MFDLPSDFRIEKDLLGEKNLPKESYYGINSLRAFENFNISNKKVNLNLIYAVVIVKKAAALAHKKLKELKDEKADAIISACDDILSGKFDDEFITNSLQGGAGTSTNMNVNEVIANRAIELLNGSKGDYSIIHPIEDVNMSQSTNDVYPTALRIAAIKLLRPLSDALSKLQESFQIKENDFSDILMLGRTELMDALPMMVGQGFGAYAKAFARDRWRIYKVEERLREINIGGNAIGTGINASYDYIFTVTDILQDLTGLGLARSDYPMDVTQNMDVFVEVSGLLKSCAVNLIKISNDIRLLNSGPVGGIGEFIVEEVQAGSSIMPGKVNPVICEMTAQTSMKVMANDTAISLASSFGQLQLNAFSPLIAESLLESLEILTNAVNVFREKCIDSIKINEEKCLENLEASTALVTALVHYIGYDKASIIAKKALKEKKSIRELLLLEKILTKEEIDKILNPYEITKPGIPGL

SEQ ID NO: 11056 - DNA, 1407 bp, Helicobacter pylori
  CDS (1)..(1407)
atgcgtattgagcatgatttcattgggcaaatggaaattagcgatgaagtttattacgggattcaaactttaagggcgagtgaaaattttttcatcaccaacgacaagctttgcagttatcctgtttttatcaaatcttttgctcaagtcaaaaaagcggccgctttagcgaacgcgcaattaggcttgattgatgaaaagcttaaaattgcgatttgccatgcgtgcgatttgttggttgatggcaaataccatgatcaattcattgtggatatgattcaagggggggctggcacaagcacgaacatgaacatgaatgaagtgattgctaatttggctttagaatacatggggcatcaaaagggcgagtatcaattttgccacccaaacgaccatgtcaaccgctctcaatccaccaatgacgcctatcctagcgcgttaaaaatcgcgatttatgagcgcttgagcaatctagttgcccccatgaaagccttaagggacgctttcgctcaaaaggctaaggaattcgctcatgtgattaaaatggggcgcacccagcttcaagacgctgtgcctatgactttagggcaagagtttgaaacttatgcgttgatggttgatagggatattgagcaggttttagacgctaggaattgggtaagagagcttaatttaggcggcacggttattggcacagggatcaattcgcacccggattatcgcagtttgattgaaaagaaaatccaagaagtaacgggccgcccctttgtcatggctaacaacttgatagaagccactcaaagcacgggggcgtatgtgcaagtgagcggggtgttaaagcgtattgcggtgaaactttctaaggtttgtaacgatttaaggctgctcagttcaggccctagagccgggttgaatgaaatcaatttgcctaaaatgcagccgggtagctctatcatgcccggtaaagtcaatccggtgatccctgaagtggtcaatcaagtgtgctttgcggtgattgggaacgatttgagcgtggcgttagccgcagaaggagggcaattgcaactcaatgtgtttgagccggttatcgcttacaagcttttccattcctttgtgattttagggcgcgcgattgaaactttaacgactaaatgcgtggaaggcatcacggctaatgaaaagatttgccacgattatgtttttaacagcattggcattgttaccgcgctcaaccctcatatcggctatgaaaaatccgctatgatcgccaaagaagccttaaaaagcgatcgctctatctatgatatcgctttagaaaagaaaatcttaaccaaagagcaactggacgatattttcaagccagaaaacatgctaagccctcacgctttcaaaaagcataaagactga

SEQ ID NO: 11057 - protein, 468 aa, Helicobacter pylori
MRIEHDFIGQMEISDEVYYGIQTLRASENFFITNDKLCSYPVFIKSFAQVKKAAALANAQLGLIDEKLKIAICHACDLLVDGKYHDQFIVDMIQGGAGTSTNMNMNEVIANLALEYMGHQKGEYQFCHPNDHVNRSQSTNDAYPSALKIAIYERLSNLVAPMKALRDAFAQKAKEFAHVIKMGRTQLQDAVPMTLGQEFETYALMVDRDIEQVLDARNWVRELNLGGTVIGTGINSHPDYRSLIEKKIQEVTGRPFVMANNLIEATQSTGAYVQVSGVLKRIAVKLSKVCNDLRLLSSGPRAGLNEINLPKMQPGSSIMPGKVNPVIPEVVNQVCFAVIGNDLSVALAAEGGQLQLNVFEPVIAYKLFHSFVILGRAIETLTTKCVEGITANEKICHDYVFNSIGIVTALNPHIGYEKSAMIAKEALKSDRSIYDIALEKKILTKEQLDDIFKPENMLSPHAFKKHKD

SEQ ID NO: 11058 - DNA, 2867 bp, Serratia marcescens
  CDS (787)..(2223)
gaattcgccgtcgaaggtattgccgttggcggcgtcgccgcccgtccaaccgccggggcgatacaccgacaggtgcggcatcagtttcagcgtcagcgatttttgcaccggcggcagcagcagcaacaggccgaggaaatcggtgaagaaacccggtatcagcagcaggaagcccgccagcaccagcgaaacgcttttcaccatttccgccgccgggctttcgccggccgccagtttttgctgcatctgcacgaaggttttcatgccctgattgcgcaccagcgaaatgccgacgcaggagctgaacaccaccagcagcagggtgacagccacgccgagcacggcggcgactttgataaagatggatatttctatgtaagccagcagaaatatcagcagtagcggtaaccagcgcacctggttctcctatcggtaggtaaggcacggccgccacggggcgacggcgcgaaaaaagaggccgtaaacggccgacactattacaatgagggcatccccccaccatttcaaccgagagccggtttttattgctaaagttcacaaacgtgaaagaagtcacagaaccgaaaaagggcatatccttaaacaccataaggtgatctggattcagtcatttcttaccaaccagcatatgatctgggcagctacgggcgatttggttaatcgtttcacgccccaagccttcggcaatattaatttaggctgtgcccttactagccttgacctgacaaattattaattcggcagcaacacatagagaaggttctcatgtcaaacaacattcgtatcgaagaagacctgttaggaacacgtgaagtccccgcagacgcttactacggagttcacactctgcgtgcgattgaaaacttctacatcagcaacagcaaaatcagcgatgtccccgagttcgttcgcggcatggtgatggtgaaaaaggccgcggcgatggccaacaaagaactcaaaaccatcccgcgcaaaatcgccgacgtgatcatccaggcctgcgacgaggtgctggataaaggcaagtgcatggatcagttcccggtggacgtattccagggcggcgcgggcacctcgctgaacatgaacaccaacgaagtgctggcgaacatcggcctggagctgatgggccatcaaaaaggcgaataccagtacctgaacccgaacgatcacctcaataagtgtcagtccaccaacgacgcctacccgaccgggttccgcatcgcggtgtacgcctccaaccagaaactgatcgacgccatcaaccagctgcgcgaaggcttcgatcgcaaggcgaaagagttcgaaaccatcctgaaaatgggccgcacccagctgcaggacgcggtgccgatgaccctaggccaggaattccacgccttcagcgtgctgctgaacgaagagacccgcaatctgcaccgcaccgcgacgctgctgctggaagtgaacctcggcgccaccgccatcggcaccgcgctcaacaccccggaaggctaccagccgctggcggtgcaaaaactggcggaagtcagcggcctgccggtggtgccggcagaagacctgatcgaagccacctccgactgcggcgcctacgtgatggtgcacagcgcgctcaaacgcctggcggtgaaactgtccaaaatctgtaacgacctgcgcctgctctcctccggcccgcgcgccggcctgaacgaaatcaacttgccggagctgcaggcgggatcgtccatcatgccggccaaagtgaatccggtggtgccggaagtggtcaatcaggtgtgtttcaaggtgattggcaacgacacttgcgttaccatggcggccgaagcgggccagctgcagctgaacgtgatggagccggtgatcggccaggcgatgttcgagtcgatccacatcctgaccaacgcctgctacaacctgctggaaaaatgcattaacggcatcaccgcgaataaagaagtctgcgaacactacgtcttcaactcgatcggtatcgtcacctatctgaacccgttcatcggccaccataacggtgacatcgtcgggaagatctgcgccgaaaccggcaagagcgtgcgcgaagtggtgctggaacgcggcctgctgaccgaagccgagctggatgacatcttctccgtggagaacctgatgcacccggcctataaagccaaacgctatacggatgaaaatgaacaataacagacctacccggtagccctgaaaggcacgctaaatcctctggatagcgtgcctttttacttttaggtgcccacaaaattttaacgttttattttcaatttacaccctaaatcattgggactgcatcaaggcggcaagagcgcaagtccccaggagcttactcaagtaagtgactggggtgagcgctcgcagccaacaccgatgcagtttcaaggatgacgggaaatctcattttaaggagtaaacactatgctagccgtagaattggttatcgttctgctggccatctttttaggggccaggttgggcggtatcggtatcgggttcgcggggggactgggcgtattggcgctggcgctgatcggcgtcaaaccgggcaacattcccttcgacgtcatctccatcatcatggcggtgattgcggcgatctccgccatgcaggtcgccggggggatggactacctggtgcaacagaccgaaaaactgctgcgcaagaaccccaagcacatcaccattctcgcccctatcgtcacctacttcctgaccatcttcgccggcaccggcaacatctcgctctcggcgctgccggtgatcgccgaggtggcgaaagaacagggcatcaagccttgccgcccgctgtcgac

SEQ ID NO: 11059 - protein, 478 aa, Serratia marcescens
MSNNIRIEEDLLGTREVPADAYYGVHTLRAIENFYISNSKISDVPEFVRGMVMVKKAAAMANKELKTIPRKIADVIIQACDEVLDKGKCMDQFPVDVFQGGAGTSLNMNTNEVLANIGLELMGHQKGEYQYLNPNDHLNKCQSTNDAYPTGFRIAVYASNQKLIDAINQLREGFDRKAKEFETILKMGRTQLQDAVPMTLGQEFHAFSVLLNEETRNLHRTATLLLEVNLGATAIGTALNTPEGYQPLAVQKLAEVSGLPVVPAEDLIEATSDCGAYVMVHSALKRLAVKLSKICNDLRLLSSGPRAGLNEINLPELQAGSSIMPAKVNPVVPEVVNQVCFKVIGNDTCVTMAAEAGQLQLNVMEPVIGQAMFESIHILTNACYNLLEKCINGITANKEVCEHYVFNSIGIVTYLNPFIGHHNGDIVGKICAETGKSVREVVLERGLLTEAELDDIFSVENLMHPAYKAKRYTDENEQ

SEQ ID NO: 11060 - DNA, 1428 bp, Bacillus subtilis
  CDS (1)..(1428)
atgttaaacggccaaaaagaatatcgcgtggaaaaagacttccttggggaaaaacaaattgaagcagatgtttattacggaattcagacgctccgtgcttctgaaaattttccgatcacaggatacaaaatccatgaggaaatgattaacgcactggcgattgtgaaaaaagctgcggctcttgccaacatggacgtgaaacggctgtatgaaggaattggccaagctatcgtacaagccgctgacgagattctggaaggcaagtggcacgatcagtttatcgtcgatccgattcagggcggtgccggaacttctatgaacatgaacgcgaatgaggttatcggaaaccgggcgcttgaaatcatgggacataaaaagggagattatatccatttaagtccaaacacacatgtgaacatgtcacagtctcagaacgatgtgttcccgactgctatccatatttccacattgaagctcttagaaaaactgctgaaaacaatggaagatatgcatagtgtgtttaaacaaaaagcacaggagtttcactctgttattaaaatgggccggacacaccttcaagatgcggttccgatccgtcttggccaggaattcgaagcttacagccgtgttctcgagcgtgatatcaaacgaatcaagcaatcgcgccagcacctgtatgaagtcaacatgggcgcaactgctgttggtacagggctgaacgctgatcctgaatatatcaaacaggtagtaaagcaccttgctgatattagcgggcttcctcttgtcggcgctgatcatcttgttgatgcgacacaaaatacagatgcctatacagaggtatcagcttcattaaaagtctgcatgatgaacatgtcgaagatcgcaaacgacctgcgcttaatggcgtcgggaccgcgcgccggacttgcggaaatttctctgcctgcacgtcagccgggttcatctattatgccggggaaagtcaatccggttatggcggagctgatcaaccaaattgcgttccaggttatcggaaatgacaatacaatctgccttgcttcagaagccggccagcttgagttgaacgtcatggagcccgtgcttgtctttaatttgcttcaatccatcagcatcatgaacaacggcttccgttcgttcactgacaactgcttaaaaggcattgaagccaacgaaaagcgtatgaagcaatacgtagaaaaaagcgcaggcgtgatcacagctgtcaatccgcatcttgggtatgaagcggcagctagaattgccagggaagcaattatgacagggcaatctgtccgggatctttgtctgcagcatgatgtgctgactgaagaagaattggatattattttaaacccatatgagatgaccaaaccaggtatcgcagggaaagaactattagaaaaataa

SEQ ID NO: 11061 - protein, 475 aa, Bacillus subtilis
MLNGQKEYRVEKDFLGEKQIEADVYYGIQTLRASENFPITGYKIHEEMINALAIVKKAAALANMDVKRLYEGIGQAIVQAADEILEGKWHDQFIVDPIQGGAGTSMNMNANEVIGNRALEIMGHKKGDYIHLSPNTHVNMSQSQNDVFPTAIHISTLKLLEKLLKTMEDMHSVFKQKAQEFHSVIKMGRTHLQDAVPIRLGQEFEAYSRVLERDIKRIKQSRQHLYEVNMGATAVGTGLNADPEYIKQVVKHLADISGLPLVGADHLVDATQNTDAYTEVSASLKVCMMNMSKIANDLRLMASGPRAGLAEISLPARQPGSSIMPGKVNPVMAELINQIAFQVIGNDNTICLASEAGQLELNVMEPVLVFNLLQSISIMNNGFRSFTDNCLKGIEANEKRMKQYVEKSAGVITAVNPHLGYEAAARIAREAIMTGQSVRDLCLQHDVLTEEELDIILNPYEMTKPGIAGKELLEK

SEQ ID NO: 11062 - DNA, 2066 bp, Pseudomonas fluorescens
  CDS (323)..(1759)
gttgaccagcgtcagccccaacgcggcttccaggctgcggatacgccgactgaacgccggctgggtgacaaagcgccgctcagccgcctgggaaaaactacgcgtcgccgccagggcgctgaagtcttccaaccacttgctctcaaggttcatcactgcctcccacggaatgcaccattttggcacacacgcccgccaagataaccgggtcacatccacattatgccgtttgtgcataggccagtgtttaacagcattggcccaaaaagtcctacaagcctagcattcgcagcgttccggccagtcccgggtccatattgagatgatctccgtcatgtcctctgctgcatctttccgtaccgaaaaagacctgcttggcgtactcgaagtaccggctcaagcgtattacggcatccagaccctgcgagcggtgaataacttccgcctctcgggcgttccgatttcgcattacccgaaattggtggtcggtctggcaatggtcaagcaagcagcggctgacgccaaccgcgagttgggccagctcagcgaacgcaagcacgctgccatcagcgaagcctgcgctcgtctgatccgcggcgatttccacgaagagttcgtggtggacatgattcaaggcggcgctggcacttcaaccaacatgaatgccaacgaagtcatcgccaacatcgcgctggaggccatgggtcaccagaagggcgaataccagtacctgcaccccaacaacgacgtgaacatggcgcagtcgaccaacgacgcctacccgaccgcgatccgcctgggtctgctgctgggccatgacgcgctgctggccagcctcgacagcctgatccaggcgttcgccgccaaaggcgccgagttcagccatgtgctgaaaatgggccgcacacaattgcaagacgccgtgccgatgaccctcggccaggaattccgcgcgttcgccaccaccctgggtgaagacctggcccgcctgaaaaccctggcgccagagctgctgaccgaagtgaacctgggcggaaccgcgatcggtaccggcatcaacgccgacccgcgctaccaggccctcgccgtacaacgcctggccaccatcagcggtcagccgctggtaccggcggccgacctgatcgaagccacctccgacatgggcgctttcgtactgttctccggcatgctcaagcgtactgccgtgaagctgtccaagatctgcaacgacctgcgcctgctgtccagcggcccacgcaccggcatcaacgagatcaacctgccggctcgccagccaggcagctcgatcatgcccggcaaggtcaacccggtcatcccggaagcggtcaaccaggtagcgttccaagtcatcggtaacgacctggccctgaccatggcagccgaaggcggccaactgcagttgaacgtgatggagccgctgatcgccttcaagatcttcgactcgatccgcctgctgcaacgcgccatggacatgctgcgcgagcactgcatcgtcggcatcaccgccaacgaagcccgctgccgcgaactggtggaacattccatcggcctggtcaccgcgctgaacccatacatcggctatgaaaacgccacccgcattgcgcgtatcgcgcttgaaagcgggcgcggcgtgctggaactggtgcgtgaagaaggcttgctcgacgacgccatgctcgacgacatcctgcgccccgaaaacatgattgccccacgcttggtcccgctgaaggcctaagcgtttgttgcaccgctcaccaggctgagggactagacacctctcaccttttgagggcttgaagactcgttcttcaggcccttttttttgctcgtaattcctctccttatataaagcgctgttagtgcgtttcacctataaaacatcacgcctgcggcgttacttgaaaaagcattcattcattgcaaattcccattgcgtgcacaaacggtgtgcagtttcgtgccatataaaaacaatggtttcatatatgaaacgctcaataagtaaccttaatctcgcaactaattaatttaaaagggaattc

SEQ ID NO: 11063 - protein, 478 aa, Pseudomonas fluorescens
MISVMSSAASFRTEKDLLGVLEVPAQAYYGIQTLRAVNNFRLSGVPISHYPKLVVGLAMVKQAAADANRELGQLSERKHAAISEACARLIRGDFHEEFVVDMIQGGAGTSTNMNANEVIANIALEAMGHQKGEYQYLHPNNDVNMAQSTNDAYPTAIRLGLLLGHDALLASLDSLIQAFAAKGAEFSHVLKMGRTQLQDAVPMTLGQEFRAFATTLGEDLARLKTLAPELLTEVNLGGTAIGTGINADPRYQALAVQRLATISGQPLVPAADLIEATSDMGAFVLFSGMLKRTAVKLSKICNDLRLLSSGPRTGINEINLPARQPGSSIMPGKVNPVIPEAVNQVAFQVIGNDLALTMAAEGGQLQLNVMEPLIAFKIFDSIRLLQRAMDMLREHCIVGITANEARCRELVEHSIGLVTALNPYIGYENATRIARIALESGRGVLELVREEGLLDDAMLDDILRPENMIAPRLVPLKA

SEQ ID NO: 11064 - DNA, 1437 bp, Bacillus cereus
  CDS (1)..(1437)
atggcaacattaactgaagttaaaaatggtgttcgaattgaaaaagattttttaggtgaaaaagaagtaccaaactatgcatactacggtgtacaaacaatgcgtgcagttgaaaacttcccaattacaggatacaaaattcatgaaggtttaattagagcgttcgcagttgtaaaaaaagctgcagcgcttgcgaatacagatgtaggaagattggaattgaacaagggcggcgcaatcgcagaagctgctcaagaaattcttgacgggaaatggcatgatcatttcatcgtagacccaatccaaggcggagcaggtacttcaatgaacatgaatgcaaatgaagtcattgccaatcgtctcttgattattaggaatggaaagggagactatcattatattagtccaaatagtcatgtaaacatggcgcaatccacaaacgatgcattcccaacggcgattcatatcgctacattaaacgcattagaaggtttattacaaacgatgggctatatgcacgatgtatttgaattaaaagcagaacagttcgatcatgtgattaaaatgggtcgtacacatttacaagacgctgttccaattcgtcttggacaagaatttaaagcatactctcgcgtacttgaacgtgatatgaaacgaattcagcagtcacgtcaacacttatatgaagtgaacatgggagcaactgcagttggtacaggcttaaatgcagatccagaatatattcaagctgttgtaaaacatttagctgcaattagtgaactaccacttgttggtgcggaagacttagtagatgcaacgcaaaatacggatgcatatacagaagtatcagcagcactgaaagtatgtatgatgaatatgtctaaaattgccaatgaccttcgcttaatggcatcaggtccacgtgttggtttagcagaaattatgttaccggctcgtcaaccaggttcatctattatgccagggaaagtaaaccctgttatgccagaggtaattaatcaaattgcgttccaagtaattggtaatgaccatacaatttgtcttgcttcagaagcaggtcaattagaattgaacgttatggaaccagtactagttttcaacttacttcaatcaattagcattatgaataacggtttccgtgcctttacagataattgcttaaaaggaattgaagcgaatgaagatcgcttaaaagagtatgttgagaagagtgtaggaattattacagccgtgaaccctcatatcggttatgaagcagcagctcgcgttgcgaaagaagcaatcgcgacagggcaatccgttcgagaactttgtgtgaaaaatggtgtactgtcacaagaagacttagaattaattctagatccattcgaaatgacgcacccagggattgcaggagcaactcttttaaagaaaaattaa

SEQ ID NO: 11065 - protein, 478 aa, Bacillus cereus
MATLTEVKNGVRIEKDFLGEKEVPNYAYYGVQTMRAVENFPITGYKIHEGLIRAFAVVKKAAALANTDVGRLELNKGGAIAEAAQEILDGKWHDHFIVDPIQGGAGTSMNMNANEVIANRLLIIRNGKGDYHYISPNSHVNMAQSTNDAFPTAIHIATLNALEGLLQTMGYMHDVFELKAEQFDHVIKMGRTHLQDAVPIRLGQEFKAYSRVLERDMKRIQQSRQHLYEVNMGATAVGTGLNADPEYIQAVVKHLAAISELPLVGAEDLVDATQNTDAYTEVSAALKVCMMNMSKIANDLRLMASGPRVGLAEIMLPARQPGSSIMPGKVNPVMPEVINQIAFQVIGNDHTICLASEAGQLELNVMEPVLVFNLLQSISIMNNGFRAFTDNCLKGIEANEDRLKEYVEKSVGIITAVNPHIGYEAAARVAKEAIATGQSVRELCVKNGVLSQEDLELILDPFEMTHPGIAGATLLKKN

SEQ ID NO: 11066 - DNA, 1419 bp, Acinetobacter sp
  CDS (1)..(1419)
atgaacgctgaaattcaaactcgtacagaaaaggatttactgggtctacgtgaagtaccaaatcaattttacttcggtatccaaactttacgagcaattgaaaacttcaatctaagctctaataaaatcaatcaatatccaaatttgatcaaatcattagcgatggtgaagcatgcatgtgcagaagcaaaccatactttgggtaaattaagtgatttaaaatttaatgcaatcaaatatagctgtgatcagttaattcaaggtttttaccacgaacagttccccattgacctcattcagggtggtgcgggtacctctaccaacatgaatgccaatgaagtaattgcaaatattgcattagagcatttgggtcataaaaaaggtgaatacaactttttacatccaaacaatgatgtgaatatgtctcaatcgaccaatgacgtttatccaactgcaattcgcttaggtttattattcagcttagatgatttaaatacgccttttgaaaatttgattgctagcctacgccgtaagggtgatgaatttgcacatattttgaaaatgggccgtactcagcttcaagacgccgttccaatgactttgggtcaagaatttaatgcttttgcttctacacttgaaaaagatttgatcaagattagagaaatcgcgcctcaaactctaaattatatgaatcttggcggtactgcgattggtacaggaatcaatacagaacaaaaatatacccaacttgccattgatgcacttgcgacaattagccagaaagatatcaagtctgctcccgatttaatcgaagcgacttcagatatgggtgattttgtattgttgtcaggattacttaaacgtacagcaactaaactctcaaaaatcgccaatgatctacgtttactttcaagtggtccacgtactgggatcaatgaaattaatctagagccgcgccaacctggcagctcaatcatgccaggtaaagtaaacccagttattccagaggcaatgaatcttgtatgtttccagattattgcgaatgatttggctgtaactttatctgctgaagcgggtcaattacaattaaatgcaatggaacccctgattgcattcaaactgtttgaatcaattgagttacttggtaatgcgctcgtcatgttccaaaccaagtgtatcgataccgtgactgcaaacgaacaacattgtaaagcacttgtcgataattccattggaattgtgactgctctgaatccttatcttggatatgaaaccacaacacgtattgctaaaactgcaaatgaaagtggtttaagcgtattgagtctgatcaaatctgaaaacctgttgtctgatgatcaactttcagaaattttagcggttgacaatatggtgcaaccgaaagctgaaatggtttaa

SEQ ID NO: 11067 - protein, 472 aa, Acinetobacter sp
MNAEIQTRTEKDLLGLREVPNQFYFGIQTLRAIENFNLSSNKINQYPNLIKSLAMVKHACAEANHTLGKLSDLKFNAIKYSCDQLIQGFYHEQFPIDLIQGGAGTSTNMNANEVIANIALEHLGHKKGEYNFLHPNNDVNMSQSTNDVYPTAIRLGLLFSLDDLNTPFENLIASLRRKGDEFAHILKMGRTQLQDAVPMTLGQEFNAFASTLEKDLIKIREIAPQTLNYMNLGGTAIGTGINTEQKYTQLAIDALATISQKDIKSAPDLIEATSDMGDFVLLSGLLKRTATKLSKIANDLRLLSSGPRTGINEINLEPRQPGSSIMPGKVNPVIPEAMNLVCFQIIANDLAVTLSAEAGQLQLNAMEPLIAFKLFESIELLGNALVMFQTKCIDTVTANEQHCKALVDNSIGIVTALNPYLGYETTTRIAKTANESGLSVLSLIKSENLLSDDQLSEILAVDNMVQPKAEMV

SEQ ID NO: 11068 - DNA, 1431 bp, Bacillus anthracis str
  CDS (1)..(1431)
atggcaatgacaaacaagaacgtgcgaatggagaaggattttttgggaggaaaggaattacctattgaggcatattacggaattcagactttacgtgctgttgaaaattttccgattacagggtataaaattcatgaaagtttaattagagcgttcgcagttgtaaaaaaagctgcagcgcttgcgaatacagatgtaggaagattggaattgaacaagggcggcgcgatcgcagaagctgctcaagaaattcttgatggaaaatggcatgatcatttcatcgtagatccaatccaaggcggagcaggtacttcaatgaacatgaatgcaaatgaagtcattgccaatcgtgcgcttgaattattagggatggaaaagggagactatcattatattagtccaaatagtcatgtaaacatggcacaatcaacaaacgatgcattcccaacggcgattcatatcgcaacattaaacgcattagaaggtttattacaaacgatgggttatatgcacgatgtatttgaattaaaagcagaacagttcgatcatgtgattaaaatggggcgtacacatttacaagacgctgtgccaattcgtcttggacaagaatttaaagcatactctcgcgtacttgaacgtgatatgaaacgaattcagcaatcgcgtcaacatttatatgaagtaaatatgggagcaactgcagttggtacaggcttaaatgcagatccagaatatattgaagcagttgtaaaacatttagctgcaattagtgaactgccacttgttggtgcagaagatttagtagatgcaacgcaaaatacggatgcatacacagaagtatcagcagcacttaaagtatgtatgatgaatatgtctaaaattgcgaatgaccttcgcttaatggcatcaggtccacgtgttggcttagcggaaattatgctacctgctcgtcaaccaggttcttctattatgccagggaaagtaaaccctgttatgccagaagtaattaatcaaattgcattccaagtaattggtaacaaccatacaatttgtcttgcttcagaagcaggtcaattagaattaaacgtgatggaaccagtacttgttttcaacttactacaatcaattagcattatgaataacggtttccgtgcctttacagataattgcttaaaaggaattgaagcgaatgaagatcgcttaaaagagtatgttgagaagagtgtaggaattattacagccgtgaaccctcatatcggttatgaagcagcagctcgcgttgcgaaagaagcaatcgcgacagggcaatccgttcgagaactttgtgtgaaaaatggtgtattgtcacaagaagatttagagttaattttagatccatttgaaatgacacacccagggattgcaggagcaactcttttaaagaaaaattaa

SEQ ID NO: 11069 - protein, 476 aa, Bacillus anthracis str
MAMTNKNVRMEKDFLGGKELPIEAYYGIQTLRAVENFPITGYKIHESLIRAFAVVKKAAALANTDVGRLELNKGGAIAEAAQEILDGKWHDHFIVDPIQGGAGTSMNMNANEVIANRALELLGMEKGDYHYISPNSHVNMAQSTNDAFPTAIHIATLNALEGLLQTMGYMHDVFELKAEQFDHVIKMGRTHLQDAVPIRLGQEFKAYSRVLERDMKRIQQSRQHLYEVNMGATAVGTGLNADPEYIEAVVKHLAAISELPLVGAEDLVDATQNTDAYTEVSAALKVCMMNMSKIANDLRLMASGPRVGLAEIMLPARQPGSSIMPGKVNPVMPEVINQIAFQVIGNNHTICLASEAGQLELNVMEPVLVFNLLQSISIMNNGFRAFTDNCLKGIEANEDRLKEYVEKSVGIITAVNPHIGYEAAARVAKEAIATGQSVRELCVKNGVLSQEDLELILDPFEMTHPGIAGATLLKKN

SEQ ID NO: 11070 - DNA, 1461 bp, Photobacterium profundum
  CDS (1)..(1461)
atgtctcagatgattgatcttgaaaagaatgaagcaactctaaatgttgctactcgcattgaagaagatttacttggtgaacgtcacgttcctgctgacgcttactggggtatccacacacttcgcgctgttgaaaacttcaacatctcaaacactacaatttctgacgttcctgattttgttcgcggtatggttttcactaagaaagcagctgcaatggcgaacaaagagctaggcgctattccttcagaagttggtaactacatcatccaagcatgtgatttaattctagacactggtaagtgtatggatcaattcccgtctgatgtttaccaaggcggtgctggtacgtcagtgaacatgaacacaaacgaagttattgccaaccttgctcttgaactgatgggcaaagacaaaggcgaatacgacgtcgttaaccctaatgatcacgtaaacaaatcgcaatcaactaactgtgcgtacccaacaggcttccgtgttgctgtatacaacagcatcatgacaatgattgaagctattgattacctaaaaggtgctttcgacgcgaaagataaagaattcgcaggcgttctaaagatgggtcgtactcagcttcaagatgctgtaccaatgactgttggtcaagagttccacgcgtactcagttcttcttaaagaagaaatcaaaaaccttaagtacacagcagatcttctacttgaagtgaacttaggtgcaacagctatcggtactggcttaaacgcagcgactggttaccaagaacttgctgttcagcgtcttgctgaaatcactggtctaccatgtacaccagcagaagatttaatcgaagcaacgtctgactgtggcgcatacgtaatgatccacggtgctcttaagcgtactgcagttaaactgtctaagatttgtaacgacttacgtctactttcttctggtcctcgtacaggtttgaacgaactaaacctaccagaaatgcaggctggttcttctatcatgccagctaaagtaaacccagtaattcctgaagtagttaaccaagtttgcttcaaggttattggtaacgacacaacaattactttcgcagcagaagctggtcagcttcagttgaacgtaatggaacctgttatcggtcaagcactgttcgaatctatttcacttctgaaaaacgcttgtgtaactctacgtgataagtgcgtatcgggtatcacagtgaataaagaagtatgtgaaagttacgtatttaactcaatcggtatcgtgacttacctaaacccattcattggccaccacgaaggtgacattgttggtaagatttgtgctgaaacaggtaaaaacgtacgcgaagttgtacttgagcgtggtcttctaacggaagagcaactagacgacatcttctcggtacaaaacctaatgcacccagaatacaaagcgaagcgttataactaa

SEQ ID NO: 11071 - protein, 486 aa, Photobacterium profundum
MSQMIDLEKNEATLNVATRIEEDLLGERHVPADAYWGIHTLRAVENFNISNTTISDVPDFVRGMVFTKKAAAMANKELGAIPSEVGNYIIQACDLILDTGKCMDQFPSDVYQGGAGTSVNMNTNEVIANLALELMGKDKGEYDVVNPNDHVNKSQSTNCAYPTGFRVAVYNSIMTMIEAIDYLKGAFDAKDKEFAGVLKMGRTQLQDAVPMTVGQEFHAYSVLLKEEIKNLKYTADLLLEVNLGATAIGTGLNAATGYQELAVQRLAEITGLPCTPAEDLIEATSDCGAYVMIHGALKRTAVKLSKICNDLRLLSSGPRTGLNELNLPEMQAGSSIMPAKVNPVIPEVVNQVCFKVIGNDTTITFAAEAGQLQLNVMEPVIGQALFESISLLKNACVTLRDKCVSGITVNKEVCESYVFNSIGIVTYLNPFIGHHEGDIVGKICAETGKNVREVVLERGLLTEEQLDDIFSVQNLMHPEYKAKRYN

SEQ ID NO: 11072 - DNA, 1431 bp, Bdellovibrio bacteriovorus
  CDS (1)..(1431)
atggagttagtgatggaaaagttccgcgtagaaaaagatttgctgggtgaaaagaaagtccctgcggaagcttattacggcattcataccctgcgggcgatggagaactttcagatctcgggcatccctgtcggagccaatcaaagtttcgtgcgtggtctggcactggtgaaaaaagcctgcgcgttggccaatggtgaactgggcacaatcccggcggatgtttccaagtccttggttgaagcctgtgacatcgttttgcaggacccgaaaaaatggggtcagcagttcccatccgacgtttatcagggcggcgcggggacttcgatcaacatgaatgccaacgaagtgattgccaatatcgcattggaaaaacgcggtctgcaaaaaggcacctacgcggtgatcaaccctaatgatcacgtgaataagtgccagtccacgaatgatgcttatccgaccgctttccgagtggcgctgtatgaacacctgaacggaactttggcggcgctggattctttggctttggccttcgagaaaaaaggcaaagaattccagagcgttttgaaaatgggccgcacgcagttgcaggatgcagttcccatgtctttggggcaggagtttaacgcttttgccactttactaaaagaagacggtcgtctgatccgcactgttcagaaattcatgctggaagtgaacttgggggccaccgcgattgggactggcatcaacacacctccgggttatgcgtctttggcggtgcaaaagctggctgaggtcaccgggcatccgtttgttcagtcggaagattacatcgaagccaccagcgactgtggtgcctacatcattatctctggcgcactgaaacgcacggcagtgaaactttcgaaaatctgcaacgacttgcgcttgcttagttctggtccgcgtgcgggcttgaaagaaatcaacctgcctgaaatgcaggcgggttcttccatcatgccggcaaaagtgaatccggtgattccggaagttgtgaatcaggtcagcttcaaaatcatcggcaatgacctggcgatcaccctggcggccgaagcagggcagctgcagctgaatgtgatggaacctgtgatcgcctccagtctgtttgagtctttggatcttttgaagaatgcctgtgaaaccctggaacataaatgtgtgaagggtattacggccaatgcagaacgctgccgggactacgtcatgaacagcatcggtattgtgacttatctggatccgatcatcggtcacgatgaaggcgaccgtatcggaaaaatctgtgcggagaccggtcgcaacgtggctgaagtggccctggagcgaggcgtggtgactcaggcgcaactggatgaactgttctcaatggaaaatctgctgaacccgaaatacgtcggcaagaagcactag

SEQ ID NO: 11073 - protein, 476 aa, Bdellovibrio bacteriovorus
MELVMEKFRVEKDLLGEKKVPAEAYYGIHTLRAMENFQISGIPVGANQSFVRGLALVKKACALANGELGTIPADVSKSLVEACDIVLQDPKKWGQQFPSDVYQGGAGTSINMNANEVIANIALEKRGLQKGTYAVINPNDHVNKCQSTNDAYPTAFRVALYEHLNGTLAALDSLALAFEKKGKEFQSVLKMGRTQLQDAVPMSLGQEFNAFATLLKEDGRLIRTVQKFMLEVNLGATAIGTGINTPPGYASLAVQKLAEVTGHPFVQSEDYIEATSDCGAYIIISGALKRTAVKLSKICNDLRLLSSGPRAGLKEINLPEMQAGSSIMPAKVNPVIPEVVNQVSFKIIGNDLAITLAAEAGQLQLNVMEPVIASSLFESLDLLKNACETLEHKCVKGITANAERCRDYVMNSIGIVTYLDPIIGHDEGDRIGKICAETGRNVAEVALERGVVTQAQLDELFSMENLLNPKYVGKKH

SEQ ID NO: 11074 - DNA, 1575 bp, Corynebacterium diphtheriae
  CDS (1)..(1575)
atggcttcccaagctaaaaacacaaagggctcgaaaaacgccgaggtaaccaatgatgttctcgacggaaaaaccgaaggcaccgcggagaaagtaaacgatgcccccattgcatcagatgtaacaacaaagcacgccactaagaaagctgcaccaggattccgtatcgaagaagacctcttgggtgagatggaagttcccgacgaggtttattatggcgtccatactcttcgtgccatcgacaattacaagatctctagcaccaccattaatgatgtgccagagttcattcgtggcatggttcaggtaaaaaaggccaccgcgcttgccaaccgacgactccatactctgccgaaagacaagtgcgatgccattgtatgggcttgcgatcaaatcttggatcacggtcgttgcatggatcagttcccaatcgatgtgttccaaggaggcgctggcacaagcgtcaacatgaacactaatgaggtaatcgccaacctcgcactggagcatctgggtaagccaaagggatcctatgacatcatcaacccaaacgatgacgtcaacatgagccaatcaactaacgatgcctacccaactggattccgtttgggtgtctatgaggcgatgcaggaactgatcactcgtattgacaatctacagttcgcattccatgccaaaggtgatgagttcaccgatattctgaagatgggtcgcacacagctccaagatgctgtaccgatgactttaggcgaggaattccaggcattcgctcataacttggctgaggagcaaagcgttctgcgtatggcttccgaccggctcaaggaagttaacttgggcgcaaccgctatcggtactggcttgaacaccccagccggttaccgttatcaggttgtagccgcattgtccgagtgcaccggcttggaaattaagtctgcacgcgatcttattgaagctacttcagacactggtgcgtatgtccttgcccatgcagctgttaagcgtactgcgatgaagctttctaagatctgcaatgatcttcgactgctcagctccggaccacgcgcaggtctcaacgagattaatcttcccgctcgagctgcaggttcatcgatcatgccggcaaaggtcaacccagttatccctgaggttgttaaccaggtttgcttcaaggtttttggtaacgatcttactgtcaccatggcggcagaagctggccagctccagctcaatgtgatggaaccggttatcggccaagccttgtttgagtcgattcgaattctcggtaatgctgcagtcacccttcagcacaagtgtgtcgaagggattaccgcaaatgctgacgtatgtcgcgcctacgtagataattccattggtatcgttacctatctcaaccctttcattggtcaccatatgggtgacgtgattggcaaggaagctgctgagaccggcaagtccgtacgtgagcttgtattggaaaagggactaatggatgaagagactttgaaccaaatcctgtccaaggaaaatctaatgcacccttcgtttcgtggaaccctctacctagataactag

SEQ ID NO: 11075 - protein, 524 aa, Corynebacterium diphtheriae
MASQAKNTKGSKNAEVTNDVLDGKTEGTAEKVNDAPIASDVTTKHATKKAAPGFRIEEDLLGEMEVPDEVYYGVHTLRAIDNYKISSTTINDVPEFIRGMVQVKKATALANRRLHTLPKDKCDAIVWACDQILDHGRCMDQFPIDVFQGGAGTSVNMNTNEVIANLALEHLGKPKGSYDIINPNDDVNMSQSTNDAYPTGFRLGVYEAMQELITRIDNLQFAFHAKGDEFTDILKMGRTQLQDAVPMTLGEEFQAFAHNLAEEQSVLRMASDRLKEVNLGATAIGTGLNTPAGYRYQVVAALSECTGLEIKSARDLIEATSDTGAYVLAHAAVKRTAMKLSKICNDLRLLSSGPRAGLNEINLPARAAGSSIMPAKVNPVIPEVVNQVCFKVFGNDLTVTMAAEAGQLQLNVMEPVIGQALFESIRILGNAAVTLQHKCVEGITANADVCRAYVDNSIGIVTYLNPFIGHHMGDVIGKEAAETGKSVRELVLEKGLMDEETLNQILSKENLMHPSFRGTLYLDN

SEQ ID NO: 11076 - DNA, 1407 bp, Desulfovibrio vulgaris
  CDS (1)..(1407)
atggaatacaggacagaacgtgacagcctcggagaaaaacgggttcctgccggtgtctactacggcgtgcagacattgcgtgccttggagaatttccagataacggccatgccggtggcgacgtttccgcggttcatacaggcactcgccgccgtcaagaaggctgcggccctcgccaacatggaactcggtctgcttgatgcgggcgtcggtgaagccatcgtcaatgcctgccgcgacgtgcgcgcgggcaggttcgacgaccagtttcccgtggatgtcatccagggcggggcgggaacctcggtgaacatgaacgccaacgaggtcatcgccaaccgggcgctggaactcctggggcacccgaaagggcgctatgaggtcataagccctctcaatcacgtgaacctctcgcagtcgaccaacgatgtctatccgacggcgctacgcatcgccctcgtctggtatgcacgcgagttgtcaacggcgctgcgcgacctgcgggccgccttcgacgcgaaaggtgacgagtttgccggggtcatcaagatggcgcgcacccagttgcaggacgcggtccccatcacgctgggtgccgaattcgcggcatggggcgtcaccatcggcgaggacatcgacaggcttgatgacgctgcgcgtctgctgtgcgaggtgaacataggtgccacggccgtcggcaccggcatcaacagtgtgccgggatatgcctcgctggtacgtgaacgtctcgcggatatatgcggtctgcctctggtcaccgccgccaacctcgtggaggcgaccagtgacgcaggtgcctatgtcatgctgtccggtctgctcaaacgcgtggccgtgaagctgtcgaagatatgcaacgacctgcggctgcttgcttccgggccgttcaccggtctgcatgaaatcaacctgccacccatgcagccggggtcgagcatcatgccgggcaaggtcaaccccgtcattcccgaagtggtcaatcaggtctgctatcaggtgatcggcaacgacctcacggtgaccttcgccgccgagggggggcagcttgaactcaatgtctttctgcctgtcatcgccctcaacctcttccagtcgttgcagatgctcacgaaggcgtcgcgcaccctgcgcgagcggtgtgttgtcggcatcaccgccaaccccgaacggtgcctcgagcttgtgcggcattctctcggggtcgtcacggcgcttgctccggtgataggctatgagaccgccgcccgactggccaaggaggcgcaggagagcgggcgttccgtgcccgaggtgctgcaggccgagggcatcatgacgccggaggagttcgaagagcttctggaccctgccaagatgctctccccacgcgatgttcgccggaggtga

SEQ ID NO: 11077 - protein, 468 aa, Desulfovibrio vulgaris
MEYRTERDSLGEKRVPAGVYYGVQTLRALENFQITAMPVATFPRFIQALAAVKKAAALANMELGLLDAGVGEAIVNACRDVRAGRFDDQFPVDVIQGGAGTSVNMNANEVIANRALELLGHPKGRYEVISPLNHVNLSQSTNDVYPTALRIALVWYARELSTALRDLRAAFDAKGDEFAGVIKMARTQLQDAVPITLGAEFAAWGVTIGEDIDRLDDAARLLCEVNIGATAVGTGINSVPGYASLVRERLADICGLPLVTAANLVEATSDAGAYVMLSGLLKRVAVKLSKICNDLRLLASGPFTGLHEINLPPMQPGSSIMPGKVNPVIPEVVNQVCYQVIGNDLTVTFAAEGGQLELNVFLPVIALNLFQSLQMLTKASRTLRERCVVGITANPERCLELVRHSLGVVTALAPVIGYETAARLAKEAQESGRSVPEVLQAEGIMTPEEFEELLDPAKMLSPRDVRRR

SEQ ID NO: 11078 - DNA, 1413 bp, Desulfovibrio vulgaris
  CDS (1)..(1413)
atgtctttgtctgatcaggacgccatccgcatcgagcacgacttgctcggcgactgtgcggttccccgcacggccttgcacggtgcgcatacgcaacgggcgctctccaatgtcgccctcagcggccgcccgttgcacccggaaatcatcagggcattcggggccgtgaagcgtgcctgtgcacgtaccaacatgaacctcggccacctctcccgtgaggtggccgaggccatcatcatggcatgtgatgagcttgaagatggcgggttgggcgagcacatcgtggtcgacgcactgcaaggcggcgctggcacctccgccaacatgaacgtcaacgaagtgctggcgaaccgcgccgaagagatgctgggcggcacgcgaggccagtaccagcttgtcgacccgctggcgcacgtcaatctgcatcagtccaccaacgatgtgttccccacggcagtgcggattgcggcattgcgtctgctggcgcgactcgaaccggcgattgccgcactccagtccgcattccagacgcacgaggcatcgttcgcgcaggtggtgcggctggggcgcacccagttgcaggatgccgtgcccatgacattcggggcagcctgtggcgcgtgggccgaagccctttcgcgggacaggtggcgcgtgttcaagtgttcggagagactgcgcgtcgtcaatctgggaggaaccgccatcggcaccggcatcgcagccccccgaagctacatcctctctgtcgtggacaggttgcgtgaagacacgggcctgcctctcgcaagagcagaaaacctcatggacgccacacagaatgtcgatgcgttcgtcgaggtgtctggcatactcaaggcccacgcctcgaatctgctcaagctttcctccgacctgcgcctgctggcgtcggggccgggtggcggcatcggcgaggtcgtactcccgcccgtccaggccgggtcgagcatcatgcccggcaaggtcaacccggtcgtgtgcgagaccgtggcacaggcggccatgcaggcaacggccaacgaccttgccatcaccctgtccgcccagcacggtcagcttgaactgaacgccttcatgccgctcatcgctgatgcgctgctgcatggcatcgagcttctcacgaatgcctgcgacctgttccgtacgcgctgtgtcgaagggttacaccctgatacggaaacctgcgcccggcacgtttccacatcgacagccacgcttacggcactcgttcctgaaatcggctacgccgccgcctctgaaatggcccgccacatgcgcgaacacggcacggacgtcttcggggctgccaaagcgacaggactcatcgacgaagaccggcttgcaaggctgctttctcctgaacgtctcgtggcactggggtacagaggatga

SEQ ID NO: 11079 - protein, 470 aa, Desulfovibrio vulgaris
MSLSDQDAIRIEHDLLGDCAVPRTALHGAHTQRALSNVALSGRPLHPEIIRAFGAVKRACARTNMNLGHLSREVAEAIIMACDELEDGGLGEHIVVDALQGGAGTSANMNVNEVLANRAEEMLGGTRGQYQLVDPLAHVNLHQSTNDVFPTAVRIAALRLLARLEPAIAALQSAFQTHEASFAQVVRLGRTQLQDAVPMTFGAACGAWAEALSRDRWRVFKCSERLRVVNLGGTAIGTGIAAPRSYILSVVDRLREDTGLPLARAENLMDATQNVDAFVEVSGILKAHASNLLKLSSDLRLLASGPGGGIGEVVLPPVQAGSSIMPGKVNPVVCETVAQAAMQATANDLAITLSAQHGQLELNAFMPLIADALLHGIELLTNACDLFRTRCVEGLHPDTETCARHVSTSTATLTALVPEIGYAAASEMARHMREHGTDVFGAAKATGLIDEDRLARLLSPERLVALGYRG

SEQ ID NO: 11080 - DNA, 1434 bp, Bacillus cereus
  CDS (1)..(1434)
atgatagcaacgaaggatatacgtatagaaaaagattttttaggtgaaaaggaagtaccaagtagagcttattatggtgtacaaacattacgtgcggtagaaaatttcccgattacagggtatcgcattcatccatcactcattacggcaatggcaattgtgaaaaaagcggcggcacttgcaaatatggatactggttacttagcgaaagacattggacacgaaattgcagaggcagcacaagaaattgttgatgggaaatttcatgatcaatttattgtagatccaattcagggcggtgctggaacttctattaatatgaatacaaatgaagtaatcgctaatcgagcgttagaacgtatgggatatgaaaaaggcgagtatgcaaaaattagcccaaatacgcatgtaaacatggctcagtcaacgaatgatgcgtttccaacaggaattcatattgcaactcttatgatgttagaagaacttcttattacaatggaagaacttcatgctgctttccttgcaaaagcaaaagagttcgatcacgtcattaaaatgggacgtacgcatttacaagatgctgttccgattcgtcttggacaagaatttgaagcgtatagcagagtgcttgcgcgtgatataaaaagaattaaacaatctcgccaacatttatatgaagtgaatatgggggcgacagctgttggtacgggattaaatgcaaaccctacctacattgaacaagtggttaaacacttacgaacatttagcggattcccacttgttggtgcagagcatttagttgatgcaacacaaaatacagatgcatacacagaagtatctgcagcattaaaagtatgtatgatgaatatgtctaaaattgcgaacgaccttcgtattatggcatctggtccacgtgttggattggcggaaattcaattaccagctcgtcaaccaggttcatctattatgccaggtaaagtaaatcctgttatggcagaagtaattaatcaagtcgctttccaagtaattggtaatgatcacacaatttgcttagcgtcagaagcaggacaactggagctcaacgtaatggagcctgtgcttgtatttaatttaattcaatctatcagtattatgaataacggattccgtgtattccgtgaatattgtattaaaggaattacagcaaatgaagaactgctgaagcaatatgttgagaaaagtgttggaattattacagcagttaaccctcatattggttatgaagtagcatcacgtattgcacgtgaagcaattgaaacaggaaaatctgttcgggagttatgtttagaacatggtgtactgacagaagaagaattagatattattttagatccattcgaaatgacgcatcctgaaattgctggtgcttctttactaaagaataagaagatgtaa

SEQ ID NO: 11081 - protein, 477 aa, Bacillus cereus
MIATKDIRIEKDFLGEKEVPSRAYYGVQTLRAVENFPITGYRIHPSLITAMAIVKKAAALANMDTGYLAKDIGHEIAEAAQEIVDGKFHDQFIVDPIQGGAGTSINMNTNEVIANRALERMGYEKGEYAKISPNTHVNMAQSTNDAFPTGIHIATLMMLEELLITMEELHAAFLAKAKEFDHVIKMGRTHLQDAVPIRLGQEFEAYSRVLARDIKRIKQSRQHLYEVNMGATAVGTGLNANPTYIEQVVKHLRTFSGFPLVGAEHLVDATQNTDAYTEVSAALKVCMMNMSKIANDLRIMASGPRVGLAEIQLPARQPGSSIMPGKVNPVMAEVINQVAFQVIGNDHTICLASEAGQLELNVMEPVLVFNLIQSISIMNNGFRVFREYCIKGITANEELLKQYVEKSVGIITAVNPHIGYEVASRIAREAIETGKSVRELCLEHGVLTEEELDIILDPFEMTHPEIAGASLLKNKKM

SEQ ID NO: 11082 - DNA, 1392 bp, Treponema denticola
  CDS (1)..(1392)
atgcgaagggaacatgacttactcggagaattggatattccggaagatgcttattatggaattcaaacattccgcagtgttgaaaattttcaaattacaggattaaggctctgtgattttcccgattttattaagggtcttgcttatacaaagcaggctgcagccgaagccaaccatgaactcggctatttaagcgatgaagtttacaaggctatgattcaggcttgtaaagaagttgccgaaggcaaattcgataaggaatttgtagtcgatatgattcagggcggagcaggaacttctaccaatatgaatgcaaatgaagttatcgccaaccgcgcaaacgaaatcttaggaaaggccaagggaacttattcgccctgccatcccaataatcacgtaaactttgctcaatctacaaacgacgcttatcctacagctgcaaagctcggcatctcgttaaatacaccggctcttatagatgaactcaaatctcttgttgcttcttttagaaaaaaggcccaagaacttggagaaaatatcaagatgggaagaacccagcttcaagatgccgtacccatgaccctcggccaagagtttgaatcctatgccgcttctttggaaaacgaaattcctcagattcagtttgcaagggaaaatcttcacaccataaacatgggagctaccgctatcggaacaggtatcaactcggatcctaactatacaccgaaagtaacctctcatctggcaaaaatttcgggtcttgatctaaaggctgcaaaaaacatgatagctgccacgaacgatacatccgactttgtaacatattcttcacaattaaagcgcctttctgcaaagctttcaaagatatgcagcgatttacgccttctttcttcgggccccagaacaggactttacgatataagtcttcctccgatgcagcccggttcttctatcatgcccggaaaggtaaacccggttattcctgaggttgtcaatcaggtttgctacagggttatcggaaatgatactgccgttatcttggctgcagaatcaggccagcttgaactcaacgtttttgaacccgttataatttattctatctttgagtcgattaagcttcttataaatgcaatgaagactttgagggaacgatgcgttacgggcattgtaggaaactatgagcattgtaaggaaagcgttcaccgaagtatcggcttggttacggccttaaatcccgtcatcggttatgaggcttcttccgatattgcaaagactgccttgcgcgataaccgcagcgtttatgaccttgttttggaaagagggcttctttcaaaagaaaaattggatgaggttttaaaacccgaaaacatgacaaagcccagaaagctttag

SEQ ID NO: 11083 - protein, 463 aa, Treponema denticola
MRREHDLLGELDIPEDAYYGIQTFRSVENFQITGLRLCDFPDFIKGLAYTKQAAAEANHELGYLSDEVYKAMIQACKEVAEGKFDKEFVVDMIQGGAGTSTNMNANEVIANRANEILGKAKGTYSPCHPNNHVNFAQSTNDAYPTAAKLGISLNTPALIDELKSLVASFRKKAQELGENIKMGRTQLQDAVPMTLGQEFESYAASLENEIPQIQFARENLHTINMGATAIGTGINSDPNYTPKVTSHLAKISGLDLKAAKNMIAATNDTSDFVTYSSQLKRLSAKLSKICSDLRLLSSGPRTGLYDISLPPMQPGSSIMPGKVNPVIPEVVNQVCYRVIGNDTAVILAAESGQLELNVFEPVIIYSIFESIKLLINAMKTLRERCVTGIVGNYEHCKESVHRSIGLVTALNPVIGYEASSDIAKTALRDNRSVYDLVLERGLLSKEKLDEVLKPENMTKPRKL

SEQ ID NO: 11084 - DNA, 1392 bp, Geobacter sulfurreducens
  CDS (1)..(1392)
atgacgttccgggtcgagaaggataccctcggtgaggtgcgggttccggcggacgcctactacggcgcccagacggtccgggccgtggagaatttccccatctccgggctgcggccccatccggccctcgtccgggcgacggtgctcgtcaaaatgtgtgcggcccgggccaacatggccacgggcaggctcgattcccggcttggagacgctatcgtccgggcggccgacgagtgcctggccggtgcctttgatgcccacttcgtggtggacccgtttcaagccggcgccggcacctcccacaacatgaacgtgaacgaggtcctcgccaaccgggccaatgaactgctgggagaggagcggggcaggtatgctcccgtccatcccaacgaccacgtgaacatggcccagtccaccaacgacgtcttccccacggccatgcgtctggcggcccttcgggtggcgggggatctccggccggccctagagggactcgttgccgcgcttcggaaaaagtccgctgaattcgacggcattctcaagagcggccggactcacctgcaggatgcggtgccgatccgtctcggccaggagttcgaggcgtgggccgtggcgctggagaagaacctggccgccatcgagggggcggtgccgggccttgcggaactgggtatcggcggcaccgcggcaggtaccggcatgaacgccgagccggcctacatcgatcttgtggtggcagagctcgcccgggaaaccggctttcccctcgtacggggtgcgaacctggttgagcggatgcagaacatggaccccttcgtggccctctcctccgctctcaagggacttgccgtaaacctcgcccgtatcgccaacgacctgcggctcctttcctctggcccccggaccgggctggccgagatcgcgctgccggcgctgcagcccggctcctctatcatgccggggaaggtcaacccggtcatggccgaggtgaccgacatggtcgcctttcaagtgatgggtgcggacacgacaatcatgctcgccgcccaggcagggcagctggagcttaacgtcatgatgccggtcatcgcgttcaaccttctgttcagccttgaaatcctgaagaacacggtgcccaagctggctgatgcctgcatcgccggcatcactgcggaccgggagcgctgcctccggtacctggagcagtcggtaggactggccacggtgctcgcgccctacatcggctatgccgcggccgcggaggtggccaaggaatcgactgccacgggccggagtatccggcagatcgtggaagaccggcagctcctgtcggccgggcgtctggcggagatcctcgaccccttccctctcaccagccctggcgttccgtga

SEQ ID NO: 11085 - protein, 463 aa, Geobacter sulfurreducens
MTFRVEKDTLGEVRVPADAYYGAQTVRAVENFPISGLRPHPALVRATVLVKMCAARANMATGRLDSRLGDAIVRAADECLAGAFDAHFVVDPFQAGAGTSHNMNVNEVLANRANELLGEERGRYAPVHPNDHVNMAQSTNDVFPTAMRLAALRVAGDLRPALEGLVAALRKKSAEFDGILKSGRTHLQDAVPIRLGQEFEAWAVALEKNLAAIEGAVPGLAELGIGGTAAGTGMNAEPAYIDLVVAELARETGFPLVRGANLVERMQNMDPFVALSSALKGLAVNLARIANDLRLLSSGPRTGLAEIALPALQPGSSIMPGKVNPVMAEVTDMVAFQVMGADTTIMLAAQAGQLELNVMMPVIAFNLLFSLEILKNTVPKLADACIAGITADRERCLRYLEQSVGLATVLAPYIGYAAAAEVAKESTATGRSIRQIVEDRQLLSAGRLAEILDPFPLTSPGVP

SEQ ID NO: 11086 - DNA, 1437 bp, Yersinia pestis
  CDS (1)..(1437)
atgtcaaataacattcgtattgaagaagacctgttaggtacacgagaagtccccgcagaggcttactacggtgttcataccctgcgtgcgattgaaaacttctatatcagtaacagtaaaatcagtgacgtgccggaatttgtacgtggcatggtcatggtaaaaaaagcggcggcaatggctaacaaagagttgcataccatcccgcgtaaaattgcagacatcattattcaggcatgtgatgaagttctggataaagggaaatgtatggatcagttccccgttgatgtgttccagggcggcgcaggtacctctctcaatatgaacaccaacgaggtcttggccaatattggcctggagctgatgggccaccaaaaaggggaatatcagtaccttaaccctaacgaccatctgaacaaatgccagtccaccaacgatgcctacccaaccggtttccgcattgcggtctacgcctccatcctcaagttgatcgatgctatcaaccaattaggcgaaggtttcggtagaaaatctaaagaattcgagaaaattctgaaaatgggccgtacccaattacaggatgccgtacccatgactctgggccaggaattccgcgctttccaggtgttattgaatgaagaaaccaagaacctgcaacggaccgccgagttgctattggaagtcaacctgggtgccactgccatcggcactgcgctgaatacaccagaaggttattcacaacttgccgtgcagaaactggcagaaatcagcggattagcctgtgttcctgccgaagatttgatcgaagcgacctctgattgcggcgcttacgtgatggtacacagcgccctgaaacgcctggctgttaagatgtcaaaaatctgtaacgacctacgtttgctctcatctggcccacgtactggtttgaatgaaatcaacctgccagaattgcaggcgggctcttctatcatgcctgcaaaagtgaacccggtgatccctgaagttgtaaatcaggtttgttttaaggtgatcggcaacgatacttgcattactatggcggctgaagcgggtcagcttcagttaaacgtgatggaaccggtaattggtcaggccatgtttgagtctatccatatcctgactaatgcgtgttacaacctgttagagaagtgcatcaatggcattaccgctaacaaagaggtctgcgagcgctacgtctttaactccataggcatcgtcacttatcttaacccgttcattggccaccataatggtgacattgtgggtaaaatctgtgcggaaaccggtaaaaatgtgcgggaagtggttctggagcgcggtttgttaactgaagccgaactggacgacattttctctgttgaaaacctgatgcacccagcctataaagcgaaacgttataccgatgaaaatgaacaataa

SEQ ID NO: 11087 - protein, 478 aa, Yersinia pestis
MSNNIRIEEDLLGTREVPAEAYYGVHTLRAIENFYISNSKISDVPEFVRGMVMVKKAAAMANKELHTIPRKIADIIIQACDEVLDKGKCMDQFPVDVFQGGAGTSLNMNTNEVLANIGLELMGHQKGEYQYLNPNDHLNKCQSTNDAYPTGFRIAVYASILKLIDAINQLGEGFGRKSKEFEKILKMGRTQLQDAVPMTLGQEFRAFQVLLNEETKNLQRTAELLLEVNLGATAIGTALNTPEGYSQLAVQKLAEISGLACVPAEDLIEATSDCGAYVMVHSALKRLAVKMSKICNDLRLLSSGPRTGLNEINLPELQAGSSIMPAKVNPVIPEVVNQVCFKVIGNDTCITMAAEAGQLQLNVMEPVIGQAMFESIHILTNACYNLLEKCINGITANKEVCERYVFNSIGIVTYLNPFIGHHNGDIVGKICAETGKNVREVVLERGLLTEAELDDIFSVENLMHPAYKAKRYTDENEQ

SEQ ID NO: 11088 - DNA, 1401 bp, Bradyrhizobium japonicum USDA 110
  CDS (1)..(1401)
atgagccgtacggagcaggatttcctcggacagcgtgagatcgccgacgatatttactacggcgtccagaccatccgcgggaaggagaacttccacatcaccggcattccgatgaaccaggagccttacttcgtgaaggcgctgggttacgtgaagaaggccgcggcgatggccaatcgcgatctcggcgtgatcgacgccagggtggccgatgcgatcatcctcggctgcgaccgcgtgattgccggcgacatgatggatcaattcgtcaccgacttcatccagggcggcgccggcacctcgaccaacatgaacgccaacgaggtgatcgccaacctcgcgctggaatcgctgggcttcaagaagggcgactaccagcacgtcagcccgaacgatcatgtgaactacggccagtcgaccaacgacacctatccgaccgcctttcgcctcgcgctgatcctgcggctcgagagctacatgacggcgctgcgccagctccaggaggcgttcttcgccaagggccgtgagttcgatcgcgtgctgaagatgggccgtacgcatcttcaggacgccgtgccgatgtcgctcggcgccgaattccgcggctggggtaccaccatgggcgaggaggtcgatcgtatctccgaggcacgggcgctgctgcgcgagatcaatctcggcgcgaccgcgatcggcacctccgtcaccgcggcgcacggctatcccaagctcgccgtccggcatctgagcgcgctgaccggcatcgacttcattctcgccggcgacctcgtcgaagcgacctcggacaccggtgcctatgtgcagctctccggcgtgctcaagcgcacggcgagcaagctgacaaaaatctgcaacgacatccggttgctggcttcgggcccgcgcgccggcttcaacgagatcaacctgccgcagctccagccgggctcctcgatcatgccggggaaggtcaatcccgtgatccccgaggtcgtcaaccagaccagcttccttgtcatcggcctcgacaccacggtgacgcttgccgcgtccgccggccagctccaactcaatgtgatggaaccggtgatctcgttcgcgctgttcttctcgatccgcaccatggagcgcgcggtcaacagcctgcgcgagaactgcgtcgtcggcatcaccgccaacgcggagcacacccgcaacatggtgctgaactcgctcggtatcgtcacggtgctgaagccgctgctcggctacaagcaatgcgccgagatcgcgcgcgagggttacaagagcggcaagtcgctgcaccagatcgtggtggtcgagcgcaagctgctgacgcaggagaagtgggacgagatgttctcgttcgagcggctgatcaatccggacctgattgcgtga

SEQ ID NO: 11089 - protein, 466 aa, Bradyrhizobium japonicum USDA 110
MSRTEQDFLGQREIADDIYYGVQTIRGKENFHITGIPMNQEPYFVKALGYVKKAAAMANRDLGVIDARVADAIILGCDRVIAGDMMDQFVTDFIQGGAGTSTNMNANEVIANLALESLGFKKGDYQHVSPNDHVNYGQSTNDTYPTAFRLALILRLESYMTALRQLQEAFFAKGREFDRVLKMGRTHLQDAVPMSLGAEFRGWGTTMGEEVDRISEARALLREINLGATAIGTSVTAAHGYPKLAVRHLSALTGIDFILAGDLVEATSDTGAYVQLSGVLKRTASKLTKICNDIRLLASGPRAGFNEINLPQLQPGSSIMPGKVNPVIPEVVNQTSFLVIGLDTTVTLAASAGQLQLNVMEPVISFALFFSIRTMERAVNSLRENCVVGITANAEHTRNMVLNSLGIVTVLKPLLGYKQCAEIAREGYKSGKSLHQIVVVERKLLTQEKWDEMFSFERLINPDLIA

SEQ ID NO: 11090 - DNA, 1416 bp, Wolinella succinogenes
  CDS (1)..(1416)
atggcatctacacgaatagaacacgatcttattggggacttagagctaagtaacgactgctattatggagttcaaactgctagagcgaaagagaacttccacatctcaggcgtcctactctcaagcatgcccactttcattgcttcactcgctaaagtcaaaaaagccgctgcactcgccaactttgagcttgggctcttggatgagaagatcaaaaacgccatctgcgaagcgtgcgatctcatcatcgctggaaaatatcacgaccaattcgtcgtggatgccatccaaggaggcgctggaacttccaccaacatgaacgccaatgaagtgatcgccaacgtcgcacttgagctcatgggacataaaaagggtgaatataaacattgccaccccaacaaccacgtcaacctctcacaatctactaatgatgcctatcctacggcattccgcgttgccctgtatgaaaaactcatcgagctcaccgtctccatgggaatcctaagagactcttttgccaaaaaggccgaggaattcaaagatatcatcaagatgggtcgaacccagctccaagacgctgtgcccatgaccctaggtcaagagtttaaaacctacgccgtcatgatgaccgaagatatcgatcgcgtgctagaggctagaaaccttgttcgagagatgaaccttggggcaaccgcgattggaacaggaatcaactctcaccctgactacgctacgcttgtagagaaaaaacttcaagaggtcacaggccgaccctttatcaccgccagcgatcttgttgaggcgactcaagacacaggggcttatgtccaaatctctggtgttcttaagcgtgtctccaccaaagtctccaaaatctgcaacgatctaagactccttagctcaggcccaagagcgggacttagcgagatcaatcttccccctatgcagcctggtagctccattatgcctggaaaggttaatcctgtgattcccgaagtggtcaatcaggtctgctaccacgttattggcgccgacatgactgtaactattgcctctgaagggggtcagcttcagctcaacgtttttgagcccgtcatcgcctttagcctctttagctctatcaacatgatgagaagagcttttgaaactttggctgaaaaatgcgtgaatggaatcaccgccaacgctgacaactgccgcgactatgtccttaagagcatcggactcgtcacagcgctcaacccctacatcggatatgagaactccacttcagtggccaaagaggcgctagagtcaggcaagtccgtccacgatatcgtcctagagcgcaaacttcttagcaaagaagagctagaagagattattcgacccgaaaacatgatcaagcccaaagtcgtcactctaacaaaaaaataa

SEQ ID NO: 11091 - protein, 471 aa, Wolinella succinogenes
MASTRIEHDLIGDLELSNDCYYGVQTARAKENFHISGVLLSSMPTFIASLAKVKKAAALANFELGLLDEKIKNAICEACDLIIAGKYHDQFVVDAIQGGAGTSTNMNANEVIANVALELMGHKKGEYKHCHPNNHVNLSQSTNDAYPTAFRVALYEKLIELTVSMGILRDSFAKKAEEFKDIIKMGRTQLQDAVPMTLGQEFKTYAVMMTEDIDRVLEARNLVREMNLGATAIGTGINSHPDYATLVEKKLQEVTGRPFITASDLVEATQDTGAYVQISGVLKRVSTKVSKICNDLRLLSSGPRAGLSEINLPPMQPGSSIMPGKVNPVIPEVVNQVCYHVIGADMTVTIASEGGQLQLNVFEPVIAFSLFSSINMMRRAFETLAEKCVNGITANADNCRDYVLKSIGLVTALNPYIGYENSTSVAKEALESGKSVHDIVLERKLLSKEELEEIIRPENMIKPKVVTLTKK

SEQ ID NO: 11092 - DNA, 1452 bp, Vibrio vulnificus
  CDS (1)..(1452)
atggctaccctaactgaagctccaaaagcatcaactccggccactcgtattgaagaagatctattaggccaacgtcacgttccggctgacgcttactacggtattcacacgctgcgcgccatcgaaaacttcaacatctcaaatgtcactatttctgacgtaccagaattcgttcgtggcatggttatgaccaaaaaagccgctgcgcttgctaacaaagaattgggcgcaattcctaagaatgtcgcggattacatcattcaagcgtgtgacctaatgttggaaactggcaaatgcatggatcagttcccatcagacgtattccaaggcggtgcgggcacttctgtgaacatgaacaccaacgaagtacttgccaacattgctctagaattaatgggcaaagagaaaggcgattacgacgtggtgaacccaaacgatcacgtgaacaagagccaatcaaccaactgtgcctacccaacaggcttccgtatcgcggtttacaacagcatccataaattgatggaagcgattgaatacctaaaaggtgcgtttgagctgaaatctcaagagtttaacgacatcctaaaaatgggccgtactcagttgcaagatgcagttccaatgactgtcggtcaagagttccacgcttgggcagtgacactaaacgaagagatccgtgcgctagactacacctcgaagctacttcttgaagtgaacctaggtgcaacggcaatcggtactggcttaaacacacctcctggttaccaagcacttgccgtgaaacacctagcggaagtaactggcctagaagtggttccagcagaagaccttatcgaagcaacttcagactgtggtgcttacgtaatggcacacggcgctctaaaacgcctagcggtgaaattgtctaagatctgtaacgacttgcgtctgctttcttctggtcctcgcgctggtttgaacgaacttaacttgccagaaatgcaagccggttcttcaatcatgccagcaaaagttaacccagttatcccagaagtggttaaccaagtgtgtttcaaagtactgggtaacgacaacacgatttctttcgcagccgaaggcggtcagctacagctgaacgtaatggagcctgtgattggtcaagcgatgtttgaatcgatttcactactacaaaacgcgtgtgtgaacctacgtgacaagtgtatcgacggcatcactgtgaacaaagagatctgtgaaaactacgtttacaactctatcggtatcgttacttacctaaacccatacatcggccaccacgaaggtgacatcgttggtaagatctgtgcggaaaccggtaagagcgtccgtgaagtagtgcttgagcgtggcttgctgacatctgaagagttggatgacatcctgtctgtgcagaacttcatgcacccaacttacaaagcaaaacgttacgaataa

SEQ ID NO: 11093 - protein, 483 aa, Vibrio vulnificus
MATLTEAPKASTPATRIEEDLLGQRHVPADAYYGIHTLRAIENFNISNVTISDVPEFVRGMVMTKKAAALANKELGAIPKNVADYIIQACDLMLETGKCMDQFPSDVFQGGAGTSVNMNTNEVLANIALELMGKEKGDYDVVNPNDHVNKSQSTNCAYPTGFRIAVYNSIHKLMEAIEYLKGAFELKSQEFNDILKMGRTQLQDAVPMTVGQEFHAWAVTLNEEIRALDYTSKLLLEVNLGATAIGTGLNTPPGYQALAVKHLAEVTGLEVVPAEDLIEATSDCGAYVMAHGALKRLAVKLSKICNDLRLLSSGPRAGLNELNLPEMQAGSSIMPAKVNPVIPEVVNQVCFKVLGNDNTISFAAEGGQLQLNVMEPVIGQAMFESISLLQNACVNLRDKCIDGITVNKEICENYVYNSIGIVTYLNPYIGHHEGDIVGKICAETGKSVREVVLERGLLTSEELDDILSVQNFMHPTYKAKRYE

SEQ ID NO: 11094 - DNA, 1428 bp, Porphyromonas gingivalis W83
  CDS (1)..(1428)
atggaattaaaaaagactacacgtatcgaaagcgatcttatcggagaacgcgagatacccggccatattctatatggcgtacagacgctgcgtggtatagaaaacttccccatcagcaattttcatctgaacgattaccccctgtttatcaatggcttggccatgacgaaatgggcggctgcagtggccaatcatcggctcggtctcttgaccgatgcccagaaagacggcatcgtgaaagcctgcaaggaaatcctcgaaggcaagcaccacgagcatttccccgtggatatgatccaaggcggtgcaggaacgaccacgaatatgaacgccaacgaggtgatttgcaaccgtgccttgcagatcatgggacacgaggcaggcgaatttgcccacctctcccccaatgatcacgtgaactgctcgcagagcaccaacgatgcttatccgacagctatccacctcggcctttacgctacatatctgaagttccgcccccatcttctggatctcatcgagtcgctgcgtgccaagagccgcgaatttgcccatgtactcaagatgggacgtactcagctcgaagatgctgtgcctatgtctctgggacagacgttcggcggatttgcttccatcttgcaggatgaaatcaaaaatctggactttgccgccgaagagttcctgaccgtgaatatgggtgctacggctatcggcacgggtatctgcgcccagccgaactatgccgaatactgcatagaggctcttcgtgaagtcaccggctgggacattcgtctcagtgccgatctggtaggggcaacgagcgacacttccgtgatggtaggatattcgtctgccttgcgccgtatctgtgtgaaggtgaacaagatttgcaacgacctgcgtctccttgccagcggtcctcgttgcggtttgcacgaattcaatctgcctgccatgcagccgggttcgtccatcatgccgggtaaggtgaatcctgtgattccggaagtaatgaatcagatctgctataaggtgatgggcaacgacctgaccgtaacgatggcaggcgatgcagcccaaatggagctgaacgctatggagcctgtgatggcacaatgctgcttcgaaagttcggatctgctcatgaacggattcgatacgctgcgtacactctgtatcgatggcatcacggccaacgaggacgaatgccgtgggtatatccgcaacagcatcggtatcgttacggctctgaatccgatcatcggctataagaattcgaccaagatcgccaaggaagcgatggaaacgggacgtggcgtttacgacctcgttttggaacacgacatcctgtcgaaagaggatctggatacgatactctcaccggagaatatgatcaagccggtcaagctcgacatcaaaccgcgtcgctga

SEQ ID NO: 11095 - protein, 475 aa, Porphyromonas gingivalis W83
MELKKTTRIESDLIGEREIPGHILYGVQTLRGIENFPISNFHLNDYPLFINGLAMTKWAAAVANHRLGLLTDAQKDGIVKACKEILEGKHHEHFPVDMIQGGAGTTTNMNANEVICNRALQIMGHEAGEFAHLSPNDHVNCSQSTNDAYPTAIHLGLYATYLKFRPHLLDLIESLRAKSREFAHVLKMGRTQLEDAVPMSLGQTFGGFASILQDEIKNLDFAAEEFLTVNMGATAIGTGICAQPNYAEYCIEALREVTGWDIRLSADLVGATSDTSVMVGYSSALRRICVKVNKICNDLRLLASGPRCGLHEFNLPAMQPGSSIMPGKVNPVIPEVMNQICYKVMGNDLTVTMAGDAAQMELNAMEPVMAQCCFESSDLLMNGFDTLRTLCIDGITANEDECRGYIRNSIGIVTALNPIIGYKNSTKIAKEAMETGRGVYDLVLEHDILSKEDLDTILSPENMIKPVKLDIKPRR

SEQ ID NO: 11096 - DNA, 1425 bp, Photorhabdus luminescens subsp
  CDS (1)..(1425)
atgtcaaacaacattcgtatcgaagaagacctgttaggtaaacgagaagtccctgctgaagcctattatggtattcacaccttacgtgcgattgaaaacttccatatcagtaacaacaccattaatgatgtacccgaattcatccgtggcatggtgatggtaaaaaaagccgcagccttagctaacaaagagctacaaactattcctaaaaaaattgctgacatcatcatcaaagcatgtgacgaagtgctctataccggcagatgcatggatcagtttccggtcgatgtgtttcaaggcggtgccggtacttcactcaacatgaataccaatgaggttctggcaaacattggtctggaactgttaggccataaaaaaggcgaatatgagtacctgaatcccaatgaccatctgaataaaagccagtcaactaacgacgcctacccaactggcttccgcatcgcggtttataactccatcctgaaactgatcgagtctattgagctgttaattgtgggtttcgataaaaaatccagagaatttaatgacattctaaaaatgggtcgtacccaattacaggatgctgttcccatgacactggggcaggaattcaacgcattctctatcctgttgaaagaagaagttaaaaacctcaaccgaacctctgaattactgctggaaattaaccttggcgctactgctatcggtacccgcttgaatacagcaccaggttatcagaaattggcggttgaaaaactggcggaagtttcaggtttaccttgcgtaccagccgaagacctgattgaagccacttctgactgtggggcttacgttatggtccacggtgctctgaagcgcctggctgtcaaactgtctaaaatttgtaatgacctgcgtttgctttcttctggccctcgtgctggcctgaatgaaatcaacctaccagaattacaggcaggctcttctattatgccggcaaaagtgaacccggttattccagaagttgtgaatcaggtttgcttcaaagttattggtaacgatatttgtgttactatggcgtccgaagcaggccagttacagctcaatgtaatggaacctgctatcggtcaggccatgtttgaatctatctccctgctaagcaacgcttgccgcaacctggtagaaaaatgcgttaatggcatcacggctaacaaagaagtttgcgaaaatttcgtattcaactcgatcggtatcgtgacatatctgaacccattcatcggtcaccataatggtgacattgttggtaaaatttgtgctgaaaccggtaaaagtgttcgtgaagtcgttctggaacgaggcttactgaccgaaactcaattggatgacatcttctctgtagagaacctaaaatgcccatcttacaaggcaaaacgttttgacgattaa

SEQ ID NO: 11097 - protein, 474 aa, Photorhabdus luminescens subsp
MSNNIRIEEDLLGKREVPAEAYYGIHTLRAIENFHISNNTINDVPEFIRGMVMVKKAAALANKELQTIPKKIADIIIKACDEVLYTGRCMDQFPVDVFQGGAGTSLNMNTNEVLANIGLELLGHKKGEYEYLNPNDHLNKSQSTNDAYPTGFRIAVYNSILKLIESIELLIVGFDKKSREFNDILKMGRTQLQDAVPMTLGQEFNAFSILLKEEVKNLNRTSELLLEINLGATAIGTRLNTAPGYQKLAVEKLAEVSGLPCVPAEDLIEATSDCGAYVMVHGALKRLAVKLSKICNDLRLLSSGPRAGLNEINLPELQAGSSIMPAKVNPVIPEVVNQVCFKVIGNDICVTMASEAGQLQLNVMEPAIGQAMFESISLLSNACRNLVEKCVNGITANKEVCENFVFNSIGIVTYLNPFIGHHNGDIVGKICAETGKSVREVVLERGLLTETQLDDIFSVENLKCPSYKAKRFDD

SEQ ID NO: 11098 - DNA, 1410 bp, Gloeobacter violaceus PCC 7421
  CDS (1)..(1410)
atgcaaccaagaaccgagcgcgactcgatgggcgagcgcaccctggaggccggagcctattacggcatccagaccctgcgcgccgtcgagaatttcccgattagcggcatcggcccgctgcccgacttcgtgcgcgcctgcaccctcatcaaacgggccgccgcccgggtgaacgccgagcttgaatgcatccccaaagacgtggcccaggcgatcattggcgcctcggacgaggtgctggcgggccagtggagcgatcagttcgtggtcgatatctttcaggcgggcgccggcacctcccaccacatgaatatcaacgaggtgctcgccaaccgcgccctcgagctgctgggttacgcgcggggcgactacaagcaggtcaaccccaacgatcacgtcaactacggccagtccaccaacgacgtgatccccactgccatccgtctgggagcgctctttgcaagcgcgccgctgttggaggcgctaagcaccctgcaacaaagtttcgaggccaagggcaacgagtttttgcccatcgtcaaatccgggcgcacccacctgcaggacgcggtgcccataaggcttggggatgaatttctggcctatgcccagatcgtcggcgagcaccgcgcccgcatcgaaaccgcctgccgcgagctattggtgctgggcctggggggcagcgccgccggtaccggcctcaacacccatccccagtaccgggtgcgcgtcgtcgccgaactggcccggctgacagggcaccccctcacccccgccccccgaccgatggcggcaatgcagagcatggcgcccttcgtggccgtctccggcagcctgcgcaatctggcccaggatctggtcaagatcgcgggcgatctgcgcctgatggattccggccccaagacgggcctgcgtgagatcgaactgccgccggtgcagccgggttcgtcgatcatgcccggcaagtacaacccggtgctgtgcgagatgctcacgatggtcgcctttcaggtgatgggctacgaccaggcgattgccttggccgcccaggcgggccaactggaattgaacgtgatgatgccgctgatcgcctacgacttgctccacagcttcacgatcctcaccaacgccctcacggtctttcgagcgcgctgcatcgacggcatccaggcccaacccgagcgctgcctggcctacgccgagggctcgatcgccctggtgaccgctctcaatccccacatcggctatctcaacgccgccgccgtcgccaaagaatcgctcgcgaccggccgctccctgcgcgagatcgttctcgagcgggggctactgaccgaagcgcaactcgccgagatcctcgaccttgaagcgatgagccggttgccggagacgcaggccgcctcagaccggtag

SEQ ID NO: 11099 - protein, 469 aa, Gloeobacter violaceus PCC 7421
MQPRTERDSMGERTLEAGAYYGIQTLRAVENFPISGIGPLPDFVRACTLIKRAAARVNAELECIPKDVAQAIIGASDEVLAGQWSDQFVVDIFQAGAGTSHHMNINEVLANRALELLGYARGDYKQVNPNDHVNYGQSTNDVIPTAIRLGALFASAPLLEALSTLQQSFEAKGNEFLPIVKSGRTHLQDAVPIRLGDEFLAYAQIVGEHRARIETACRELLVLGLGGSAAGTGLNTHPQYRVRVVAELARLTGHPLTPAPRPMAAMQSMAPFVAVSGSLRNLAQDLVKIAGDLRLMDSGPKTGLREIELPPVQPGSSIMPGKYNPVLCEMLTMVAFQVMGYDQAIALAAQAGQLELNVMMPLIAYDLLHSFTILTNALTVFRARCIDGIQAQPERCLAYAEGSIALVTALNPHIGYLNAAAVAKESLATGRSLREIVLERGLLTEAQLAEILDLEAMSRLPETQAASDR

SEQ ID NO: 11100 - DNA, 1404 bp, Chromobacterium violaceum ATCC 12472
  CDS (1)..(1404)
atgtccacccgtatcgaacacgacctgctcggcaaccgcgacgtgccggccgacgcctactggggcgtgcacacgctgcgcgccatcgaaaacttcccgatcaccggccagaccatcgccggctacggcgacctgatccgcgcgctggcctgcatcaagcaagccgccgcccaggccaaccgcgatctcggcattctcgaccccaagctggcccaggccatcgtcgacgcctgcgaggagatccgcgccggcaagctgcacgaccagttcgtcgtcgacgtgatccagggcggcgccggcacttccaccaatatgaacgccaacgaggtgatcgccaaccgcgcgctggagctgctgggccacgccaagggcgagtaccagcatctgcacccgaacgagcacgtcaacctgtgccagagcaccaacgacgtctacccgaccgcgctgcgcctggccgccttctggggcgtgctgaagctggtgtcgcggatggaaacgctgcgcaaggccttcgaggacaaggccgaggaattcaaggacatcctgaagatgggccgcacccagctgcaggacgcggtgccgatgacgctgggccaggagttccagacctatgctgtgatgctgggcgaggacgagcagcgtctgaaggaagccagcgccctgatgctggagatcaacctcggcgccaccgcgatcggcaccggcatcaccgcccacccggactacgccaagctggtgtgcctgcatctgtccgagctggtgggcagccagctgatcaccgcgcccaacctgatcgaggccacccaggactgcggcgccttcgtccagctgtccggcgtgatcaagcgcgcggcggtcaaactgtccaagacctgcaacgacctgcgcctgctgtcgtccggcccgcgcgcaggcttcggcgagatcaatctgccggcgcgccaggccggctcgtccatcatgccgggcaaggtcaatccggtgattccggaagtggtgagccaggtggcgtatgaagtcatcggcaacgacgtcaccatcaccatggcggccgaggccggccagctgcagctgaacgccttcgagccggtgatcgcctacagcctgttccgcagcgccggccacctggccaacgcctgcgacacgctgaccgagcactgcgtcaagggcatcaccgccaaccgcgagcggctgcgcctgagcgtggaaagctcgatcggcctggtcaccgcgctgaacccggtgatcggctacgaggccgccacccgcgtcgccgccgaagcccacgccaacggcagcagcgtcgccgacgtggtgctggcccatggcctgctcacccgcgagcagctggacgacatcctgcagccggagaccctgacccggccgcgctgggtgacgctgtaa

SEQ ID NO: 11101 - protein, 467 aa, Chromobacterium violaceum ATCC 12472
MSTRIEHDLLGNRDVPADAYWGVHTLRAIENFPITGQTIAGYGDLIRALACIKQAAAQANRDLGILDPKLAQAIVDACEEIRAGKLHDQFVVDVIQGGAGTSTNMNANEVIANRALELLGHAKGEYQHLHPNEHVNLCQSTNDVYPTALRLAAFWGVLKLVSRMETLRKAFEDKAEEFKDILKMGRTQLQDAVPMTLGQEFQTYAVMLGEDEQRLKEASALMLEINLGATAIGTGITAHPDYAKLVCLHLSELVGSQLITAPNLIEATQDCGAFVQLSGVIKRAAVKLSKTCNDLRLLSSGPRAGFGEINLPARQAGSSIMPGKVNPVIPEVVSQVAYEVIGNDVTITMAAEAGQLQLNAFEPVIAYSLFRSAGHLANACDTLTEHCVKGITANRERLRLSVESSIGLVTALNPVIGYEAATRVAAEAHANGSSVADVVLAHGLLTREQLDDILQPETLTRPRWVTL

SEQ ID NO: 11102 - DNA, 1440 bp, Helicobacter hepaticus ATCC 51449
  CDS (1)..(1440)
atgggcaaacgagtagaacacgattttattggcgaactagagattgccgatgatatgtattatggtgtgcaaacctttagagcattacaaaatttcaatattacaggcgataagctaagtagctatccaagctttatcaaggcttttgcgcaagtaaaaaaagctgcttgtttggcaaattatgaacttaaattgcttgatgagcaaaaaaaagatgctatttgcaaagcttgtgataggcttattgcaggcgagctaagagagcaatttgtagtagatatgcttcaaggtggagctggaacaagcacaaatatgaacacaaatgaagttgtagcaaatttggcattagagattatgggacataaaaaaggtgaatatcaatactgccacccaaatgaccacgtcaatctctcacaatctacaaatgattcatatcccactgctattcacgtagcactatatgacgagctttcagctcttgccaaagatatggaagtgctaaaagaatcttttaataaaaaatctcaagaatttaaagatgtgcttaaaatggggcgaactcaacttcaagatgctgtgcctatgactttaggacaagagtttcacacttttgcagtgatgatgggagaagatattgcgcgtgtgcttgaagcaagaaaccttgtaactgaaatcaatatgggtgggaccgcaattgggacaggcataaactcacaccctgattatcctaaaattgtccaaaagaaactctgtgaggttacaggacaccctttcaaaactgcagatgacctcattgaggccacacaagatacaggtgcgtatgtgcaagtaagtggtgtgcttaaaagagtagctgtgaaactctctaaagtctgtaatgacttacgactactaagctctggaccaagagcggggcttaatgaaatcaacctccccaaaatgcagcccggaagctccattatgcccggtaaagtaaatcctgtaatccctgaagttgttaatcaagtatgctatgcagtgattggtaatgatgtaactgtgagctttgcaagtgagggcggacaattgcagcttaatgtatttgagcctgtgattgcttatggattatttaactctatttctatgatgagaaatgctatgcttacacttgcaagcaaatgtattgacggaatcactgcaaatgaaaagatttgtagtgattttgtttataatagcattggtattgttacagctcttaatccttatattggctatgagaattctgcatcaattgctaaagaatctttacaaacaggcaaacctgttaaagaaattgcattagaaagaaagcttttaagcgaagagcaactcaatgagatttttcaaccaaaaaatatgctcaatccacatatgagcgcagaagataaggcgaaattccaaaaaaattcgccttttgcataa

SEQ ID NO: 11103 - protein, 479 aa, Helicobacter hepaticus ATCC 51449
MGKRVEHDFIGELEIADDMYYGVQTFRALQNFNITGDKLSSYPSFIKAFAQVKKAACLANYELKLLDEQKKDAICKACDRLIAGELREQFVVDMLQGGAGTSTNMNTNEVVANLALEIMGHKKGEYQYCHPNDHVNLSQSTNDSYPTAIHVALYDELSALAKDMEVLKESFNKKSQEFKDVLKMGRTQLQDAVPMTLGQEFHTFAVMMGEDIARVLEARNLVTEINMGGTAIGTGINSHPDYPKIVQKKLCEVTGHPFKTADDLIEATQDTGAYVQVSGVLKRVAVKLSKVCNDLRLLSSGPRAGLNEINLPKMQPGSSIMPGKVNPVIPEVVNQVCYAVIGNDVTVSFASEGGQLQLNVFEPVIAYGLFNSISMMRNAMLTLASKCIDGITANEKICSDFVYNSIGIVTALNPYIGYENSASIAKESLQTGKPVKEIALERKLLSEEQLNEIFQPKNMLNPHMSAEDKAKFQKNSPFA

SEQ ID NO: 11104 - DNA, 1428 bp, Haemophilus ducreyi 35000HP
  CDS (1)..(1428)
atgagtaatgtgcgtattgaagtggatttactcggcgaaagagaagtgccaaatcaggtctattggggaattcatactttaagagcggttgaaaattttaatatttctaacaatactatttcagatatacctgaatttgtccgtggtatggttatggtgaaaaaagccaccgcattagcaaatggcgaattaggtgcaattcccaaaaaagtggcacaggctattgtgcaagcgtgtgatgaaattttagtgaatggtcgttgtatggatcaatttccgtcagatgtttatcaaggcggtgccggtacctcggttaatatgaacactaatgaggttattgctaacttagcgcttgaaatgctagggcataaaaaaggggaatatcatattattgatccaatggatcacgttaatgctagtcaatcaacgaatgatgcttatcctacaggattccgcattgctgtgtataacagcttaatgcatttaattgaacaagtcctttatttacaacagggctttgaagagaaagcggtcgaatttgccaatgttcttaaaatggggcggacacagttgcaagatgcagtgcctatgacagttggtcaagaatttaaagcatttgcggtgttattagcagaagaagtacgtaatttaaaacgtactgctcaattattacttgaggttaacttaggcgcaactgcaattggcacggggttaaatacaccggcaggttattcagaattagcggtaaaatatttatcagaagtaacaggtttagcttgtgttttatcagaaaatttaattgaagcaacttcagattgtggtgcttatgtaatggtacacggtgcgttgaaacgtactgcggttaagttatctaaagtatgtaatgatttacgcttactttcatctggacctagagcgggtttgaatgaaattaatctgccggaattgcaagcgggttcttctattatgccagctaaagtaaatccagtggtacctgaggtggttaatcaagtatgctttaaagtgataggtaatgatacaaccgttacttttgcagcagaagcggggcagttacaattgaatgtaatggagccggtgattggacaggcaatgtttgaatctattgccattttagcaaatgcgtgtgtcaatttacgtgataaatgcgtcgatggcatcagtgtcaataaagaaatctgcgaaaattttgtgtttaattcaattgggattgtcacttatcttaatccatttattggccatcataatggcgatattgtgggtaagatttgtgctgaaacggggaaaggtgtacgtgaagtcattctcgaaaaaggattgctcaccgaagctcagttagatgatattctttcagtggaaaatttaatgcacccaatttataaagcaaaacggtttacggaagatgaataa

SEQ ID NO: 11105 - protein, 475 aa, Haemophilus ducreyi 35000HP
MSNVRIEVDLLGEREVPNQVYWGIHTLRAVENFNISNNTISDIPEFVRGMVMVKKATALANGELGAIPKKVAQAIVQACDEILVNGRCMDQFPSDVYQGGAGTSVNMNTNEVIANLALEMLGHKKGEYHIIDPMDHVNASQSTNDAYPTGFRIAVYNSLMHLIEQVLYLQQGFEEKAVEFANVLKMGRTQLQDAVPMTVGQEFKAFAVLLAEEVRNLKRTAQLLLEVNLGATAIGTGLNTPAGYSELAVKYLSEVTGLACVLSENLIEATSDCGAYVMVHGALKRTAVKLSKVCNDLRLLSSGPRAGLNEINLPELQAGSSIMPAKVNPVVPEVVNQVCFKVIGNDTTVTFAAEAGQLQLNVMEPVIGQAMFESIAILANACVNLRDKCVDGISVNKEICENFVFNSIGIVTYLNPFIGHHNGDIVGKICAETGKGVREVILEKGLLTEAQLDDILSVENLMHPIYKAKRFTEDE

SEQ ID NO: 11106 - DNA, 1413 bp, Streptomyces avermitilis
  CDS (1)..(1413)
atgaccgccgcagcccaccgcagcgaacacgacctgctcggagaccgcgacgtccccgccgaggcgtactggggcatccactccctgcgcgccaaggagaacttccccatcacggggacgccgatctccacgtacccgcatctgatcgacgccctcgccgccgtgaaggaggccgccgccctcgccaacgaggaactcggcctgctggagccgaagaaggccgcggccatcgtggccgcctgccgggagatccgggacggcaagctgcacgaccagttcgtcgtcgacgtcatccagggcggcgcgggcacctcgacgaacatgaacgccaacgaggtcatcgccaaccgggcccttgaactgctcggccacgccaagggcgagtaccggcacctgcaccccaacgaggacgtcaacctcggccagtcgaccaacgacgtctacccgaccgccgtgaagatcgcgaccgtgttcgcggtgcgcggtctgctcaaggccatggcggtgctccaggacgccttcgcccgcaaggccgtcgagttccgtgacgtgctgaagatgggccgcacccagctccaggacgcggtgcccatgacgctggggcaggagttctccgcgtacgccgtcatgctcgacgaggaccgcagccggctcgccgaggccgtcgaactgatccacgagatcaacctgggcgccacggcgatcggcaccggactcaacgcgcccgccggatacgccgagtcggcccgccgccagctcgccgccctcaccgggctgccgctggtcaccgccgccaacctggtcgaggccacccaggactgcggtgccttcgtccagatgtcgggggtgctcaagcggatcgccgtcaagctctccaagagctgcaacgacctgcggctgctgtcgtccgggccgcgcgcggggctcaacgagatcaacctgccgccggtacaggccggttcgagcatcatgcccggcaaggtcaacccggtcatccccgaggtcgtcaaccaggtcgccttcgaggtcatcggcaacgacgtcgcgatcaccatggccgccgaggcggggcagctccagctcaacgccttcgagccgatcatcctgcactcgctgtccgagagcatcacgcatctgcgggccgcctgcctgacgctcgccgagcggtgcgtcgacgggatcacggccaacaccgaggaactgcgcgccgccgtggagaactccatcggcctggtgaccgccctcaacccgcacatcgggtacacggcggccaccgccatcgccaaggaggccctcgccaccgggcgcggggtcgccgaactcgtcctggagaagggcctgttgccggccgaccggctcgcgtcgctgctgcggcccgaggtgctcgcgggcagcggctccccgcagatctga

SEQ ID NO: 11107 - protein, 470 aa, Streptomyces avermitilis
MTAAAHRSEHDLLGDRDVPAEAYWGIHSLRAKENFPITGTPISTYPHLIDALAAVKEAAALANEELGLLEPKKAAAIVAACREIRDGKLHDQFVVDVIQGGAGTSTNMNANEVIANRALELLGHAKGEYRHLHPNEDVNLGQSTNDVYPTAVKIATVFAVRGLLKAMAVLQDAFARKAVEFRDVLKMGRTQLQDAVPMTLGQEFSAYAVMLDEDRSRLAEAVELIHEINLGATAIGTGLNAPAGYAESARRQLAALTGLPLVTAANLVEATQDCGAFVQMSGVLKRIAVKLSKSCNDLRLLSSGPRAGLNEINLPPVQAGSSIMPGKVNPVIPEVVNQVAFEVIGNDVAITMAAEAGQLQLNAFEPIILHSLSESITHLRAACLTLAERCVDGITANTEELRAAVENSIGLVTALNPHIGYTAATAIAKEALATGRGVAELVLEKGLLPADRLASLLRPEVLAGSGSPQI

SEQ ID NO: 11108 - DNA, 1395 bp, Eikenella corrodens
  CDS (1)..(1395)
atgacaacccgaaccgaacacgacttcttcggcgaacgcgaaatccccgcaaccgcttattggggtatccacaccctgcgcgcagtggaaaacttccaaatctccgggcagaagatttccgacgtaccccagtttgtgcgcagcatggtgatggtgaaaaaagccgctgcccaggccaacggcgagctgggcgcactcaagcccgaaatcgccgccgccattgcccaagcttgcgacgaggtgctgctcaaaggccgttgcctcgaccagttcccatccgacgtattccaaggcggcgccggcacttcggtgaacatgaacaccaacgaagtgatcgccaacctcgccttggaagccttaggccaagccaaaggccgctacgacatcgtcaatcccatggatcatgtgaacgccagccaatttaccaacgacgcttaccctaccggcttccggctggctgtatacaccagcatcggcgaactgctagacaaactggcatacctgaaaaacacctttgctgccaaagctgatgaattcaaagacatattaaaaatgggccgcacccagctgcaagatgccgtgcccatgactgccggccaagaattccaatccttccaagtgctgctggcagaagaggaaaccaacctcgaacgcacccgccaactgctgctggaagtgaacctcggcgccacagccatcggcacaggcatcaatacgccgcaaggctacgcgccgctggccgtacaaaaactctccgaaatcagcggcctgccctgcaagctcaccgaaaacctgattgaagccacttccgactgcggtgcctatgtgatggtgcacggcgccctcaagcgcaccgccgtgaagctctccaaaatctgcaacgacctgcgcctactctcctccggcccgcgtgccggcctgaaagaaatcaacctgccggaaatgcaggccggctcatcgattatgcccgccaaggtgaatcccgtgattcccgaagtggtgaaccaagtttgtttcaaagtaatcggcaacgacaccaccatcaccttcgccgccgaagccggccagctccatcaacgtgatggagccggttatccgcaatccatgtttgaaagcatctcgcttttaggcaacgccgccattacgttggccgacaaatgcgtgcgcggcatcacggtaaaccgcgaaatctgcgaacgctacgtcttcaactccatcggcctggtaacctatctcaacccctatatcggccacgaaaacggcgacctggtgggcaaaatctgcgctcaaaccggcaaaaccgtgcgcgaagtggtactggagcgccagctcttgagcgaagcggagctcgaccgtatcctgtcgccacaaaacttggccaatccgcatttgtaa

SEQ ID NO: 11109 - protein, 464 aa, Eikenella corrodens
MTTRTEHDFFGEREIPATAYWGIHTLRAVENFQISGQKISDVPQFVRSMVMVKKAAAQANGELGALKPEIAAAIAQACDEVLLKGRCLDQFPSDVFQGGAGTSVNMNTNEVIANLALEALGQAKGRYDIVNPMDHVNASQFTNDAYPTGFRLAVYTSIGELLDKLAYLKNTFAAKADEFKDILKMGRTQLQDAVPMTAGQEFQSFQVLLAEEETNLERTRQLLLEVNLGATAIGTGINTPQGYAPLAVQKLSEISGLPCKLTENLIEATSDCGAYVMVHGALKRTAVKLSKICNDLRLLSSGPRAGLKEINLPEMQAGSSIMPAKVNPVIPEVVNQVCFKVIGNDTTITFAAEAGQLHQRDGAGYPQSMFESISLLGNAAITLADKCVRGITVNREICERYVFNSIGLVTYLNPYIGHENGDLVGKICAQTGKTVREVVLERQLLSEAELDRILSPQNLANPHL

SEQ ID NO: 11110 - DNA, 1452 bp, Vibrio parahaemolyticus
  CDS (1)..(1452)
atggctaccctatctgatgctccaaaaacagcaaaccaagccactcgtattgaagaagatctattaggtcaacgtcatgtccctgctgatgcgtactacggcattcataccctacgtgcgatcgaaaacttcaacatctctaacgtaactatttctgacgtacctgagttcgtacgcggcatggtgatgacgaagaaagcagcggcgttggcgaacaaagaacttggcgctattcctaaagaagttgctaactacatcctagaagcgtgtgatttgatcctagaaacaggcaagtgtatggatcagttcccttcagacgtattccaaggcggcgcgggtacttccgttaacatgaacactaacgaagttatcgcgaacgttgcacttgaactaatgggcaaagaaaaaggccaatacgagttcatcaacccgaacgaccacgttaacaagagccaatctactaactgtgcgtacccaactggtttccgtatcgcggtttacaacagcgtacacaaactaatggaagcgattgaatacctaaaaggcgcattcgatcttaaagcaactgaattcaaagacgtattgaagatgggtcgtactcagcttcaagacgcggtaccaatgactgttggtcaagagttccacgcttgggctgtaacgctaaacgaagagattcgtgctctagattacacatctaaactcctactagaaatcaacctaggtgcaaccgcaatcggtactggtcttaacacaccaactggttaccaagctctagcagtaaaacacctagcggaagtaactggccttgacgttgtgcctgcagaagacctaatcgaagcgacttctgactgtggtgcatacgtaatgactcacggcgcgctaaaacgtctagcagtgaaactatcgaagatctgtaacgaccttcgtctactttcttctggtcctcgcgcgggtctaaacgaattgaacctacctgaaatgcaagcaggttcttcaatcatgccagcgaaagtaaacccagttatcccagaagtagtaaaccaagtttgcttcaaagttctaggtaacgacaacacggtttctttcgcagcagaaggcggtcagctacagctaaacgtaatggaaccagttatcgcacaaagcatgtttgagtctatctctctactacacaatgcgtgtgtgaacctacgtgataaatgtatcgacggcatcactgtaaacaaagaaatctgtgagaactacgtttacaactcaatcggtatcgtaacttacctaaacccatacattggccaccacgaaggtgacattgtcggtaagatttgtgcagaaactggtaagagtgttcgtgaagtcgtgcttgagcgcggcctgctaactgcagaagaacttgatgaaatcttaacagttgaaaacttcatgcatcctacttacaaagcgaaacgctacgagtaa

SEQ ID NO: 11111 - protein, 483 aa, Vibrio parahaemolyticus
MATLSDAPKTANQATRIEEDLLGQRHVPADAYYGIHTLRAIENFNISNVTISDVPEFVRGMVMTKKAAALANKELGAIPKEVANYILEACDLILETGKCMDQFPSDVFQGGAGTSVNMNTNEVIANVALELMGKEKGQYEFINPNDHVNKSQSTNCAYPTGFRIAVYNSVHKLMEAIEYLKGAFDLKATEFKDVLKMGRTQLQDAVPMTVGQEFHAWAVTLNEEIRALDYTSKLLLEINLGATAIGTGLNTPTGYQALAVKHLAEVTGLDVVPAEDLIEATSDCGAYVMTHGALKRLAVKLSKICNDLRLLSSGPRAGLNELNLPEMQAGSSIMPAKVNPVIPEVVNQVCFKVLGNDNTVSFAAEGGQLQLNVMEPVIAQSMFESISLLHNACVNLRDKCIDGITVNKEICENYVYNSIGIVTYLNPYIGHHEGDIVGKICAETGKSVREVVLERGLLTAEELDEILTVENFMHPTYKAKRYE

SEQ ID NO: 11112 - DNA, 1425 bp, Pseudomonas syringae pv
  CDS (1)..(1425)
atgtcctcgcctgcatcatcgcgcatcgaaaaagacctgctaggtgttctcgaagtacctgccaacgcttattacggcatccagaccctgcgagcggtgaacaactttcacctttcgggcgtaccgctttcgcactatccgaaactggtagtagcgctggccatggtcaagcaggcggcagccgatgcaaaccatcagcttgggcacctcaacgataccaagcattcagcgatcagcgaggcgtgcgcccggctgatccgcggcgacttccatgaccagttcgtggtcgacatgattcagggcggcgctggcacttcgaccaacatgaatgccaacgaagtcatcgccaacatcgcgctggaaaccatgggtttcgagaagggcgaatacaaacacctgcaccccaacaacgacgtgaacatggcgcagtccaccaacgacgcctacccgaccgcgatccgcctgggtctgctgctgggtcatgacgcccttctcgccagccttgccagcctgatccaggcgttcgccgccaaaggcgaagaattcaaccatgtgctgaagatgggtcgtacccagttgcaggacgccgttccaatgactctgggccaggaattccgcgcctttgccaccacgctgaccgaagacctcaaccgtctgcgcagcctggcacccgaactgttgaccgaagtcaacctgggcggcacggccatcggtaccggcatcaacgccgaccccggctaccagaagcttgctgtcgaccgtttggcgctgatcagcggtcagccgctggtgccggcagccgacctgatcgaagcgacctccgacatgggcgcgttcgtactgttctcgggcatgctcaaacgcaccgcggtcaagctgtcgaagatctgcaacgacctgcgcctgttgtccagcggcccgcgcaccggcatcaacgaaatcaacctgccggcgcgccagccaggcagctctatcatgcccggcaaggtcaacccggtaatcccggaagcggtcaatcaggtggccttcgagatcatcggcaacgacctgtcgctgaccatggcagccgaaggtggccagttgcagctcaacgtcatggagccgctgatcgcctacaagatcttcgactcgatccgcttgctgcagcgcgccatggacatgctgcgcgaacactgcatcgtcggcatcaccgccaacgaacagcgctgccgcgaactggtcgagcactcgatcggtctggtcaccgcactgaacccgtacatcgggtatgaaaactccacccgtatcgcccgtatcgcgctggaaaccggccgtggcgtactggaactggtccgcgaagaaggtctgctcgacgacgccatgctcgacgacattctgcgaccggaaaacatgatcgctccacgtctggcccccttgaaggcctga

SEQ ID NO: 11113 - protein, 474 aa, Pseudomonas syringae pv
MSSPASSRIEKDLLGVLEVPANAYYGIQTLRAVNNFHLSGVPLSHYPKLVVALAMVKQAAADANHQLGHLNDTKHSAISEACARLIRGDFHDQFVVDMIQGGAGTSTNMNANEVIANIALETMGFEKGEYKHLHPNNDVNMAQSTNDAYPTAIRLGLLLGHDALLASLASLIQAFAAKGEEFNHVLKMGRTQLQDAVPMTLGQEFRAFATTLTEDLNRLRSLAPELLTEVNLGGTAIGTGINADPGYQKLAVDRLALISGQPLVPAADLIEATSDMGAFVLFSGMLKRTAVKLSKICNDLRLLSSGPRTGINEINLPARQPGSSIMPGKVNPVIPEAVNQVAFEIIGNDLSLTMAAEGGQLQLNVMEPLIAYKIFDSIRLLQRAMDMLREHCIVGITANEQRCRELVEHSIGLVTALNPYIGYENSTRIARIALETGRGVLELVREEGLLDDAMLDDILRPENMIAPRLAPLKA

SEQ ID NO: 11114 - DNA, 1437 bp, Pseudomonas putida
  CDS (1)..(1437)
atgatatacatcatgtcctctgctgcatcgttccgcgtcgaaaaagacttgttgggtacccttgaagttcctgcagatgcctactacggcatccagaccctgcgcgctgccaacaacttccacctctccggtgttccgctgtcgcactacccgaagctggtcgtggccctggccatggtcaagcaggccgctgccgacgccaaccgtgagctgggtcacctgagcgatgccaagcacgctgccatttccgcagcctgcgcccgcctgatcaaaggcgatttccacgaccagttcgtggtagacatgatccagggcggcgctggtacttctaccaacatgaacgccaacgaagtcattgccaacgttgcgctggaggccatgggccaccagaagggtgagtaccagtacctgcaccctaacaacgacgtgaacatggcgcagtcgaccaacgacgcctacccgaccgcaatccgcctgggcctgctgctgggccacgacgcgctgctggccagccttgatagcctgatccaggccttcgctgccaagggtaaagaattcgaccacgtactgaagatgggccgtacccagctgcaggacgccgtaccgatgaccctgggccaggaattccgcgccttcgccaccaccatgactgaagacctgcagcgcctgcgctcgctggctccggaactgctgaccgaaatcaacctgggcggtaccgccatcggtactggcatcaacgccgaccctggctaccaggccttggccgtacagcgcctggccaccatcagcggccacccgctggtaccggctgccgacctgatcgaagccacctccgacatgggcgccttcgtgctgttctccggcatgctcaagcgcaccgcggtcaagctgtcgaagatctgcaacgacctgcgcctgctgtccagcggcccacgcaccggcatcaacgagatcaacctgccagcgcgtcagccaggcagctcgatcatgccaggcaaggtcaacccggttattccagaagctgtgaaccaggtggccttcgccatcatgggcaacgacctggccctgaccgtcgccgccgaaggtggtcagctgcagctgaacgtgatggagccgctgatcgcctacaagatcttcgactcgatccgcctgctgcaacgcgccatggacatgctgcgcgagcactgcatcgtcggcatcaccgccaacgaacagcgctgccgtgaactggtcgagcactcgatcggcctggttaccgcactgaacccgtacatcggctacgaaaacgccacccgtattgcccgcgttgccctggaaagcggccgcggcgtactggaactggtgcgcgaagagaagctgctggacgacgcgatgctcgacgacatcctgcgtccggaaaacatgatcgctccacgtctggttccgctgaaggcgtaa

SEQ ID NO: 11115 - protein, 478 aa, Pseudomonas putida
MIYIMSSAASFRVEKDLLGTLEVPADAYYGIQTLRAANNFHLSGVPLSHYPKLVVALAMVKQAAADANRELGHLSDAKHAAISAACARLIKGDFHDQFVVDMIQGGAGTSTNMNANEVIANVALEAMGHQKGEYQYLHPNNDVNMAQSTNDAYPTAIRLGLLLGHDALLASLDSLIQAFAAKGKEFDHVLKMGRTQLQDAVPMTLGQEFRAFATTMTEDLQRLRSLAPELLTEINLGGTAIGTGINADPGYQALAVQRLATISGHPLVPAADLIEATSDMGAFVLFSGMLKRTAVKLSKICNDLRLLSSGPRTGINEINLPARQPGSSIMPGKVNPVIPEAVNQVAFAIMGNDLALTVAAEGGQLQLNVMEPLIAYKIFDSIRLLQRAMDMLREHCIVGITANEQRCRELVEHSIGLVTALNPYIGYENATRIARVALESGRGVLELVREEKLLDDAMLDDILRPENMIAPRLVPLKA

SEQ ID NO: 11116 - DNA, 1401 bp, Lactobacillus plantarum WCFS1
  CDS (1)..(1401)
atgcgaattgaagctgattgtattggtaagttagctgttccggatgatgctttgtatggaattcatacgttacgtgccgttcataattttccgattacgacggaattgatgcatccactgatcatgcaaagtcttgttcaaatcaagaaagcggcggccagtgtgaatgcggctgccggaactttgtctaatgataaggcacacgccattattgcggcatgtaatcagttactactggggcgttacgcggataacttcattgtgccagcgattcaggggggtgctgggacctcggctaacatgaacgtcaatgaagtggtggctaatttggctcaccggttgatgccggcagtcgccgttcatcccaatgatgatgttaatcaatcacaatcaaccaatgatacttttccaacggccggtaaaatggcgctttgcatgcaactcccaggactattaacggcactcagccggttggtacaaacgttactggttaaatcgcagcgttatcaagatgccatcaaagttggccgaactcagcttgaagatgcggtaccgacgacgtacgggcgaacctttcatgcttattaccaattattcaagcgtgatttgacccgtgtacggcaggcgggcgaacatctccgaatcgtaaatttgggtgggactgcaatcggtaccggcatcaacgcgactcacacgtatcaacagcagattttagtgaaattaaatcaaaatactgatttagatttagtagccgcaccagacttgatcgatgcaacgcaaaactgcgatttgttcgtggaattctctgcggccatgaagacgttagccgttgacctttccaagtttagcaatgacttaagattgctggcgagcggcccacaagctggctttggtgaattgaatttgcccgcgcagcaagcaggctcttctattatgccaggtaaaatcaatccggttattccggaggttgttaaccaagttgcgtttgaagtgattggtcacgacacgacggtaacaatggcagcggaagcgggccaattggaattaaacgcttttgagccaattatgttacgggcattgctagccagtgagcagcatttacagcaggccttgactacattagtcgatcactgtgtgcggcaattgacggtcaatcgccaacgctgtgcagatcaagtggcacattcggccattacggcaactgttttggcgccataccttggttacgagacgactaccgcgctgattaaagaagcgctcaccactaaccaagcaattcctgaattattacatcgacgtcgcttgcttagcgatgatttggtcgagcagctgttttcaccggccggactaactcagccacgtccagaggttattgaacaactacgagcggttgcaaagtag

SEQ ID NO: 11117 - protein, 466 aa, Lactobacillus plantarum WCFS1
MRIEADCIGKLAVPDDALYGIHTLRAVHNFPITTELMHPLIMQSLVQIKKAAASVNAAAGTLSNDKAHAIIAACNQLLLGRYADNFIVPAIQGGAGTSANMNVNEVVANLAHRLMPAVAVHPNDDVNQSQSTNDTFPTAGKMALCMQLPGLLTALSRLVQTLLVKSQRYQDAIKVGRTQLEDAVPTTYGRTFHAYYQLFKRDLTRVRQAGEHLRIVNLGGTAIGTGINATHTYQQQILVKLNQNTDLDLVAAPDLIDATQNCDLFVEFSAAMKTLAVDLSKFSNDLRLLASGPQAGFGELNLPAQQAGSSIMPGKINPVIPEVVNQVAFEVIGHDTTVTMAAEAGQLELNAFEPIMLRALLASEQHLQQALTTLVDHCVRQLTVNRQRCADQVAHSAITATVLAPYLGYETTTALIKEALTTNQAIPELLHRRRLLSDDLVEQLFSPAGLTQPRPEVIEQLRAVAK

SEQ ID NO: 11118 - DNA, 1413 bp, Clostridium tetani E88
  CDS (1)..(1413)
atgcaatacagattagaaagtgattcagtaggtgaaaaaagaataccaaaggatgcttattatggtgtgcaaagtcttagagcacaagagaattttatgataacaggaaaaaaagtccacacggaaatgataaaagcattagcagaggtaaaaaaagcaacagctatgacaaatatgcaagtggaacttttaagtaaaaaagcaggtaacgccattgtaaaagcttgtgatgaaataattgaaggaaatttacaagaacagtttataactgatcctatacaaggtggcgcaggaacatctatgaacatgaatttaaacgaagtaattgctaatagagcagtagaaatattaggtggggaaaagggagattatagtatagttcatcctaatgatcatgtaaatatgggacaatctactaacgatgttattcctacagggggaaaaatagcaactataagacttttagatagagcattaatgtcattagaaaatttagtagatgcacttacaaataaatctaaggaatttgatcatattataaaaatggggagaactcaaatgcaagatgctgtaccaataagattaggacaagaatttaaggcatattcaaatgctataaaaagggacatagttagaattaagagagcaaaagaagaattatatcatgtaagtattggggctacagctataggtacaggtataaatgctgatgaggagtatgtaaaaaatataacaccaaatttatcaaaagtaacaacacttagcctaattcaatgtgaagatttagtagatggaactcaaaatctagattgttttgcttcagtatcatcaaatttaaaggtttgtgctttaagtttatctaaaatagctaatgatttaagacttatgtcctcaggacctagaaccggttttggagaaataaatcttccagcaaaacaaaatgggtcatctataatgccaggaaaagtaaatccagtaatagctgaagttgtaaaccaagttgcatttagtattgtaggaaatgatgtaactattagcatggctgttgaagcaggacaattagaattaaacgcatttgagccggtgttatattataagttatttgaatctattgaaatattgaaaaatggtgtggatacatttattcataattgtataaatggtataacagcaaatgaggaaagatgtaaaaagttagtggataatagtgttggaataattactgcaatatgtccacatgtaggatataaaaaagcagctaaagtagcaaaaactgctatacagactggagaatctgtaaaggagcttgtattaaaagaaaatttattatcagaaaaagaattggatacaatacttgacccatttggaatgactaaaccaggaatatctgggaaagagctgttaaaaaagtaa

SEQ ID NO: 11119 - protein, 470 aa, Clostridium tetani E88
MQYRLESDSVGEKRIPKDAYYGVQSLRAQENFMITGKKVHTEMIKALAEVKKATAMTNMQVELLSKKAGNAIVKACDEIIEGNLQEQFITDPIQGGAGTSMNMNLNEVIANRAVEILGGEKGDYSIVHPNDHVNMGQSTNDVIPTGGKIATIRLLDRALMSLENLVDALTNKSKEFDHIIKMGRTQMQDAVPIRLGQEFKAYSNAIKRDIVRIKRAKEELYHVSIGATAIGTGINADEEYVKNITPNLSKVTTLSLIQCEDLVDGTQNLDCFASVSSNLKVCALSLSKIANDLRLMSSGPRTGFGEINLPAKQNGSSIMPGKVNPVIAEVVNQVAFSIVGNDVTISMAVEAGQLELNAFEPVLYYKLFESIEILKNGVDTFIHNCINGITANEERCKKLVDNSVGIITAICPHVGYKKAAKVAKTAIQTGESVKELVLKENLLSEKELDTILDPFGMTKPGISGKELLKK

SEQ ID NO: 11120 - DNA, 1461 bp, Bacteroides thetaiotaomicron VPI
  CDS (1)..(1461)
atgtgttattgttataaaacaaccgatatggaacagaaattatcaaaaaaaactcgtacagagagcgacttgataggtagtcgtgaagtgccggaaagtgcattgtatggagtacagacactccgtggtattgaaaactttcgcatcagcaagtttcatttgaatgagtatcccctgtttattcaggcattggccatcactaaaatgggagctgccgttgccaaccgtgaactggatttattgactgaggaacagacggatgccatactgaaggcttgtaaagaaatactggaaggaaaacatcatgaccaattccctgtagatatgatacagggtggagccggaaccaccaccaatatgaatgccaatgaagtgattgccaaccgtgcactggaactgatgggacatgcacgcggagagtatcactactgctcgcctaacgatcacgtcaatcgttcgcaatctaccaatgatgcgtatcctacagccattcacattggtctgtattatacccatcttaaattggtgaaacactttgcaacactgatcgaggctttccgaaagaaaggagcggagtttgcacacatcatcaagatgggacgtacccaactggaagatgccgtaccgatgacactaggacaaacctttaatggattcgcaagtattttggaacatgaactgaagaatctcgattttgccgcacaggattttctgacggtcaacatgggtgcgacagccatcggaaccggaattaccgccgaaccggaatatgcggaaaagtgcattgctgccctgcgcaagattacaggactggatatcaaactggcagatgacctgataggcgctacttcggatacttcctgcatggtaggatattcttcggccatgcggcgtgtagctgtcaagatgaacaagatttgtaatgatctgaggctattggcttccggtcctcgttgcggactgggagaaatcaatctgcctgccatgcagccgggctcttccattatgccgggaaaggtgaatcctgtcattccggaagtcatgaatcaggtctcttataaagtgataggaaacgacctttgtgtggctatgagtggagaggctgcgcagatggaactgaatgcgatggaacctgtcatggcacaatgctgttttgaatctgcggatttgttgatgaacggttttgatacattgcgtaccttatgtattgatggtatcacagccaatgaagaaaaatgccgtcgggatgtacacaacagtatcggagtagtgaccgcactgaatcccgtaattggctataaacattctacaaagatagcgaaggaggctctggaaacgggtaaaggagtgtatgagctggtgctggaacataacattctttccaaagaagacctggatacgatcttgaaaccggaaaatatgattaaaccggtgaaactggatattcatccgaatcattga

SEQ ID NO: 11121 - protein, 486 aa, Bacteroides thetaiotaomicron VPI
MCYCYKTTDMEQKLSKKTRTESDLIGSREVPESALYGVQTLRGIENFRISKFHLNEYPLFIQALAITKMGAAVANRELDLLTEEQTDAILKACKEILEGKHHDQFPVDMIQGGAGTTTNMNANEVIANRALELMGHARGEYHYCSPNDHVNRSQSTNDAYPTAIHIGLYYTHLKLVKHFATLIEAFRKKGAEFAHIIKMGRTQLEDAVPMTLGQTFNGFASILEHELKNLDFAAQDFLTVNMGATAIGTGITAEPEYAEKCIAALRKITGLDIKLADDLIGATSDTSCMVGYSSAMRRVAVKMNKICNDLRLLASGPRCGLGEINLPAMQPGSSIMPGKVNPVIPEVMNQVSYKVIGNDLCVAMSGEAAQMELNAMEPVMAQCCFESADLLMNGFDTLRTLCIDGITANEEKCRRDVHNSIGVVTALNPVIGYKHSTKIAKEALETGKGVYELVLEHNILSKEDLDTILKPENMIKPVKLDIHPNH

SEQ ID NO: 11122 - DNA, 1440 bp, Wigglesworthia glossinidia brevipalpis
  CDS (1)..(1440)
atgttaaattctattcgaatcgaacaagatatgattggaatacgtgaaatttcaaatgaattttattatggcattcatactcttagagctatagaaaatttcaaaattagtaaaaatactattaacgattatcctgaattaatcaagggaatggtgatggtgaaaaaagcatctgctcttgcaaacaaacatttaaaagttttatcagaaaaaaacgcaaaaattatagtaagagcttgtgattgtattttaaaaaaacaaaatatttatcttgatcaatttccagtagacgcttttcaaggaggagctggaacatctgtaaatatgaatgttaatgaagttttgactaatattggattagaaataatgggtaagaaaaaaggagattataagtttcttaatccaaatgatcatttaaatttaagtcaatccacaaacgatgcatatccaactggacttcgtttatcaatatataaatctatatacaaattaattaaatcaatcatattaattgaagatagtttttataaaaaatcaaaagaattttctaaaataataaaaatgggtagaacgcaattacaagatgctgtcccaatgacattgggtcaagaattttatgcttttaaaacatctttaaaaaaagaaagaataaatttaattaatacatctaaattattattagatattaatcttggaggaacagcaataggaactaaattaaatactcctaaaggatatcaaaaagtagttgtaaaacaattatcaattgttagcggaatacagttcaatccagtaaaagatcttatagaatctacatatgattgtggaatatatactattgtgcatggaaatttaaaaaatttagctattagattatctaaaatttgtaatgatttaagattattgtcatctgggccaagagctgggttaaatgaaataaatttacctgaacttcaagctggatcttcgataatgcctgctaaagttaacccagttttaccagaagtagttaatcaggtatgttttaaggtatgtggaaatgatatttgcgtaatgatggcagcagagtcaggtcaattacaattaaatgctatggaaccagtaataagtcaatctatatttgaatcaataaatattctcaaaaatgctattttatctttaaaagaaaaatgtatagatggaatcacagcaaataaaaaaatttgtgaatcttatgtattaaattctataggaatagttgcatatttaaatccttttattggtcatcataacggagatataatcggaaaaatttgttctaaaagcggtagaagtgtaaaagaagttgtattggaaaaaggatttttaacagaaaaagaacttaatgatattttttcatttaataatttaatacatccaaaatataaaaataaaaatagttctgaagatttatcaatctaa

SEQ ID NO: 11123 - protein, 479 aa, Wigglesworthia glossinidia brevipalpis
MLNSIRIEQDMIGIREISNEFYYGIHTLRAIENFKISKNTINDYPELIKGMVMVKKASALANKHLKVLSEKNAKIIVRACDCILKKQNIYLDQFPVDAFQGGAGTSVNMNVNEVLTNIGLEIMGKKKGDYKFLNPNDHLNLSQSTNDAYPTGLRLSIYKSIYKLIKSIILIEDSFYKKSKEFSKIIKMGRTQLQDAVPMTLGQEFYAFKTSLKKERINLINTSKLLLDINLGGTAIGTKLNTPKGYQKVVVKQLSIVSGIQFNPVKDLIESTYDCGIYTIVHGNLKNLAIRLSKICNDLRLLSSGPRAGLNEINLPELQAGSSIMPAKVNPVLPEVVNQVCFKVCGNDICVMMAAESGQLQLNAMEPVISQSIFESINILKNAILSLKEKCIDGITANKKICESYVLNSIGIVAYLNPFIGHHNGDIIGKICSKSGRSVKEVVLEKGFLTEKELNDIFSFNNLIHPKYKNKNSSEDLSI

SEQ ID NO: 11124 - DNA, 1617 bp, Corynebacterium efficiens YS
  CDS (1)..(1617)
atgtcgaacgaggataagaaggtgtccgaggacacgtccagcgagcaggcggagcaggtggaccagacggaccagaccggaaacccggaggattccgcggtggacggggaggccctggtgaccaccacggagaccacctccaccggtgagaagaccgcggcggcgaaggccgcggaaaaccgcaggaagatcaagaggaatttccgtgtggaatccgacctgctgggggagatggagatcccggccgatgcctactacggtgtccacaccctgcgtgccgtggagaacttccagatctcacgcaccaccatcaaccacgtcccggagttcatccgcggcatggtgcaggtgaagaaggccgccgccctggccaaccgccgcctgcacaccctgcccgccgacaaggccaaggcgatcatctgggcctgtgatcagatcctcgtcgagggccgctgcatggaccagttcccgatcgacgtgttccagggcggggcgggcaccagcaccaacatgaacaccaatgaggtggtggccaacctggcgctggagtacatggggtacgagaagggacgctacgacatcctgcaccccatggatgacgtgaacatgtcccagtccaccaatgatgcctatcccacgggtttccgactcggcatctatgctgcgatgaccaacctcatcgcggagatcgaacagctccaggtcgccttccgggagaagggcaatgagttcatcgacatcatcaagatgggccgcacccagctccaggatgcggtgccgatgagcctgggtgaggagttccaggccttcgccgcgaacctggccgaggaacagtccgtgctgcgcgcctccatggaccgtctcctcgaggtcaacctcggtgccaccgccatcggtaccggcgtgaacaccccggccggataccggcaccaggtggtcgcctccctctccgaggtcaccggcctggagatcaaatccgcccgtgatctcatcgaggccacctcggacaccggtgcctacgtcctggcgcattccgcggtcaagcgtgcagccatgaaactgtccaagatctgcaacgatctgcgcctgctgtcctccggcccgcgcgccggactcaacgagatcaacctcccgccgcgtcaggccggatcctccatcatgccggcgaaggtcaacccggtcatccccgaggtggtcaaccaggtctgcttcaaggtcttcggcaatgacctcaccgtggccatggccgccgaggccggtcagctgcagctcaatgtgatggaaccggtcatcggggagtcgctgttccagtcgatccgtatcctgggcaatgcgagcaagaccctgcgggagaagtgcgtggtgggcatcaccgcgaatgcggatgtctgccggtcctatgtggagaactccatcggcatcatcacctacctcaacccgtttttgggccatgacatcggtgatgccatcggtaaggaggccgcggagacgggccggtccgtccgggagctgatcctggagaagaacctcatggatgcggcgaccctggataccgtgttgtccaaggagaacctgatgcacccgatcttccggggcaagctgtacctggatcagtag

SEQ ID NO: 11125 - protein, 538 aa, Corynebacterium efficiens YS
MSNEDKKVSEDTSSEQAEQVDQTDQTGNPEDSAVDGEALVTTTETTSTGEKTAAAKAAENRRKIKRNFRVESDLLGEMEIPADAYYGVHTLRAVENFQISRTTINHVPEFIRGMVQVKKAAALANRRLHTLPADKAKAIIWACDQILVEGRCMDQFPIDVFQGGAGTSTNMNTNEVVANLALEYMGYEKGRYDILHPMDDVNMSQSTNDAYPTGFRLGIYAAMTNLIAEIEQLQVAFREKGNEFIDIIKMGRTQLQDAVPMSLGEEFQAFAANLAEEQSVLRASMDRLLEVNLGATAIGTGVNTPAGYRHQVVASLSEVTGLEIKSARDLIEATSDTGAYVLAHSAVKRAAMKLSKICNDLRLLSSGPRAGLNEINLPPRQAGSSIMPAKVNPVIPEVVNQVCFKVFGNDLTVAMAAEAGQLQLNVMEPVIGESLFQSIRILGNASKTLREKCVVGITANADVCRSYVENSIGIITYLNPFLGHDIGDAIGKEAAETGRSVRELILEKNLMDAATLDTVLSKENLMHPIFRGKLYLDQ

SEQ ID NO: 11126 - DNA, 1473 bp, Bifidobacterium longum
  CDS (1)..(1473)
atgctggcgtttccaacccacgcacaggaagatggaagcatgagcgaaacatcgaacaagacccgtctggaacatgactgcatcggccagatggaggtgccggcgaacgtctactggggtattcacacccagcgcgctatcggcaacttcccggtctccggcatcaccgatagccaacatcccgagctgattcgcgcctatgccacggtcaagcgcgcctgcgccatcgccaatgaggaattaggcctgatcgacccagccaaggccgaggccattcgcgccgcctgcctagaaattgaggccggcaaactggccgatcagttcccggtcgatgtgatgcagggcggtgccggcacctcgtcgaacatgaacatgaacgaggtgatcgccaaccgtgcgttggaaatcgccggccgccagcgcggcgattacacatacatccatccgaacgacgacgtcaacaagtcgcagtccacgaacgacacctacccggccgcctgcaaactcgcgcttatcgacgcgatcgggccgctcgccgagtccaccaagaaactcgccaaggccttccacgatctggccgacaaacatatcaatgacgtgacgattggccgcacgcagctgcaggacgccgtaccaatgacctatggtcaggaatttcatgcgtttgccacgctgttgaagtctgatttggctgcattcgatcgcgtggtgccgctgctggcccagctcaacctcggtgccaccgccatcggtaccggcatttgcgcggatctgcgattccgcaagtccgctatcaagcatctggcgcaaatcaccgggctgccggtcaccgccgcgcccgatccggtggccgccatgacggatatgggcgcgtacgtggccacgtcggctgccatcaagagcctcgccgtgcacctgaagaaggccgccgacgatttgcgactgctcaattccgggccgcgctgcggtttcaacgatctcaacgtgccggctcgccaggccggatcgtcgatcatgccggccaaagtgaaccctgtgatccccgaatgcgtcaaccagtgctgcttcacgattttcggcatggacgtgactgtgaactgggctgtggccgagggacagttgcagctgaacgccttcgacccggtgatggtgcatgagctgctgaccggcatggcgttgctgacgcacgccatggagacgttccgcgtcaactgcgtggaaggcatcgaaatcaatgctgacctggggcgttcatacgctcagtcctcaccgtcgatttccgccgcgctcaaccactacatcggctacgagcacgcggccgacatcgccgccgaagccgtacataccggccgtaccgtgcgcgaggtggccggcgaacgcaccgacctgcccgccgagcagttggacgagattctcgatccgattcgactggcccgaggcctcggccagacctgccgcgagcaccaggagtag

SEQ ID NO: 11127 - protein, 490 aa, Bifidobacterium longum
MLAFPTHAQEDGSMSETSNKTRLEHDCIGQMEVPANVYWGIHTQRAIGNFPVSGITDSQHPELIRAYATVKRACAIANEELGLIDPAKAEAIRAACLEIEAGKLADQFPVDVMQGGAGTSSNMNMNEVIANRALEIAGRQRGDYTYIHPNDDVNKSQSTNDTYPAACKLALIDAIGPLAESTKKLAKAFHDLADKHINDVTIGRTQLQDAVPMTYGQEFHAFATLLKSDLAAFDRVVPLLAQLNLGATAIGTGICADLRFRKSAIKHLAQITGLPVTAAPDPVAAMTDMGAYVATSAAIKSLAVHLKKAADDLRLLNSGPRCGFNDLNVPARQAGSSIMPAKVNPVIPECVNQCCFTIFGMDVTVNWAVAEGQLQLNAFDPVMVHELLTGMALLTHAMETFRVNCVEGIEINADLGRSYAQSSPSISAALNHYIGYEHAADIAAEAVHTGRTVREVAGERTDLPAEQLDEILDPIRLARGLGQTCREHQE

SEQ ID NO: 11128 - DNA, 1410 bp, Cytophaga sp
  CDS (1)..(1410)
atgggatcaacaagaaaagaacatgattttttaggggaattagatattcctaatcatttatattatggtatccaaactttcagagctgtagagaatttcaatattacaggaattccaatttcaaaagagcctttatttataaaagctttgggatatgtaaaaaaagcagcggctttagcgaacaaagattgcggacgacttgaccctaaaattgccgaagcaatctgttacggaagtgatcaggttattgccggtaaatttgatcaggaatttgtaagcgatttgattcagggaggagcaggaacatccgttaatatgaacgccaatgaagtgattgctaatattggtttagaatatctgggacataaaaaaggagattataacttcttgcacccgaataatcatgttaactgttctcaatctacaaacgatgcttatccatcagcttttagaattgcactttaccttaaaatggaaagttttattaaaacactggaaggtttagaagttgcatttgttgctaatggagaagaatttaaaagtgttttgaaaatgggaagaacgcaattgcaagatgcggttcctatgactttagggcaagaattcagatcttacgcaacaactataggcgaggatgtaagaaggttaaaagaagcgcaaagcctggtgttagaaatcaacatgggagcaacagcaattgggacaagagtaaacgcaccggaaggatatcctgaaatttgtgtgaactatttagcaaaagaagttgggattcctttaacgctttcgccggatttaattgaagctactgttgataccggagcttacgttcagattatggggacattgaaaagaactgctgtaaaaatttctaaaatctgtaatgatttaaggttattgagttcaggaccaagaactggtttcaacgaaatcaatttgccggcacgtcagccaggatcttctattatgccgggaaaagtaaatcctgtaattccggaagtcgtaaaccagacttgtttttatgttattggtcaggatttaacagttactatggctgctgaagcgggacaattgcaattgaatgtaatggagcctgtaattgcttttgccatgtttacctcattagattatctttctaatgcaattcagactttaattgataaatgtatcatcggaatcacagctaatgtagatcattgctataatatggtgatgaacagtattggtattgtaacgcaattaaaccctattttaggttacgaaataagtgccagtattgccggtgaagccttaaaaatgaataaaagcgttcacgaaattgttgtggtggaaagaaaattaatcactcaggaaaaatgggatgaaatttattctttagacaacttaataaatcctaagtttatcacgaaataa

SEQ ID NO: 11129 - protein, 469 aa, Cytophaga sp
MGSTRKEHDFLGELDIPNHLYYGIQTFRAVENFNITGIPISKEPLFIKALGYVKKAAALANKDCGRLDPKIAEAICYGSDQVIAGKFDQEFVSDLIQGGAGTSVNMNANEVIANIGLEYLGHKKGDYNFLHPNNHVNCSQSTNDAYPSAFRIALYLKMESFIKTLEGLEVAFVANGEEFKSVLKMGRTQLQDAVPMTLGQEFRSYATTIGEDVRRLKEAQSLVLEINMGATAIGTRVNAPEGYPEICVNYLAKEVGIPLTLSPDLIEATVDTGAYVQIMGTLKRTAVKISKICNDLRLLSSGPRTGFNEINLPARQPGSSIMPGKVNPVIPEVVNQTCFYVIGQDLTVTMAAEAGQLQLNVMEPVIAFAMFTSLDYLSNAIQTLIDKCIIGITANVDHCYNMVMNSIGIVTQLNPILGYEISASIAGEALKMNKSVHEIVVVERKLITQEKWDEIYSLDNLINPKFITK

SEQ ID NO: 11130 - DNA, 1386 bp, Thermoanaerobacter tengcongensis
  CDS (1)..(1386)
atgccgcgtattgaaaaagatttcttgggtgaattaacacttgaagataatgaactttatggaattcatacaaaacgagctttgaaaaacttctctgtatcttcacaaaagattgatatagatcttgtacgagcaattgtgatggtcaaaaaagcatgcgcaattgcaaattttgaggttggaaacctcgatgaaaaaataaaagatgcaattgtctttgcatgtgatgagattttagccggcaaatacaccgagcaatttgtggtagacaaattccaaggcggtgctggaacatctacaaatatgaacgtaaatgaagtaattgccaacatagcactcatttatcttggcaaaaaaccaggagagtatcaatacatccatcctatagaccatgttaatatgtcacaatcgacaaatgatgtctacccaaccgctttgaggattgcaacaatatggaatgtgagagaactttctgaagagtgtgcagaactccaaaaaagcttgcaaaaaaaagagcatgagtttgaaggtgtaattaaggctgggcgcactcaacttcaagatgcccttcccatcaccttagggcaagagtttggggcgtatgcacaggcgatatcacgcgatagatggcgaatatataaaattgaagaaagattaagagtggtaaacttgggcgcaacagctgttggaacaggagtgaatgcaagcttaaaatatatgtttaaagtgatagaacttttgcgcgattttactaaaataggcttggctcggtctgattacctcatggatgcaacacaaaatgcagatgtatttgtggaatgctcgggtcttttaaaagccttggcggtgaatctatcaaaaattgcaaatgacttaaggctcttatcatctggtccaaacacgggtttaaacgagataaacttacctgctgcacaagcaggttcaagcattatgcctggtaaagtaaatcctgtcatacctgaacttataaacaccatatcattccaggttatgtcaaatgatgttgcaataaccttagcagcccaagcaggtcagcttgagctaaatgcattcttgcctttaattgcaaacaatttgcttgaaagcctcaaaattctcaaaaacggaatcaggatattcagaaaacagtgcattgatggaataacagcaaacaaagaaagatgtcttgagtttgccaaaaagactccttctattgccgctgcattgattgataaaatagggtatgacaaggcaagtgaaattgctaaaaaagccattgccgagaataaggaaataattgaggtggtaaaggaattgaagatcttaaatgagaatgaggctgaagcactactaaatccttttgaatttgtaaagtttaaagagtaa

SEQ ID NO: 11131 - protein, 461 aa, Thermoanaerobacter tengcongensis
MPRIEKDFLGELTLEDNELYGIHTKRALKNFSVSSQKIDIDLVRAIVMVKKACAIANFEVGNLDEKIKDAIVFACDEILAGKYTEQFVVDKFQGGAGTSTNMNVNEVIANIALIYLGKKPGEYQYIHPIDHVNMSQSTNDVYPTALRIATIWNVRELSEECAELQKSLQKKEHEFEGVIKAGRTQLQDALPITLGQEFGAYAQAISRDRWRIYKIEERLRVVNLGATAVGTGVNASLKYMFKVIELLRDFTKIGLARSDYLMDATQNADVFVECSGLLKALAVNLSKIANDLRLLSSGPNTGLNEINLPAAQAGSSIMPGKVNPVIPELINTISFQVMSNDVAITLAAQAGQLELNAFLPLIANNLLESLKILKNGIRIFRKQCIDGITANKERCLEFAKKTPSIAAALIDKIGYDKASEIAKKAIAENKEIIEVVKELKILNENEAEALLNPFEFVKFKE

SEQ ID NO: 11132 - DNA, 1419 bp, Pasteurella multocida
  CDS (1)..(1419)
atgacagtaacaagaaaagaagtggatttactcggagaacgtgaagtaccagcagacgcatactggggaattcataccttaagagcggtagaaaattttaatatttcgaatgccgttatctcagatgtgcctgattttgtacgcggtatggtgatggtgaaaaaggcgaccgccttagcaaacggtgaattaggggcgattcctgataaaattgcaaaagcgattgtagctgcttgtgatgaaatcttaaccacaggcaaatgcttagatcaattcccgtcagatatttatcaaggcggtgcaggtacctcagtgaatatgaataccaatgaggttgtggcgaatttggcgttagagttattaggacataagaaaggggaataccaatatttagatccaatggatcatgttaacgctagccaatcaaccaatgacgcctatccaacaggtttccgtattgctgtctataacagtattatgaagctcgtggcaaaagtgctttatttacaacaaggttttgaaaataaagcaaaagaattttcgcacattcttaaaatgggacgcacgcaattacaagatgctgtgccaatgacagtaggacaagaatttaaagccttctctgttttattagatgaagaagttcgcaatttaacacgtacagcagaatacttattagaagttaatttaggtgcgacagcaattggtacgggcttaaatacaccaaaagggtatgcgccattagcggtcaaatacctgtctgaagtcacaggattaccttgtgtattagctgaaaacttaatcgaagctacctcggattgtggggcgtatgtgatggtacacggtgcattaaaacgtactgcggtgaaactatcaaaagtatgtaatgacttacgtctattatcttcaggtccgcgtgcagggttaaatgagattaatttgcctgaattacaagcgggttcatcgattatgccagcaaaagtcaacccagtggtacccgaagtggttaaccaagtttgctataaagtgatggggaacgatactaccattacctttgccgcagaggctggacaattacaattaaatgtcatggagccagtgattgcacaagcgatgtttgagtctattgatattttaaccaatgcttgtgtgaacttacgcgataaatgtattgatggcattacggtgaataaagaaacttgtgaaaactatgtctttaattctatcggtatcgtgacttatttaaatccatttattggacaccataatggtgacttagtcggtaaaatctgtgcgaaaacagggcgcggagtgaaagaggtcgtactcgaaaaaggactcctcacagaagcagaattagatgatattctctcagtggagaacttaatgaatccaacctataaagcgaagttgaataaataa

SEQ ID NO: 11133 - protein, 472 aa, Pasteurella multocida
MTVTRKEVDLLGEREVPADAYWGIHTLRAVENFNISNAVISDVPDFVRGMVMVKKATALANGELGAIPDKIAKAIVAACDEILTTGKCLDQFPSDIYQGGAGTSVNMNTNEVVANLALELLGHKKGEYQYLDPMDHVNASQSTNDAYPTGFRIAVYNSIMKLVAKVLYLQQGFENKAKEFSHILKMGRTQLQDAVPMTVGQEFKAFSVLLDEEVRNLTRTAEYLLEVNLGATAIGTGLNTPKGYAPLAVKYLSEVTGLPCVLAENLIEATSDCGAYVMVHGALKRTAVKLSKVCNDLRLLSSGPRAGLNEINLPELQAGSSIMPAKVNPVVPEVVNQVCYKVMGNDTTITFAAEAGQLQLNVMEPVIAQAMFESIDILTNACVNLRDKCIDGITVNKETCENYVFNSIGIVTYLNPFIGHHNGDLVGKICAKTGRGVKEVVLEKGLLTEAELDDILSVENLMNPTYKAKLNK

SEQ ID NO: 11134 - DNA, 1374 bp, Thermoplasma acidophilum
  CDS (1)..(1374)
atgaggacagaaagggatgttatcggggaggtgcagctgcccgacaatgtattttatggcataaacacggcaagggcaagggagaacttcaggatcaccgggctgaccgctgattctgatcacatcgtatcaattgcgcaggtcaagaaggctgcagcgcttgcaaatgccgacggaggcgcactggataaggagaaggcagattacatttcaaaggcatgcgacgagataatcggcgggaagtaccatgaccagttcgtgatagacgtctaccaggctggcgcaggaacatcctacaacatgaacgcaaatgaggtcatagccaacgttgcgctgacactgatgggcaagaataagggagagtactcggtgatacatccaaacgaccacgtgaacatgagccagtctacgaacgatgtttatccgacgatgatgcgattaacagtctccaagaagatcaggaagctcaaggatgcactcaacgaactcatagagagcttagaggcaaagagcagggaattcagggggatcgcaaagcccgggaggacccatctccaggatgctgcgcctgtaacgcttgggcttgagttcggagcctacgcctacgccatgaagaaggaccgtgatgagataatagatgcctcggactacataatggagctgaacataggggggacagcggttggcacggggataaacactgcgaagaactatcaggaaaacgtggtgaagcacataaacgagataacgaaggagaacttcaggaaaagcacgaatctgctcggcataatgcagttcatgacggatttctccagggtcatgaatgcggtcacgaacctcgccctggatgttgagaagatagcaaacgacataaggctgctttactccggccctggcgcaggcatccatgagataataattccagctgtacagcagggatcatccataatgccgggcaagataaacccgtccatcgccgaggccatgaacatgatctgccactcagtcataggagcgcagcaggcggttaatatgagcgttcaggcagggcagcttgagctgaacgtgatgatgcccaacatcgactacgagctgacgagatccatagacataatgacaaacggcctgaagatgttcaagcagaaactcatagacggcatcaaagctaacgttcctgtatgcagagaacacctggcgaacagcttcggttcagcagcgctccttaacccctatctcggatacgataacgttgcaaagatagtgagagaggccgttgaaactgggaaatcaataaaaagcctagtactcgcaaccggaaaactgacagaagagcagtacatgaagataatggacagtggggttccaaaggactga

SEQ ID NO: 11135 - protein, 457 aa, Thermoplasma acidophilum
MRTERDVIGEVQLPDNVFYGINTARARENFRITGLTADSDHIVSIAQVKKAAALANADGGALDKEKADYISKACDEIIGGKYHDQFVIDVYQAGAGTSYNMNANEVIANVALTLMGKNKGEYSVIHPNDHVNMSQSTNDVYPTMMRLTVSKKIRKLKDALNELIESLEAKSREFRGIAKPGRTHLQDAAPVTLGLEFGAYAYAMKKDRDEIIDASDYIMELNIGGTAVGTGINTAKNYQENVVKHINEITKENFRKSTNLLGIMQFMTDFSRVMNAVTNLALDVEKIANDIRLLYSGPGAGIHEIIIPAVQQGSSIMPGKINPSIAEAMNMICHSVIGAQQAVNMSVQAGQLELNVMMPNIDYELTRSIDIMTNGLKMFKQKLIDGIKANVPVCREHLANSFGSAALLNPYLGYDNVAKIVREAVETGKSIKSLVLATGKLTEEQYMKIMDSGVPKD

SEQ ID NO: 11136 - DNA, 2106 bp, Bacillus sp
  CDS (349)..(1755)
tctacagcaggaatccctgtattcactgtaaataaaccgatggaaccaaaaatggccatactaactgacagtttaatcatagcagatacattcatttgacttccctcaaaactatattaatatcctataattttccgaaaactctgaaataaaacaatatagaatctattaaataacatttatgtgaatttggcaatactattacaaaatattattaggaaacagggctctttttatattttctatgatagaatagtgtaggatttaataaagaaactctaatacaagttcgacaatgtaaacgtttgcttagagcttcgatagaaagaaaaggagattgtttttattatgaataccgatgttcgtattgagaaagactttttaggagaaaaggagattccgaaagacgcttattatggcgtacaaacaattcgggcaacggaaaattttccaattacaggttatcgtattcatccagaattaattaaatcactagggattgtaaaaaaatcagccgcattagcaaacatggaagttggcttactcgataaagaagttgggcaatatatcgtaaaagctgctgacgaagtgattgaaggaaaatggaatgatcaatttattgttgacccaattcaaggcggggcaggaacttccattaatatgaatgcaaatgaagtgattgctaaccgcgcattagaattaatgggagaggaaaaaggaaactattcaaaaattagtccaaactcccatgtaaatatgtctcaatcaacaaacgatgctttccctactgcaacgcatattgctgtgttaagtttattaaatcaattaattgaaactacaaaatacatgcaacaagaattcatgaaaaaagcagatgaattcgctggcgttattaaaatgggaagaacgcacttgcaagacgctgttcctattttattaggacaagagtttgaagcatatgctcgtgtaattgcccgcgatattgaacgtattgccaatacgagaaacaatttatacgacatcaacatgggtgcaacagcagtcggcactggcttaaatgcagatcctgaatatataagcatcgtaacagaacatttagcaaaattcagcggacatccattaagaagtgcacaacatttagtggacgcaactcaaaatacagactgctatacagaagtttcttctgcattaaaagtttgcatgatcaacatgtctaaaattgccaatgatttacgcttaatggcatctggaccacgcgcaggcttatcagaaatcgttcttcctgctcgacaacctggatcttctatcatgcctggtaaagtgaatcctgttatgccagaagtgatgaaccaagtggcattccaagtgttcggtaatgatttaacaattacatctgcttctgaagcaggccaatttgaattaaatgtgatggaacctgtgttattcttcaatttaattcaatcgatttcgattatgactaatgtctttaaatcctttacagaaaactgcttaaaaggtattaaggcaaatgaagaacgcatgaaagaatatgttgagaaaagcattggaatcattactgcaattaacccacatgtaggctatgaaacagctgcaaaattagcacgtgaagcatatcttacaggggaatccatccgtgaactttgcattaagtatggcgtattaacagaagaacagttaaatgaaatcttaaatccatatgaaatgacacatccgggaattgctggaagaaaataatgctacttttttaggcgaagggtactattgaggtgctctttgccttttattttttgagttacaacatgctcatcttgatgaagtgtaatcgaaatctgcaatgttcgataatagccaaaatcgtggagataatagtcaatcaagtaaggataatagtcaaactcgggcagataatagccaatggaagaaaaaggtgcttagcgaaattcgatattagtcaaaatcaagaagataatagtcaaccaagcaaggataatagtcaaacttgggaacataatagccaacggaagaaaaagttgcctcgcccctcggcaagataatagccaatggaagaaaaagttgcctcgcccg

SEQ ID NO: 11137 - protein, 468 aa, Bacillus sp
MNTDVRIEKDFLGEKEIPKDAYYGVQTIRATENFPITGYRIHPELIKSLGIVKKSAALANMEVGLLDKEVGQYIVKAADEVIEGKWNDQFIVDPIQGGAGTSINMNANEVIANRALELMGEEKGNYSKISPNSHVNMSQSTNDAFPTATHIAVLSLLNQLIETTKYMQQEFMKKADEFAGVIKMGRTHLQDAVPILLGQEFEAYARVIARDIERIANTRNNLYDINMGATAVGTGLNADPEYISIVTEHLAKFSGHPLRSAQHLVDATQNTDCYTEVSSALKVCMINMSKIANDLRLMASGPRAGLSEIVLPARQPGSSIMPGKVNPVMPEVMNQVAFQVFGNDLTITSASEAGQFELNVMEPVLFFNLIQSISIMTNVFKSFTENCLKGIKANEERMKEYVEKSIGIITAINPHVGYETAAKLAREAYLTGESIRELCIKYGVLTEEQLNEILNPYEMTHPGIAGRK

SEQ ID NO: 11138 - DNA, 1428 bp, Rhizobium etli
  CDS (1)..(1428)
atgacgacatccgatatgaccactattcgcgttgagcacgacctgatcggcgaccgcgacgtgccggcctcggcctattacggcgtgcatacggtgcgcgcggttgagaattttccaattaccggtcagacgctgaaggaatcggcggatctgatcgcctccctggcggcgatcaagcaggcggcggccgaggtcaatgttagcctcggccttctggatcagcagcgggccgacgccatcgtcgcggcttgcatcgaaatccgcgacggcgcgctgcacgaccagttcgtcgtcgatctgatccagggcggggcgggaacctcgaccaacatgaacgccaatgaggtgatcgcgaacagggcgctggaaatactggggcaccgccgcggcgagtaccagcacctgcatccgaacgagcacgtcaatctctcgcaatccaccaacgacgtctatccgacggcactgaagctcgccgcatggatcggcgttcaccgcctcgtcgacgccatggcgatcctgcgtcgcgcattcgcggccaaggcggtcgagtttgccgacgtgctgaagatgggccgcacccagttgcaggatgccgtgccgatgacgctcggccaggaattcggaacctacgcgctgatgctggcggaggacgaggcgcgcctcttggaagcggtctccttgatccgtgagatcaatctcggcgcgaccgcgatcggcaccggcatcaccgcccatcctcattatgccgcgctggtgcgcgagcgtctttcggccattgttggcatcgatctggtgacgtcacctgacctggtggaggcgacgcaggattgcggctccttcgtgcagctttcgggggttctcaagcgcgtggcggtcaagctttccaagacctgcaacgatctgcggctgctatcctccggcccgcgcgccggcttgaatgagatcaatctgccggcgcgccaggccggctcctcaatcatgcctggaaaggtaaaccctgttatccccgaggtcgtcaaccaggtcgccttcgaagtgatcggcaatgacgtgacgatcaccatggccgccgaggcaggccaactgcagctgaacgccttcgagccggtgatcttctacagcctctatcgcagtctcagccacctgaccaatgcctgcctgacgctagaggcgaattgcattcgagggattaccgccaaccgcgaccggctgcggcagacggtcgagcaatcgatcggcatcgtaacagcgctcaacccctatatcggctaccgcaacgccacagaggttgcgctggaagcgcatcattcgggacggggggtctatgaaatccttctcgagcgcggcctgatgcagaaggagcatctcgatgcggtgctgcgcccggaaacgctgacccggccgagcgagaagctgtccttctcgtaa

SEQ ID NO: 11139 - protein, 475 aa, Rhizobium etli
MTTSDMTTIRVEHDLIGDRDVPASAYYGVHTVRAVENFPITGQTLKESADLIASLAAIKQAAAEVNVSLGLLDQQRADAIVAACIEIRDGALHDQFVVDLIQGGAGTSTNMNANEVIANRALEILGHRRGEYQHLHPNEHVNLSQSTNDVYPTALKLAAWIGVHRLVDAMAILRRAFAAKAVEFADVLKMGRTQLQDAVPMTLGQEFGTYALMLAEDEARLLEAVSLIREINLGATAIGTGITAHPHYAALVRERLSAIVGIDLVTSPDLVEATQDCGSFVQLSGVLKRVAVKLSKTCNDLRLLSSGPRAGLNEINLPARQAGSSIMPGKVNPVIPEVVNQVAFEVIGNDVTITMAAEAGQLQLNAFEPVIFYSLYRSLSHLTNACLTLEANCIRGITANRDRLRQTVEQSIGIVTALNPYIGYRNATEVALEAHHSGRGVYEILLERGLMQKEHLDAVLRPETLTRPSEKLSFS

SEQ ID NO: 11140 - DNA, 1581 bp, Corynebacterium glutamicum
  CDS (1)..(1581)
atgtctaagacgagcaacaagtcttcagcagactcaaagaatgacgcaaaagccgaagacattgtgaacggcgagaaccaaatcgccacgaatgagtcgcagtcttcagacagcgctgcagtttcggaacgtgtcgtcgaaccaaaaaccacggttcagaaaaagttccgaatcgaatcggatctgcttggtgaacttcagatcccatcccacgcatattacggggtgcacacccttcgtgcggtggacaacttccaaatctcacgaaccaccatcaaccacgtcccagatttcattcgcggcatggtccaggtgaaaaaggccgcagctttagcaaaccgccgactgcacacacttccagcacaaaaagcagaagcaattgtctgggcttgtgatcagatcctcattgaggaacgctgtatggatcagttccccatcgatgtgttccagggtggcgcaggtacctcactgaacatgaacaccaacgaggttgttgccaaccttgcacttgagttcttaggccatgaaaagggcgagtaccacatcctgcaccccatggatgatgtgaacatgtcccagtccaccaacgattcctacccaactggtttccgcctgggcatttacgctggactgcagaccctcatcgctgaaattgatgagcttcaggttgcgttccgccacaagggcaatgagtttgtcgacatcatcaagatgggccgcacccagttgcaggatgctgttcccatgagcttgggcgaagagttccgagcattcgcgcacaacctcgcagaagagcagaccgtgctgcgtgaagctgccaaccgtctcctcgaggtcaatcttggtgcaaccgcaatcggtactggtgtgaacactccagcaggctaccgccaccaggttgtcgctgctctgtctgaggtcaccggactggaactaaagtccgcacgtgatctcatcgaggctacctctgacaccggtgcatatgttcatgcgcactccgcaatcaagcgtgcagccatgaaactgtccaagatctgtaacgatctacgtctgctgtcttctggtcctcgtgctggcttgaacgaaatcaacctgccaccacgccaggctggttcctccatcatgccagccaaggtcaacccagtgatcccagaagtggtcaaccaggtctgcttcaaggtcttcggtaacgatctcaccgtcaccatggctgcggaagctggccagttgcagctcaacgtcatggagccagtcattggcgaatccctcttccagtcactgcgcatcctgggcaatgcagccaagactttgcgtgagaagtgcgtcgtaggaatcaccgccaacgctgatgtttgccgtgcttacgttgataactccatcgggattatcacttacctgaacccattcctgggccacgacattggagatcagatcggtaaggaagcagccgaaactggtcgaccagtgcgtgaactcatcctggaaaagaagctcatggatgaaaagacgctcgaggcagtcctgtccaaggagaacctcatgcacccaatgttccgcggaaggctctacttggagaactaa

SEQ ID NO: 11141 - protein, 526 aa, Corynebacterium glutamicum
MSKTSNKSSADSKNDAKAEDIVNGENQIATNESQSSDSAAVSERVVEPKTTVQKKFRIESDLLGELQIPSHAYYGVHTLRAVDNFQISRTTINHVPDFIRGMVQVKKAAALANRRLHTLPAQKAEAIVWACDQILIEERCMDQFPIDVFQGGAGTSLNMNTNEVVANLALEFLGHEKGEYHILHPMDDVNMSQSTNDSYPTGFRLGIYAGLQTLIAEIDELQVAFRHKGNEFVDIIKMGRTQLQDAVPMSLGEEFRAFAHNLAEEQTVLREAANRLLEVNLGATAIGTGVNTPAGYRHQVVAALSEVTGLELKSARDLIEATSDTGAYVHAHSAIKRAAMKLSKICNDLRLLSSGPRAGLNEINLPPRQAGSSIMPAKVNPVIPEVVNQVCFKVFGNDLTVTMAAEAGQLQLNVMEPVIGESLFQSLRILGNAAKTLREKCVVGITANADVCRAYVDNSIGIITYLNPFLGHDIGDQIGKEAAETGRPVRELILEKKLMDEKTLEAVLSKENLMHPMFRGRLYLEN

SEQ ID NO: 11142 - DNA, 26 bp, Artificial sequence
  Primer sequence
atgtgtttaaagcaaatcattggcag

SEQ ID NO: 11143 - DNA, 25 bp, Artificial sequence
  Primer sequence
ttactgttcgctttcatcagtatag

SEQ ID NO: 11144 - DNA, 1791 bp, Saccharomyces cerevisiae; identical to SEQ ID NO: 7248
  CDS (2)..(1504)

SEQ ID NO: 11145 - protein, 500 aa, Saccharomyces cerevisiae; identical to SEQ ID NO: 7249

SEQ ID NO: 11146 - DNA, 1461 bp, Vibrio cholerae; identical to SEQ ID NO: 7250
  CDS (1)..(1461)

SEQ ID NO: 11147 - protein, 486 aa, Vibrio cholerae; identical to SEQ ID NO: 7251

SEQ ID NO: 11148 - DNA, 1455 bp, Chlamydophila pneumoniae, Chlamydia pneumoniae; identical to SEQ ID NO: 7252
  CDS (1)..(1455)

SEQ ID NO: 11149 - protein, 484 aa, Chlamydophila pneumoniae, Chlamydia pneumoniae; identical to SEQ ID NO: 7253

SEQ ID NO: 11150 - DNA, 1419 bp, Clostridium acetobutylicum; identical to SEQ ID NO: 7254
  CDS (1)..(1419)

SEQ ID NO: 11151 - protein, 472 aa, Clostridium acetobutylicum; identical to SEQ ID NO: 7255

SEQ ID NO: 11152 - DNA, 1413 bp, Yersinia pestis; identical to SEQ ID NO: 7256
  CDS (1)..(1413)

SEQ ID NO: 11153 - protein, 470 aa, Yersinia pestis; identical to SEQ ID NO: 7257

SEQ ID NO: 11154 - DNA, 1413 bp, Salmonella enterica subsp. enterica serovar Typhi; identical to SEQ ID NO: 7258
  CDS (1)..(1413)

SEQ ID NO: 11155 - protein, 470 aa, Salmonella enterica subsp. enterica serovar Typhi; identical to SEQ ID NO: 7259

SEQ ID NO: 11156 - DNA, 1758 bp, Listeria innocua; identical to SEQ ID NO: 7260
  CDS (1)..(1758)

SEQ ID NO: 11157 - protein, 585 aa, Listeria innocua; identical to SEQ ID NO: 7261

SEQ ID NO: 11158 - DNA, 1431 bp, Nostoc sp. PCC 7120; identical to SEQ ID NO: 7262
  CDS (1)..(1431)

SEQ ID NO: 11159 - protein, 476 aa, Nostoc sp. PCC 7120; identical to SEQ ID NO: 7263

SEQ ID NO: 11160 - DNA, 1440 bp, Agrobacterium tumefaciens; identical to SEQ ID NO: 7264
  CDS (1)..(1440)

SEQ ID NO: 11161 - protein, 479 aa, Agrobacterium tumefaciens; identical to SEQ ID NO: 7265

SEQ ID NO: 11162 - DNA, 1770 bp, Nostoc sp. PCC 7120; identical to SEQ ID NO: 7266
  CDS (1)..(1770)

SEQ ID NO: 11163 - protein, 589 aa, Nostoc sp. PCC 7120; identical to SEQ ID NO: 7267

SEQ ID NO: 11164 - DNA, 1401 bp, Thermotoga maritima; identical to SEQ ID NO: 7268
  CDS (1)..(1401)

SEQ ID NO: 11165 - protein, 466 aa, Thermotoga maritima; identical to SEQ ID NO: 7269

SEQ ID NO: 11166 - DNA, 1377 bp, Aeropyrum pernix; identical to SEQ ID NO: 7270
  CDS (1)..(1377)

SEQ ID NO: 11167 - protein, 458 aa, Aeropyrum pernix; identical to SEQ ID NO: 7271

SEQ ID NO: 11168 - DNA, 1449 bp, Deinococcus radiodurans; identical to SEQ ID NO: 7272
  CDS (1)..(1449)

SEQ ID NO: 11169 - protein, 482 aa, Deinococcus radiodurans; identical to SEQ ID NO: 7273

SEQ ID NO: 11170 - DNA, 1446 bp, Vibrio cholerae; identical to SEQ ID NO: 7274
  CDS (1)..(1446)

SEQ ID NO: 11171 - protein, 481 aa, Vibrio cholerae; identical to SEQ ID NO: 7275

SEQ ID NO: 11172 - DNA, 1740 bp, Halobacterium sp. NRC-1; identical to SEQ ID NO: 7276
  CDS (1)..(1740)

SEQ ID NO: 11173 - protein, 579 aa, Halobacterium sp. NRC-1; identical to SEQ ID NO: 7277

SEQ ID NO: 11174 - DNA, 1437 bp, Haemophilus influenzae; identical to SEQ ID NO: 7278
  CDS (1)..(1437)

SEQ ID NO: 11175 - protein, 478 aa, Haemophilus influenzae; identical to SEQ ID NO: 7279

SEQ ID NO: 11176 - DNA, 1434 bp, Borrelia burgdorferi (Lyme disease spirochete); identical to SEQ ID NO: 7280
  CDS (1)..(1434)

SEQ ID NO: 11177 - protein, 477 aa, Borrelia burgdorferi (Lyme disease spirochete); identical to SEQ ID NO: 7281

SEQ ID NO: 11178 - DNA, 1413 bp, Vibrio cholerae; identical to SEQ ID NO: 7282
  CDS (1)..(1413)

SEQ ID NO: 11179 - protein, 470 aa, Vibrio cholerae; identical to SEQ ID NO: 7283

SEQ ID NO: 11180 - DNA, 1755 bp, Bacillus halodurans; identical to SEQ ID NO: 7284
  CDS (1)..(1755)

SEQ ID NO: 11181 - protein, 584 aa, Bacillus halodurans; identical to SEQ ID NO: 7285

SEQ ID NO: 11182 - DNA, 1443 bp, Buchnera sp; identical to SEQ ID NO: 7286
  CDS (1)..(1443)

SEQ ID NO: 11183 - protein, 480 aa, Buchnera sp; identical to SEQ ID NO: 7287

SEQ ID NO: 11184 - DNA, 1344 bp, Methanococcus jannaschii; identical to SEQ ID NO: 7288
  CDS (1)..(1344)

SEQ ID NO: 11185 - protein, 447 aa, Methanococcus jannaschii; identical to SEQ ID NO: 7289

SEQ ID NO: 11186 - DNA, 1413 bp, Escherichia coli; identical to SEQ ID NO: 7290
  CDS (1)..(1413)

SEQ ID NO: 11187 - protein, 470 aa, Escherichia coli; identical to SEQ ID NO: 7291

SEQ ID NO: 11188 - DNA, 1434 bp, Pseudomonas aeruginosa; identical to SEQ ID NO: 7292
  CDS (1)..(1434)

SEQ ID NO: 11189 - protein, 477 aa, Pseudomonas aeruginosa; identical to SEQ ID NO: 7293

SEQ ID NO: 11190 - DNA, 1509 bp, Lactococcus lactis subsp. lactis; identical to SEQ ID NO: 7294
  CDS (1)..(1509)

SEQ ID NO: 11191 - protein, 502 aa, Lactococcus lactis subsp. lactis; identical to SEQ ID NO: 7295

SEQ ID NO: 11192 - DNA, 1431 bp, Caulobacter crescentus; identical to SEQ ID NO: 7296
  CDS (1)..(1431)

SEQ ID NO: 11193 - protein, 476 aa, Caulobacter crescentus; identical to SEQ ID NO: 7297

SEQ ID NO: 11194 - DNA, 1452 bp, Pseudomonas aeruginosa; identical to SEQ ID NO: 7298
  CDS (1)..(1452)

SEQ ID NO: 11195 - protein, 483 aa, Pseudomonas aeruginosa; identical to SEQ ID NO: 7299

SEQ ID NO: 11196 - DNA, 1437 bp, Pyrococcus horikoshii; identical to SEQ ID NO: 7300
  CDS (1)..(1437)

SEQ ID NO: 11197 - protein, 478 aa, Pyrococcus horikoshii; identical to SEQ ID NO: 7301

SEQ ID NO: 11198 - DNA, 1443 bp, Campylobacter jejuni; identical to SEQ ID NO: 7302
  CDS (1)..(1443)

SEQ ID NO: 11199 - protein, 480 aa, Campylobacter jejuni; identical to SEQ ID NO: 7303

SEQ ID NO: 11200 - DNA, 1446 bp, Chlamydia muridarum, Chlamydia trachomatis MoPn; identical to SEQ ID NO: 7304
  CDS (1)..(1446)

SEQ ID NO: 11201 - protein, 481 aa, Chlamydia muridarum, Chlamydia trachomatis MoPn; identical to SEQ ID NO: 7305

SEQ ID NO: 11202 - DNA, 1704 bp, Arabidopsis thaliana (mouse-ear cress); identical to SEQ ID NO: 7306
  CDS (1)..(1704)

SEQ ID NO: 11203 - protein, 567 aa, Arabidopsis thaliana (mouse-ear cress); identical to SEQ ID NO: 7307

SEQ ID NO: 11204 - DNA, 1758 bp, Staphylococcus aureus; identical to SEQ ID NO: 7308
  CDS (1)..(1758)

SEQ ID NO: 11205 - protein, 585 aa, Staphylococcus aureus; identical to SEQ ID NO: 7309

SEQ ID NO: 11206 - DNA, 1758 bp, Bacillus subtilis; identical to SEQ ID NO: 7310
  CDS (1)..(1758)

SEQ ID NO: 11207 - protein, 585 aa, Bacillus subtilis; identical to SEQ ID NO: 7311

SEQ ID NO: 11208 - DNA, 1419 bp, Mycobacterium tuberculosis; identical to SEQ ID NO: 7312
  CDS (1)..(1419)

SEQ ID NO: 11209 - protein, 472 aa, Mycobacterium tuberculosis; identical to SEQ ID NO: 7313

SEQ ID NO: 11210 - DNA, 1458 bp, Chlamydia trachomatis; identical to SEQ ID NO: 7314
  CDS (1)..(1458)

SEQ ID NO: 11211 - protein, 485 aa, Chlamydia trachomatis; identical to SEQ ID NO: 7315

SEQ ID NO: 11212 - DNA, 1437 bp, Pyrococcus abyssi; identical to SEQ ID NO: 7316
  CDS (1)..(1437)

SEQ ID NO: 11213 - protein, 478 aa, Pyrococcus abyssi; identical to SEQ ID NO: 7317

SEQ ID NO: 11214 - DNA, 1473 bp, Neisseria meningitidis; identical to SEQ ID NO: 7318
  CDS (1)..(1473)

SEQ ID NO: 11215 - protein, 490 aa, Neisseria meningitidis; identical to SEQ ID NO: 7319

SEQ ID NO: 11216 - DNA, 1506 bp, Streptococcus pneumoniae; identical to SEQ ID NO: 7320
  CDS (1)..(1506)

SEQ ID NO: 11217 - protein, 501 aa, Streptococcus pneumoniae; identical to SEQ ID NO: 7321

SEQ ID NO: 11218 - DNA, 1422 bp, Clostridium acetobutylicum; identical to SEQ ID NO: 7322
  CDS (1)..(1422)

SEQ ID NO: 11219 - protein, 473 aa, Clostridium acetobutylicum; identical to SEQ ID NO: 7323

SEQ ID NO: 11220 - DNA, 1359 bp, Sulfolobus solfataricus; identical to SEQ ID NO: 7324
  CDS (1)..(1359)

SEQ ID NO: 11221 - protein, 452 aa, Sulfolobus solfataricus; identical to SEQ ID NO: 7325

SEQ ID NO: 11222 - DNA, 1428 bp, Mycoplasma pulmonis; identical to SEQ ID NO: 7326
  CDS (1)..(1428): transl_table=4

SEQ ID NO: 11223 - protein, 475 aa, Mycoplasma pulmonis; identical to SEQ ID NO: 7327

SEQ ID NO: 11224 - DNA, 1533 bp, Solanum tuberosum (potato); identical to SEQ ID NO: 7328
  CDS (1)..(1533)

SEQ ID NO: 11225 - protein, 510 aa, Solanum tuberosum (potato); identical to SEQ ID NO: 7329

SEQ ID NO: 11226 - DNA, 2083 bp, Bacillus psychrophilus; identical to SEQ ID NO: 7330
  CDS (271)..(2031)

SEQ ID NO: 11227 - protein, 586 aa, Bacillus psychrophilus; identical to SEQ ID NO: 7331

SEQ ID NO: 11228 - DNA, 2054 bp, Bacillus licheniformis; identical to SEQ ID NO: 7332
  CDS (132)..(1889)

SEQ ID NO: 11229 - protein, 585 aa, Bacillus licheniformis; identical to SEQ ID NO: 7333

SEQ ID NO: 11230 - DNA, 1617 bp, Trichoderma reesei; identical to SEQ ID NO: 7334
  CDS (1)..(1617)

SEQ ID NO: 11231 - protein, 538 aa, Trichoderma reesei; identical to SEQ ID NO: 7335

SEQ ID NO: 11232 - DNA, 1725 bp, Rattus norvegicus (Norway rat); identical to SEQ ID NO: 7336
  CDS (1)..(1725)

SEQ ID NO: 11233 - protein, 574 aa, Rattus norvegicus (Norway rat); identical to SEQ ID NO: 7337

SEQ ID NO: 11234 - DNA, 1596 bp, Trypanosoma brucei; identical to SEQ ID NO: 7338
  CDS (59)..(1558)

SEQ ID NO: 11235 - protein, 499 aa, Trypanosoma brucei; identical to SEQ ID NO: 7339

SEQ ID NO: 11236 - DNA, 1581 bp, Aspergillus niger; identical to SEQ ID NO: 7340
  CDS (1)..(1581)

SEQ ID NO: 11237 - protein, 526 aa, Aspergillus niger; identical to SEQ ID NO: 7341

SEQ ID NO: 11238 - DNA, 1636 bp, Bacillus stearothermophilus; identical to SEQ ID NO: 7342
  CDS (114)..(1598)

SEQ ID NO: 11239 - protein, 494 aa, Bacillus stearothermophilus; identical to SEQ ID NO: 7343

SEQ ID NO: 11240 - DNA, 1581 bp, Emericella nidulans, Aspergillus nidulans; identical to SEQ ID NO: 7344
  CDS (1)..(1581)

SEQ ID NO: 11241 - protein, 526 aa, Emericella nidulans, Aspergillus nidulans; identical to SEQ ID NO: 7345

SEQ ID NO: 11242 - DNA, 1847 bp, Nicotiana tabacum (common tobacco); identical to SEQ ID NO: 7346
  CDS (45)..(1571)

SEQ ID NO: 11243 - protein, 508 aa, Nicotiana tabacum (common tobacco); identical to SEQ ID NO: 7347

SEQ ID NO: 11244 - DNA, 2243 bp, Nicotiana tabacum (common tobacco); identical to SEQ ID NO: 7348
  CDS (318)..(2006)

SEQ ID NO: 11245 - protein, 562 aa, Nicotiana tabacum (common tobacco); identical to SEQ ID NO: 7349

SEQ ID NO: 11246 - DNA, 2044 bp, Xenopus sp. (clawed frog); identical to SEQ ID NO: 7350
  CDS (29)..(1612)

SEQ ID NO: 11247 - protein, 527 aa, Xenopus sp. (clawed frog); identical to SEQ ID NO: 7351

SEQ ID NO: 11248 - DNA, 2146 bp, Mus musculus (house mouse); identical to SEQ ID NO: 7352
  CDS (30)..(1625)

SEQ ID NO: 11249 - protein, 531 aa, Mus musculus (house mouse); identical to SEQ ID NO: 7353

SEQ ID NO: 11250 - DNA, 1596 bp, Homo sapiens (man); identical to SEQ ID NO: 7354
  CDS (1)..(1596)

SEQ ID NO: 11251 - protein, 531 aa, Homo sapiens (man) [sequence omitted]

SEQ ID NO: 11252 - DNA, 2113 bp, Saccharomyces cerevisiae; identical to SEQ ID NO: 7356
  CDS (437)..(1957)

SEQ ID NO: 11253 - protein, 506 aa, Saccharomyces cerevisiae; identical to SEQ ID NO: 7357

SEQ ID NO: 11254 - DNA, 1527 bp, Mycoplasma pneumoniae; identical to SEQ ID NO: 7358
  CDS (1)..(1527): transl_table=4

SEQ ID NO: 11255 - protein, 508 aa, Mycoplasma pneumoniae; identical to SEQ ID NO: 7359

SEQ ID NO: 11256 - DNA, 1452 bp, Synechocystis sp; identical to SEQ ID NO: 7360
  CDS (1)..(1452)

SEQ ID NO: 11257 - protein, 483 aa, Synechocystis sp; identical to SEQ ID NO: 7361

SEQ ID NO: 11258 - DNA, 1776 bp, Synechocystis sp; identical to SEQ ID NO: 7362
  CDS (1)..(1776)

SEQ ID NO: 11259 - protein, 591 aa, Synechocystis sp; identical to SEQ ID NO: 7363

SEQ ID NO: 11260 - DNA, 1494 bp, Arabidopsis thaliana (mouse-ear cress); identical to SEQ ID NO: 7364
  CDS (1)..(1494)

SEQ ID NO: 11261 - protein, 497 aa, Arabidopsis thaliana (mouse-ear cress); identical to SEQ ID NO: 7365

SEQ ID NO: 11262 - DNA, 2115 bp, Ricinus communis (castor bean); identical to SEQ ID NO: 7366
  CDS (118)..(1869)

SEQ ID NO: 11263 - protein, 583 aa, Ricinus communis (castor bean); identical to SEQ ID NO: 7367

SEQ ID NO: 11264 - DNA, 2022 bp, Ricinus communis (castor bean); identical to SEQ ID NO: 7368
  CDS (46)..(1527)

SEQ ID NO: 11265 - protein, 493 aa, Ricinus communis (castor bean); identical to SEQ ID NO: 7369

SEQ ID NO: 11266 - DNA, 1548 bp, Caenorhabditis elegans; identical to SEQ ID NO: 7370
  CDS (1)..(1548)

SEQ ID NO: 11267 - protein, 515 aa, Caenorhabditis elegans; identical to SEQ ID NO: 7371

SEQ ID NO: 11268 - DNA, 1437 bp, Streptomyces coelicolor; identical to SEQ ID NO: 7372
  CDS (1)..(1437)

SEQ ID NO: 11269 - protein, 478 aa, Streptomyces coelicolor; identical to SEQ ID NO: 7373

SEQ ID NO: 11270 - DNA, 1530 bp, Schizosaccharomyces pombe; identical to SEQ ID NO: 7374
  CDS (1)..(1530)

SEQ ID NO: 11271 - protein, 509 aa, Schizosaccharomyces pombe; identical to SEQ ID NO: 7375

SEQ ID NO: 11272 - DNA, 1584 bp, Arabidopsis thaliana (mouse-ear cress); identical to SEQ ID NO: 7376
  CDS (40)..(1584)

SEQ ID NO: 11273 - protein, 514 aa, Arabidopsis thaliana (mouse-ear cress); identical to SEQ ID NO: 7377

SEQ ID NO: 11274 - DNA, 1533 bp, Arabidopsis thaliana (mouse-ear cress); identical to SEQ ID NO: 7378
  CDS (1)..(1533)

SEQ ID NO: 11275 - protein, 510 aa, Arabidopsis thaliana (mouse-ear cress); identical to SEQ ID NO: 7379

SEQ ID NO: 11276 - DNA, 1479 bp, Arabidopsis thaliana (mouse-ear cress); identical to SEQ ID NO: 7380
  CDS (1)..(1479)

SEQ ID NO: 11277 - protein, 492 aa, Arabidopsis thaliana (mouse-ear cress); identical to SEQ ID NO: 7381

SEQ ID NO: 11278 - DNA, 1572 bp, synthetic construct; identical to SEQ ID NO: 7382
  CDS (1)..(1572)

SEQ ID NO: 11279 - protein, 523 aa, synthetic construct; identical to SEQ ID NO: 7383

SEQ ID NO: 11280 - DNA, 2795 bp, Corynebacterium glutamicum; identical to SEQ ID NO: 7384
  CDS (740)..(2173)

SEQ ID NO: 11281 - protein, 477 aa, Corynebacterium glutamicum; identical to SEQ ID NO: 7385

SEQ ID NO: 11282 - DNA, 2264 bp, Bacillus subtilis; identical to SEQ ID NO: 7386
  CDS (258)..(2012)

SEQ ID NO: 11283 - protein, 584 aa, Bacillus subtilis; identical to SEQ ID NO: 7387

SEQ ID NO: 11284 - DNA, 2569 bp, Zymomonas mobilis; identical to SEQ ID NO: 7388
  CDS (137)..(1564)

SEQ ID NO: 11285 - protein, 475 aa, Zymomonas mobilis; identical to SEQ ID NO: 7389

SEQ ID NO: 11286 - DNA, 1701 bp, Homo sapiens; identical to SEQ ID NO: 7390
  CDS (1)..(1701)

SEQ ID NO: 11287 - protein, 566 aa, Homo sapiens; identical to SEQ ID NO: 7391

SEQ ID NO: 11288 - DNA, 1515 bp, Debaryomyces hansenii; identical to SEQ ID NO: 7392
  CDS (1)..(1515)

SEQ ID NO: 11289 - protein, 504 aa, Debaryomyces hansenii; identical to SEQ ID NO: 7393

SEQ ID NO: 11290 - DNA, 1443 bp, Erwinia carotovora subsp; identical to SEQ ID NO: 7394
  CDS (1)..(1443)

SEQ ID NO: 11291 - protein, 480 aa, Erwinia carotovora subsp; identical to SEQ ID NO: 7395

SEQ ID NO: 11292 - DNA, 1179 bp, Mycoplasma arthritidis; identical to SEQ ID NO: 7396
  CDS (1)..(1179): transl-table=4

SEQ ID NO: 11293 - protein, 392 aa, Mycoplasma arthritidis; identical to SEQ ID NO: 7397

SEQ ID NO: 11294 - DNA, 1437 bp, Mesoplasma florum L1; identical to SEQ ID NO: 7398
  CDS (1)..(1437): transl_table=4

SEQ ID NO: 11295 - protein, 478 aa, Mesoplasma florum L1; identical to SEQ ID NO: 7399

SEQ ID NO: 11296 - DNA, 1506 bp, Candida glabrata; identical to SEQ ID NO: 7400
  CDS (1)..(1506)

SEQ ID NO: 11297 - protein, 501 aa, Candida glabrata; identical to SEQ ID NO: 7401

SEQ ID NO: 11298 - DNA, 1527 bp, Candida glabrata; identical to SEQ ID NO: 7402
  CDS (1)..(1527)

SEQ ID NO: 11299 - protein, 508 aa, Candida glabrata; identical to SEQ ID NO: 7403

SEQ ID NO: 11300 - DNA, 1071 bp, Bacillus thuringiensis serovar konkukian str; identical to SEQ ID NO: 7404
  CDS (1)..(1071)

SEQ ID NO: 11301 - protein, 356 aa, Bacillus thuringiensis serovar konkukian str; identical to SEQ ID NO: 7405

SEQ ID NO: 11302 - DNA, 1960 bp, Zea mays; identical to SEQ ID NO: 7406
  CDS (144)..(1673)

SEQ ID NO: 11303 - protein, 509 aa, Zea mays; identical to SEQ ID NO: 7407

SEQ ID NO: 11304 - DNA, 1452 bp, Mycoplasma mobile; identical to SEQ ID NO: 7408
  CDS (1)..(1452)

SEQ ID NO: 11305 - protein, 483 aa, Mycoplasma mobile; identical to SEQ ID NO: 7409

SEQ ID NO: 11306 - DNA, 1668 bp, Picrophilus torridus; identical to SEQ ID NO: 7410
  CDS (1)..(1668)

SEQ ID NO: 11307 - protein, 555 aa, Picrophilus torridus; identical to SEQ ID NO: 7411

SEQ ID NO: 11308 - DNA, 1536 bp, Plasmodium falciparum; identical to SEQ ID NO: 7412
  CDS (1)..(1536)

SEQ ID NO: 11309 - protein, 511 aa, Plasmodium falciparum; identical to SEQ ID NO: 7413

SEQ ID NO: 11310 - DNA, 1458 bp, Photobacterium profundum; identical to SEQ ID NO: 7414
  CDS (1)..(1458)

SEQ ID NO: 11311 - protein, 485 aa, Photobacterium profundum; identical to SEQ ID NO: 7415

SEQ ID NO: 11312 - DNA, 1413 bp, Photobacterium profundum; identical to SEQ ID NO: 7416
  CDS (1)..(1413)

SEQ ID NO: 11313 - protein, 470 aa, Photobacterium profundum; identical to SEQ ID NO: 7417

SEQ ID NO: 11314 - DNA, 1344 bp, Methanococcus maripaludis; identical to SEQ ID NO: 7418
  CDS (1)..(1344)

SEQ ID NO: 11315 - protein, 447 aa, Methanococcus maripaludis; identical to SEQ ID NO: 7419

SEQ ID NO: 11316 - DNA, 1797 bp, Parachlamydia sp; identical to SEQ ID NO: 7420
  CDS (1)..(1797)

SEQ ID NO: 11317 - protein, 598 aa, Parachlamydia sp; identical to SEQ ID NO: 7421

SEQ ID NO: 11318 - DNA, 1488 bp, Bdellovibrio bacteriovorus; identical to SEQ ID NO: 7422
  CDS (1)..(1488)

SEQ ID NO: 11319 - protein, 495 aa, Bdellovibrio bacteriovorus; identical to SEQ ID NO: 7423

SEQ ID NO: 11320 - DNA, 1437 bp, Mycoplasma mycoides; identical to SEQ ID NO: 7424
  CDS (1)..(1437): transl_table=4

SEQ ID NO: 11321 - protein, 478 aa, Mycoplasma mycoides; identical to SEQ ID NO: 7425

SEQ ID NO: 11322 - DNA, 1434 bp, Rhodopseudomonas palustris; identical to SEQ ID NO: 7426
  CDS (1)..(1434)

SEQ ID NO: 11323 - protein, 477 aa, Rhodopseudomonas palustris; identical to SEQ ID NO: 7427

SEQ ID NO: 11324 - DNA, 1422 bp, Corynebacterium diphtheriae; identical to SEQ ID NO: 7428
  CDS (1)..(1422)

SEQ ID NO: 11325 - protein, 473 aa, Corynebacterium diphtheriae; identical to SEQ ID NO: 7429

SEQ ID NO: 11326 - DNA, 3179 bp, Lactobacillus casei; identical to SEQ ID NO: 7430
  CDS (1307)..(3070)

SEQ ID NO: 11327 - protein, 587 aa, Lactobacillus casei; identical to SEQ ID NO: 7431

SEQ ID NO: 11328 - DNA, 1341 bp, Onion yellows phytoplasma; identical to SEQ ID NO: 7432
  CDS (1)..(1341)

SEQ ID NO: 11329 - protein, 446 aa, Onion yellows phytoplasma; identical to SEQ ID NO: 7433

SEQ ID NO: 11330 - DNA, 2023 bp, Oryza sativa; identical to SEQ ID NO: 7434
  CDS (324)..(1688)

SEQ ID NO: 11331 - protein, 454 aa, Oryza sativa; identical to SEQ ID NO: 7435

SEQ ID NO: 11332 - DNA, 1410 bp, Desulfovibrio vulgaris; identical to SEQ ID NO: 7436
  CDS (1)..(1410)

SEQ ID NO: 11333 - protein, 469 aa, Desulfovibrio vulgaris; identical to SEQ ID NO: 7437

SEQ ID NO: 11334 - DNA, 1425 bp, Thermus thermophilus; identical to SEQ ID NO: 7438
  CDS (1)..(1425)

SEQ ID NO: 11335 - protein, 474 aa, Thermus thermophilus; identical to SEQ ID NO: 7439

SEQ ID NO: 11336 - DNA, 1317 bp, Leptospira interrogans; identical to SEQ ID NO: 7440
  CDS (1)..(1317)

SEQ ID NO: 11337 - protein, 438 aa, Leptospira interrogans; identical to SEQ ID NO: 7441

SEQ ID NO: 11338 - DNA, 1758 bp, Bacillus cereus; identical to SEQ ID NO: 7442
  CDS (1)..(1758)

SEQ ID NO: 11339 - protein, 585 aa, Bacillus cereus; identical to SEQ ID NO: 7443

SEQ ID NO: 11340 - DNA, 1059 bp, Bacillus cereus; identical to SEQ ID NO: 7444
  CDS (1)..(1059): Xaa of translated CDS can stand for any naturally occuring amino acid which can be translated from respective CDS-codon

SEQ ID NO: 11341 - protein, 352 aa, Bacillus cereus; identical to SEQ ID NO: 7445
  misc_feature (224)..(224): Xaa can be any naturally occuring amino acid

SEQ ID NO: 11342 - DNA, 1416 bp, Treponema denticola; identical to SEQ ID NO: 7446
  CDS (1)..(1416)

SEQ ID NO: 11343 - protein, 471 aa, Treponema denticola; identical to SEQ ID NO: 7447

SEQ ID NO: 11344 - DNA, 1419 bp, Mycobacterium paratuberculosis; identical to SEQ ID NO: 7448
  CDS (1)..(1419)

SEQ ID NO: 11345 - protein, 472 aa, Mycobacterium paratuberculosis; identical to SEQ ID NO: 7449

SEQ ID NO: 11346 - DNA, 1443 bp, Geobacter sulfurreducens; identical to SEQ ID NO: 7450
  CDS (1)..(1443)

SEQ ID NO: 11347 - protein, 480 aa, Geobacter sulfurreducens; identical to SEQ ID NO: 7451

SEQ ID NO: 11348 - DNA, 1770 bp, Lactobacillus johnsonii; identical to SEQ ID NO: 7452
  CDS (1)..(1770)

SEQ ID NO: 11349 - protein, 589 aa, Lactobacillus johnsonii; identical to SEQ ID NO: 7453

SEQ ID NO: 11350 - DNA, 1506 bp, Ashbya gossypii; identical to SEQ ID NO: 7454
  CDS (1)..(1506)

SEQ ID NO: 11351 - protein, 501 aa, Ashbya gossypii; identical to SEQ ID NO: 7455

SEQ ID NO: 11352 - DNA, 1461 bp, Leptospira interrogans; identical to SEQ ID NO: 7456
  CDS (1)..(1461)

SEQ ID NO: 11353 - protein, 486 aa, Leptospira interrogans; identical to SEQ ID NO: 7457

SEQ ID NO: 11354 - DNA, 1519 bp, Bombyx mori; identical to SEQ ID NO: 7458
  CDS (130)..(1341)

SEQ ID NO: 11355 - protein, 403 aa, Bombyx mori; identical to SEQ ID NO: 7459

SEQ ID NO: 11356 - DNA, 1437 bp, Pyrococcus kodakaraensis; identical to SEQ ID NO: 7460
  CDS (1)..(1437)

SEQ ID NO: 11357 - protein, 478 aa, Pyrococcus kodakaraensis; identical to SEQ ID NO: 7461

SEQ ID NO: 11358 - DNA, 1503 bp, Streptococcus pyogenes; identical to SEQ ID NO: 7462
  CDS (1)..(1503)

SEQ ID NO: 11359 - protein, 500 aa, Streptococcus pyogenes; identical to SEQ ID NO: 7463

SEQ ID NO: 11360 - DNA, 1476 bp, Vibrio vulnificus; identical to SEQ ID NO: 7464
  CDS (1)..(1476)

SEQ ID NO: 11361 - protein, 491 aa, Vibrio vulnificus; identical to SEQ ID NO: 7465

SEQ ID NO: 11362 - DNA, 1449 bp, Vibrio vulnificus; identical to SEQ ID NO: 7466
  CDS (1)..(1449)

SEQ ID NO: 11363 - protein, 482 aa, Vibrio vulnificus; identical to SEQ ID NO: 7467

SEQ ID NO: 11364 - DNA, 1410 bp, Photorhabdus luminescens; identical to SEQ ID NO: 7468
  CDS (1)..(1410)

SEQ ID NO: 11365 - protein, 469 aa, Photorhabdus luminescens; identical to SEQ ID NO: 7469

SEQ ID NO: 11366 - DNA, 1443 bp, Photorhabdus luminescens; identical to SEQ ID NO: 7470
  CDS (1)..(1443)

SEQ ID NO: 11367 - protein, 480 aa, Photorhabdus luminescens; identical to SEQ ID NO: 7471

SEQ ID NO: 11368 - DNA, 1527 bp, Mycoplasma gallisepticum; identical to SEQ ID NO: 7472
  CDS (1)..(1527)

SEQ ID NO: 11369 - protein, 508 aa, Mycoplasma gallisepticum; identical to SEQ ID NO: 7473

SEQ ID NO: 11370 - DNA, 1818 bp, Gloeobacter violaceus; identical to SEQ ID NO: 7474
  CDS (1)..(1818)

SEQ ID NO: 11371 - protein, 605 aa, Gloeobacter violaceus; identical to SEQ ID NO: 7475

SEQ ID NO: 11372 - DNA, 1422 bp, Gloeobacter violaceus; identical to SEQ ID NO: 7476
  CDS (1)..(1422)

SEQ ID NO: 11373 - protein, 473 aa, Gloeobacter violaceus; identical to SEQ ID NO: 7477

SEQ ID NO: 11374 - DNA, 1407 bp, Chromobacterium violaceum; identical to SEQ ID NO: 7478
  CDS (1)..(1407)

SEQ ID NO: 11375 - protein, 468 aa, Chromobacterium violaceum; identical to SEQ ID NO: 7479

SEQ ID NO: 11376 - DNA, 1662 bp, Giardia lamblia ATCC 50803; identical to SEQ ID NO: 7480
  CDS (1)..(1662)

SEQ ID NO: 11377 - protein, 553 aa, Giardia lamblia ATCC 50803; identical to SEQ ID NO: 7481

SEQ ID NO: 11378 - DNA, 1536 bp, Plasmodium yoelii yoelii; identical to SEQ ID NO: 7482
  CDS (1)..(1536)

SEQ ID NO: 11379 - protein, 511 aa, Plasmodium yoelii yoelii; identical to SEQ ID NO: 7483

SEQ ID NO: 11380 - DNA, 1584 bp, Neurospora crassa; identical to SEQ ID NO: 7484
  CDS (1)..(1584)

SEQ ID NO: 11381 - protein, 527 aa, Neurospora crassa; identical to SEQ ID NO: 7485

SEQ ID NO: 11382 - DNA, 1455 bp, Synechococcus sp; identical to SEQ ID NO: 7486
  CDS (1)..(1455)

SEQ ID NO: 11383 - protein, 484 aa, Synechococcus sp; identical to SEQ ID NO: 7487

SEQ ID NO: 11384 - DNA, 1431 bp, Rhodopirellula baltica; identical to SEQ ID NO: 7488
  CDS (1)..(1431)

SEQ ID NO: 11385 - protein, 476 aa, Rhodopirellula baltica; identical to SEQ ID NO: 7489

SEQ ID NO: 11386 - DNA, 1791 bp, Prochlorococcus marinus subsp; identical to SEQ ID NO: 7490
  CDS (1)..(1791)

SEQ ID NO: 11387 - protein, 596 aa, Prochlorococcus marinus subsp; identical to SEQ ID NO: 7491

SEQ ID NO: 11388 - DNA, 1818 bp, Prochlorococcus marinus; identical to SEQ ID NO: 7492
  CDS (1)..(1818)

SEQ ID NO: 11389 - protein, 605 aa, Prochlorococcus marinus; identical to SEQ ID NO: 7493

SEQ ID NO: 11390 - DNA, 1785 bp, Prochlorococcus marinus; identical to SEQ ID NO: 7494
  CDS (1)..(1785)

SEQ ID NO: 11391 - protein, 594 aa, Prochlorococcus marinus; identical to SEQ ID NO: 7495

SEQ ID NO: 11392 - DNA, 1440 bp, Haemophilus ducreyi; identical to SEQ ID NO: 7496
  CDS (1)..(1440)

SEQ ID NO: 11393 - protein, 479 aa, Haemophilus ducreyi; identical to SEQ ID NO: 7497

SEQ ID NO: 11394 - DNA, 1467 bp, Candidatus Blochmannia floridanus; identical to SEQ ID NO: 7498
  CDS (1)..(1467)

SEQ ID NO: 11395 - protein, 488 aa, Candidatus Blochmannia floridanus; identical to SEQ ID NO: 7499

SEQ ID NO: 11396 - DNA, 1443 bp, Bordetella parapertussis; identical to SEQ ID NO: 7500
  CDS (1)..(1443)

SEQ ID NO: 11397 - protein, 480 aa, Bordetella parapertussis; identical to SEQ ID NO: 7501

SEQ ID NO: 11398 - DNA, 2002 bp, Oryza sativa; identical to SEQ ID NO: 7502
  CDS (113)..(1648)

SEQ ID NO: 11399 - protein, 511 aa, Oryza sativa; identical to SEQ ID NO: 7503

SEQ ID NO: 11400 - DNA, 1071 bp, Bacillus cereus; identical to SEQ ID NO: 7504
  CDS (1)..(1071)

SEQ ID NO: 11401 - protein, 356 aa, Bacillus cereus; identical to SEQ ID NO: 7505

SEQ ID NO: 11402 - DNA, 1059 bp, Bacillus anthracis; identical to SEQ ID NO: 7506
  CDS (1)..(1059)

SEQ ID NO: 11403 - protein, 352 aa, Bacillus anthracis; identical to SEQ ID NO: 7507

SEQ ID NO: 11404 - DNA, 1446 bp, Chlamydophila caviae; identical to SEQ ID NO: 7508
  CDS (1)..(1446)

SEQ ID NO: 11405 - protein, 481 aa, Chlamydophila caviae; identical to SEQ ID NO: 7509

SEQ ID NO: 11406 - DNA, 1437 bp, Streptomyces avermitilis; identical to SEQ ID NO: 7510
  CDS (1)..(1437)

SEQ ID NO: 11407 - protein, 478 aa, Streptomyces avermitilis; identical to SEQ ID NO: 7511

SEQ ID NO: 11408 - DNA, 1431 bp, Streptomyces avermitilis; identical to SEQ ID NO: 7512
  CDS (1)..(1431)

SEQ ID NO: 11409 - protein, 476 aa, Streptomyces avermitilis; identical to SEQ ID NO: 7513

SEQ ID NO: 11410 - DNA, 1491 bp, Nitrosomonas europaea; identical to SEQ ID NO: 7514
  CDS (1)..(1491)

SEQ ID NO: 11411 - protein, 496 aa, Nitrosomonas europaea; identical to SEQ ID NO: 7515

SEQ ID NO: 11412 - DNA, 1758 bp, Enterococcus faecalis; identical to SEQ ID NO: 7516
  CDS (1)..(1758)

SEQ ID NO: 11413 - protein, 585 aa, Enterococcus faecalis; identical to SEQ ID NO: 7517

SEQ ID NO: 11414 - DNA, 1434 bp, Coxiella burnetii; identical to SEQ ID NO: 7518
  CDS (1)..(1434)

SEQ ID NO: 11415 - protein, 477 aa, Coxiella burnetii; identical to SEQ ID NO: 7519

SEQ ID NO: 11416 - DNA, 1422 bp, Tropheryma whipplei; identical to SEQ ID NO: 7520
  CDS (1)..(1422)

SEQ ID NO: 11417 - protein, 473 aa, Tropheryma whipplei; identical to SEQ ID NO: 7521

SEQ ID NO: 11418 - DNA, 1416 bp, Tropheryma whipplei; identical to SEQ ID NO: 7522
  CDS (1)..(1416)

SEQ ID NO: 11419 - protein, 471 aa, Tropheryma whipplei; identical to SEQ ID NO: 7523

SEQ ID NO: 11420 - DNA, 1584 bp, Shigella flexneri; identical to SEQ ID NO: 7524
  CDS (1)..(1584)

SEQ ID NO: 11421 - protein, 527 aa, Shigella flexneri; identical to SEQ ID NO: 7525

SEQ ID NO: 11422 - DNA, 1425 bp, Microbispora rosea subsp; identical to SEQ ID NO: 7526
  CDS (1)..(1425)

SEQ ID NO: 11423 - protein, 474 aa, Microbispora rosea subsp; identical to SEQ ID NO: 7527

SEQ ID NO: 11424 - DNA, 1806 bp, Oryza sativa; identical to SEQ ID NO: 7528
  CDS (75)..(1721)

SEQ ID NO: 11425 - protein, 548 aa, Oryza sativa; identical to SEQ ID NO: 7529

SEQ ID NO: 11426 - DNA, 1506 bp, Kluyveromyces lactis; identical to SEQ ID NO: 7530
  CDS (1)..(1506)

SEQ ID NO: 11427 - protein, 501 aa, Kluyveromyces lactis; identical to SEQ ID NO: 7531

SEQ ID NO: 11428 - DNA, 1506 bp, Saccharomyces kluyveri; identical to SEQ ID NO: 7532
  CDS (1)..(1506)

SEQ ID NO: 11429 - protein, 501 aa, Saccharomyces kluyveri; identical to SEQ ID NO: 7533

SEQ ID NO: 11430 - DNA, 1506 bp, Saccharomyces castellii; identical to SEQ ID NO: 7534
  CDS (1)..(1506)

SEQ ID NO: 11431 - protein, 501 aa, Saccharomyces castellii; identical to SEQ ID NO: 7535

SEQ ID NO: 11432 - DNA, 1521 bp, Saccharomyces bayanus; identical to SEQ ID NO: 7536
  CDS (1)..(1521)

SEQ ID NO: 11433 - protein, 506 aa, Saccharomyces bayanus; identical to SEQ ID NO: 7537

SEQ ID NO: 11434 - DNA, 1467 bp, Xylella fastidiosa; identical to SEQ ID NO: 7538
  CDS (1)..(1467)

SEQ ID NO: 11435 - protein, 488 aa, Xylella fastidiosa; identical to SEQ ID NO: 7539

SEQ ID NO: 11436 - DNA, 1479 bp, Vibrio parahaemolyticus; identical to SEQ ID NO: 7540
  CDS (1)..(1479)

SEQ ID NO: 11437 - protein, 492 aa, Vibrio parahaemolyticus; identical to SEQ ID NO: 7541

SEQ ID NO: 11438 - DNA, 1443 bp, Vibrio parahaemolyticus; identical to SEQ ID NO: 7542
  CDS (1)..(1443)

SEQ ID NO: 11439 - protein, 480 aa, Vibrio parahaemolyticus; identical to SEQ ID NO: 7543

SEQ ID NO: 11440 - DNA, 1413 bp, Vibrio parahaemolyticus; identical to SEQ ID NO: 7544
  CDS (1)..(1413)

SEQ ID NO: 11441 - protein, 470 aa, Vibrio parahaemolyticus; identical to SEQ ID NO: 7545

SEQ ID NO: 11442 - DNA, 1452 bp, Pseudomonas syringae; identical to SEQ ID NO: 7546
  CDS (1)..(1452)

SEQ ID NO: 11443 - protein, 483 aa, Pseudomonas syringae; identical to SEQ ID NO: 7547

SEQ ID NO: 11444 - DNA, 1416 bp, Pseudomonas putida; identical to SEQ ID NO: 7548
  CDS (1)..(1416)

SEQ ID NO: 11445 - protein, 471 aa, Pseudomonas putida; identical to SEQ ID NO: 7549

SEQ ID NO: 11446 - DNA, 1455 bp, Pseudomonas putida; identical to SEQ ID NO: 7550
  CDS (1)..(1455)

SEQ ID NO: 11447 - protein, 484 aa, Pseudomonas putida; identical to SEQ ID NO: 7551

SEQ ID NO: 11448 - DNA, 1761 bp, Lactobacillus plantarum; identical to SEQ ID NO: 7552
  CDS (1)..(1761)

SEQ ID NO: 11449 - protein, 586 aa, Lactobacillus plantarum; identical to SEQ ID NO: 7553

SEQ ID NO: 11450 - DNA, 1755 bp, Clostridium tetani; identical to SEQ ID NO: 7554
  CDS (1)..(1755)

SEQ ID NO: 11451 - protein, 584 aa, Clostridium tetani; identical to SEQ ID NO: 7555

SEQ ID NO: 11452 - DNA, 1437 bp, Bradyrhizobium japonicum; identical to SEQ ID NO: 7556
  CDS (1)..(1437)

SEQ ID NO: 11453 - protein, 478 aa, Bradyrhizobium japonicum; identical to SEQ ID NO: 7557

SEQ ID NO: 11454 - DNA, 1458 bp, Bacteroides thetaiotaomicron; identical to SEQ ID NO: 7558
  CDS (1)..(1458)

SEQ ID NO: 11455 - protein, 485 aa, Bacteroides thetaiotaomicron; identical to SEQ ID NO: 7559

SEQ ID NO: 11456 - DNA, 2797 bp, Staphylococcus epidermidis; identical to SEQ ID NO: 7560
  CDS (854)..(2611)

SEQ ID NO: 11457 - protein, 585 aa, Staphylococcus epidermidis; identical to SEQ ID NO: 7561

SEQ ID NO: 11458 - DNA, 1440 bp, Wigglesworthia glossinidia brevipalpis; identical to SEQ ID NO: 7562
  CDS (1)..(1440)

SEQ ID NO: 11459 - protein, 479 aa, Wigglesworthia glossinidia brevipalpis; identical to SEQ ID NO: 7563

SEQ ID NO: 11460 - DNA, 1413 bp, Vibrio vulnificus; identical to SEQ ID NO: 7564
  CDS (1)..(1413)

SEQ ID NO: 11461 - protein, 470 aa, Vibrio vulnificus; identical to SEQ ID NO: 7565

SEQ ID NO: 11462 - DNA, 1785 bp, Synechococcus elongatus; identical to SEQ ID NO: 7566
  CDS (1)..(1785)

SEQ ID NO: 11463 - protein, 594 aa, Synechococcus elongatus; identical to SEQ ID NO: 7567

SEQ ID NO: 11464 - DNA, 1503 bp, Streptococcus mutans; identical to SEQ ID NO: 7568
  CDS (1)..(1503)

SEQ ID NO: 11465 - protein, 500 aa, Streptococcus mutans; identical to SEQ ID NO: 7569

SEQ ID NO: 11466 - DNA, 1503 bp, Streptococcus agalactiae; identical to SEQ ID NO: 7570
  CDS (1)..(1503)

SEQ ID NO: 11467 - protein, 500 aa, Streptococcus agalactiae; identical to SEQ ID NO: 7571

SEQ ID NO: 11468 - DNA, 1440 bp, Shewanella oneidensis; identical to SEQ ID NO: 7572
  CDS (1)..(1440)

SEQ ID NO: 11469 - protein, 479 aa, Shewanella oneidensis; identical to SEQ ID NO: 7573

SEQ ID NO: 11470 - DNA, 1761 bp, Oceanobacillus iheyensis; identical to SEQ ID NO: 7574
  CDS (1)..(1761)

SEQ ID NO: 11471 - protein, 586 aa, Oceanobacillus iheyensis; identical to SEQ ID NO: 7575

SEQ ID NO: 11472 - DNA, 1497 bp, Mycoplasma penetrans; identical to SEQ ID NO: 7576
  CDS (1)..(1497): transl_table=4

SEQ ID NO: 11473 - protein, 498 aa, Mycoplasma penetrans; identical to SEQ ID NO: 7577

SEQ ID NO: 11474 - DNA, 1584 bp, Escherichia coli O6; identical to SEQ ID NO: 7578
  CDS (1)..(1584)

SEQ ID NO: 11475 - protein, 527 aa, Escherichia coli O6; identical to SEQ ID NO: 7579

SEQ ID NO: 11476 - DNA, 1437 bp, Brucella suis; identical to SEQ ID NO: 7580
  CDS (1)..(1437)

SEQ ID NO: 11477 - protein, 478 aa, Brucella suis; identical to SEQ ID NO: 7581

SEQ ID NO: 11478 - DNA, 1530 bp, Bifidobacterium longum; identical to SEQ ID NO: 7582
  CDS (1)..(1530)

SEQ ID NO: 11479 - protein, 509 aa, Bifidobacterium longum; identical to SEQ ID NO: 7583

SEQ ID NO: 11480 - DNA, 1890 bp, Lactobacillus delbrueckii; identical to SEQ ID NO: 7584
  CDS (1)..(1770)

SEQ ID NO: 11481 - protein, 589 aa, Lactobacillus delbrueckii; identical to SEQ ID NO: 7585

SEQ ID NO: 11482 - DNA, 2043 bp, Stigmatella aurantiaca; identical to SEQ ID NO: 7586
  CDS (463)..(1896)

SEQ ID NO: 11483 - protein, 477 aa, Stigmatella aurantiaca; identical to SEQ ID NO: 7587

SEQ ID NO: 11484 - DNA, 1584 bp, Arabidopsis thaliana; identical to SEQ ID NO: 7588
  CDS (1)..(1584)

SEQ ID NO: 11485 - protein, 527 aa, Arabidopsis thaliana; identical to SEQ ID NO: 7589

SEQ ID NO: 11486 - DNA, 1437 bp, Bartonella henselae; identical to SEQ ID NO: 7590
  CDS (1)..(1437)

SEQ ID NO: 11487 - protein, 478 aa, Bartonella henselae; identical to SEQ ID NO: 7591

SEQ ID NO: 11488 - DNA, 1533 bp, Glycine max; identical to SEQ ID NO: 7592
  CDS (1)..(1533)

SEQ ID NO: 11489 - protein, 510 aa, Glycine max; identical to SEQ ID NO: 7593

SEQ ID NO: 11490 - DNA, 1536 bp, Glycine max; identical to SEQ ID NO: 7594
  CDS (1)..(1536)

SEQ ID NO: 11491 - protein, 511 aa, Glycine max; identical to SEQ ID NO: 7595

SEQ ID NO: 11492 - DNA, 1527 bp, Xanthomonas campestris; identical to SEQ ID NO: 7596
  CDS (1)..(1527)

SEQ ID NO: 11493 - protein, 508 aa, Xanthomonas campestris; identical to SEQ ID NO: 7597

SEQ ID NO: 11494 - DNA, 1506 bp, Xanthomonas axonopodis; identical to SEQ ID NO: 7598
  CDS (1)..(1506)

SEQ ID NO: 11495 - protein, 501 aa, Xanthomonas axonopodis; identical to SEQ ID NO: 7599

SEQ ID NO: 11496 - DNA, 1434 bp, Methanosarcina mazei; identical to SEQ ID NO: 7600
  CDS (1)..(1434)

SEQ ID NO: 11497 - protein, 477 aa, Methanosarcina mazei; identical to SEQ ID NO: 7601

SEQ ID NO: 11498 - DNA, 1752 bp, Thermoanaerobacter tengcongensis; identical to SEQ ID NO: 7602
  CDS (1)..(1752)

SEQ ID NO: 11499 - protein, 583 aa, Thermoanaerobacter tengcongensis; identical to SEQ ID NO: 7603

SEQ ID NO: 11500 - DNA, 1428 bp, Fusobacterium nucleatum; identical to SEQ ID NO: 7604
  CDS (1)..(1428)

SEQ ID NO: 11501 - protein, 475 aa, Fusobacterium nucleatum; identical to SEQ ID NO: 7605

SEQ ID NO: 11502 - DNA, 1713 bp, Oryza sativa; identical to SEQ ID NO: 7606
  CDS (1)..(1713)

SEQ ID NO: 11503 - protein, 570 aa, Oryza sativa; identical to SEQ ID NO: 7607

SEQ ID NO: 11504 - DNA, 1872 bp, Oryza sativa; identical to SEQ ID NO: 7608
  CDS (1)..(1872)

SEQ ID NO: 11505 - protein, 623 aa, Oryza sativa; identical to SEQ ID NO: 7609

SEQ ID NO: 11506 - DNA, 1560 bp, Encephalitozoon cuniculi; identical to SEQ ID NO: 7610
  CDS (1)..(1560)

SEQ ID NO: 11507 - protein, 519 aa, Encephalitozoon cuniculi; identical to SEQ ID NO: 7611

SEQ ID NO: 11508 - DNA, 1470 bp, Methanosarcina acetivorans; identical to SEQ ID NO: 7612
  CDS (1)..(1470)

SEQ ID NO: 11509 - protein, 489 aa, Methanosarcina acetivorans; identical to SEQ ID NO: 7613

SEQ ID NO: 11510 - DNA, 1434 bp, Pyrococcus furiosus; identical to SEQ ID NO: 7614
  CDS (1)..(1434)

SEQ ID NO: 11511 - protein, 477 aa, Pyrococcus furiosus; identical to SEQ ID NO: 7615

SEQ ID NO: 11512 - DNA, 1404 bp, Clostridium perfringens; identical to SEQ ID NO: 7616
  CDS (1)..(1404)

SEQ ID NO: 11513 - protein, 467 aa, Clostridium perfringens; identical to SEQ ID NO: 7617

SEQ ID NO: 11514 - DNA, 1419 bp, Ralstonia solanacearum; identical to SEQ ID NO: 7618
  CDS (1)..(1419)

SEQ ID NO: 11515 - protein, 472 aa, Ralstonia solanacearum; identical to SEQ ID NO: 7619

SEQ ID NO: 11516 - DNA, 1440 bp, Ralstonia solanacearum; identical to SEQ ID NO: 7620
  CDS (1)..(1440)

SEQ ID NO: 11517 - protein, 479 aa, Ralstonia solanacearum; identical to SEQ ID NO: 7621

SEQ ID NO: 11518 - DNA, 1443 bp, Salmonella typhimurium; identical to SEQ ID NO: 7622
  CDS (1)..(1443)

SEQ ID NO: 11519 - protein, 480 aa, Salmonella typhimurium; identical to SEQ ID NO: 7623

SEQ ID NO: 11520 - DNA, 1386 bp, Pyrobaculum aerophilum; identical to SEQ ID NO: 7624
  CDS (1)..(1386)

SEQ ID NO: 11521 - protein, 461 aa, Pyrobaculum aerophilum; identical to SEQ ID NO: 7625

SEQ ID NO: 11522 - DNA, 1440 bp, Rhizobium meliloti; identical to SEQ ID NO: 7626
  CDS (1)..(1440)

SEQ ID NO: 11523 - protein, 479 aa, Rhizobium meliloti; identical to SEQ ID NO: 7627

SEQ ID NO: 11524 - DNA, 1745 bp, Mastigamoeba balamuthi; identical to SEQ ID NO: 7628
  CDS (36)..(1541)

SEQ ID NO: 11525 - protein, 501 aa, Mastigamoeba balamuthi; identical to SEQ ID NO: 7629

SEQ ID NO: 11526 - DNA, 2207 bp, Toxoplasma gondii; identical to SEQ ID NO: 7630
  CDS (225)..(1820)

SEQ ID NO: 11527 - protein, 531 aa, Toxoplasma gondii; identical to SEQ ID NO: 7631

SEQ ID NO: 11528 - DNA, 1317 bp, Sulfolobus tokodaii; identical to SEQ ID NO: 7632
  CDS (1)..(1317)

SEQ ID NO: 11529 - protein, 438 aa, Sulfolobus tokodaii; identical to SEQ ID NO: 7633

SEQ ID NO: 11530 - DNA, 1626 bp, Thermoplasma volcanium; identical to SEQ ID NO: 7634
  CDS (1)..(1626)

SEQ ID NO: 11531 - protein, 541 aa, Thermoplasma volcanium; identical to SEQ ID NO: 7635

SEQ ID NO: 11532 - DNA, 1437 bp, Rhizobium loti; identical to SEQ ID NO: 7636
  CDS (1)..(1437)

SEQ ID NO: 11533 - protein, 478 aa, Rhizobium loti; identical to SEQ ID NO: 7637

SEQ ID NO: 11534 - DNA, 1440 bp, Pasteurella multocida; identical to SEQ ID NO: 7638
  CDS (1)..(1440)

SEQ ID NO: 11535 - protein, 479 aa, Pasteurella multocida; identical to SEQ ID NO: 7639

SEQ ID NO: 11536 - DNA, 1880 bp, Arabidopsis thaliana; identical to SEQ ID NO: 7640
  CDS (126)..(1658)

SEQ ID NO: 11537 - protein, 510 aa, Arabidopsis thaliana; identical to SEQ ID NO: 7641

SEQ ID NO: 11538 - DNA, 1517 bp, Arabidopsis thaliana; identical to SEQ ID NO: 7642
  CDS (1)..(1497)

SEQ ID NO: 11539 - protein, 498 aa, Arabidopsis thaliana; identical to SEQ ID NO: 7643

SEQ ID NO: 11540 - DNA, 1564 bp, Arabidopsis thaliana; identical to SEQ ID NO: 7644
  CDS (1)..(1533)

SEQ ID NO: 11541 - protein, 510 aa, Arabidopsis thaliana; identical to SEQ ID NO: 7645

SEQ ID NO: 11542 - DNA, 1581 bp, Aspergillus oryzae; identical to SEQ ID NO: 7646
  CDS (1)..(1581)

SEQ ID NO: 11543 - protein, 526 aa, Aspergillus oryzae; identical to SEQ ID NO: 7647

SEQ ID NO: 11544 - DNA, 1431 bp, Streptomyces coelicolor; identical to SEQ ID NO: 7648
  CDS (1)..(1431)

SEQ ID NO: 11545 - protein, 476 aa, Streptomyces coelicolor; identical to SEQ ID NO: 7649

SEQ ID NO: 11546 - DNA, 1503 bp, Streptococcus thermophilus; identical to SEQ ID NO: 7650
  CDS (1)..(1503)

SEQ ID NO: 11547 - protein, 500 aa, Streptococcus thermophilus; identical to SEQ ID NO: 7651

SEQ ID NO: 11548 - DNA, 2150 bp, Pseudomonas hydrogenothermophila; identical to SEQ ID NO: 7652
  CDS (16)..(1437)

SEQ ID NO: 11549 - protein, 473 aa, Pseudomonas hydrogenothermophila; identical to SEQ ID NO: 7653

SEQ ID NO: 11550 - DNA, 1413 bp, Selenomonas ruminantium; identical to SEQ ID NO: 7654
  CDS (1)..(1413)

SEQ ID NO: 11551 - protein, 470 aa, Selenomonas ruminantium; identical to SEQ ID NO: 7655

SEQ ID NO: 11552 - DNA, 1822 bp, Arabidopsis thaliana; identical to SEQ ID NO: 7656
  CDS (1)..(1791)

SEQ ID NO: 11553 - protein, 596 aa, Arabidopsis thaliana; identical to SEQ ID NO: 7657

SEQ ID NO: 11554 - DNA, 1494 bp, Arabidopsis thaliana; identical to SEQ ID NO: 7658
  CDS (1)..(1494)

SEQ ID NO: 11555 - protein, 497 aa, Arabidopsis thaliana; identical to SEQ ID NO: 7659

SEQ ID NO: 11556 - DNA, 1920 bp, Lilium longiflorum; identical to SEQ ID NO: 7660
  CDS (145)..(1677)

SEQ ID NO: 11557 - protein, 510 aa, Lilium longiflorum; identical to SEQ ID NO: 7661

SEQ ID NO: 11558 - DNA, 1413 bp, Vibrio marinus; identical to SEQ ID NO: 7662
  CDS (1)..(1413)

SEQ ID NO: 11559 - protein, 470 aa, Vibrio marinus; identical to SEQ ID NO: 7663

SEQ ID NO: 11560 - DNA, 1979 bp, Oryza sativa; identical to SEQ ID NO: 7664
  CDS (224)..(1747)

SEQ ID NO: 11561 - protein, 507 aa, Oryza sativa; identical to SEQ ID NO: 7665

SEQ ID NO: 11562 - DNA, 1533 bp, Arabidopsis thaliana; identical to SEQ ID NO: 7666
  CDS (1)..(1533)

SEQ ID NO: 11563 - protein, 510 aa, Arabidopsis thaliana; identical to SEQ ID NO: 7667

SEQ ID NO: 11564 - DNA, 2235 bp, Drosophila melanogaster; identical to SEQ ID NO: 7668
  CDS (1)..(2235)

SEQ ID NO: 11565 - protein, 744 aa, Drosophila melanogaster; identical to SEQ ID NO: 7669

SEQ ID NO: 11566 - DNA, 3033 bp, Drosophila melanogaster; identical to SEQ ID NO: 7670
  CDS (1)..(3033)

SEQ ID NO: 11567 - protein, 1010 aa, Drosophila melanogaster; identical to SEQ ID NO: 7671

SEQ ID NO: 11568 - DNA, 1814 bp, Drosophila melanogaster; identical to SEQ ID NO: 7672
  CDS (83)..(1747)

SEQ ID NO: 11569 - protein, 554 aa, Drosophila melanogaster; identical to SEQ ID NO: 7673

SEQ ID NO: 11570 - DNA, 1425 bp, Agrobacterium vitis; identical to SEQ ID NO: 7674
  CDS (1)..(1425)

SEQ ID NO: 11571 - protein, 474 aa, Agrobacterium vitis; identical to SEQ ID NO: 7675

SEQ ID NO: 11572 - DNA, 1449 bp, Agrobacterium vitis; identical to SEQ ID NO: 7676
  CDS (1)..(1449)

SEQ ID NO: 11573 - protein, 482 aa, Agrobacterium vitis; identical to SEQ ID NO: 7677

SEQ ID NO: 11574 - DNA, 2234 bp, Nicotiana tabacum; identical to SEQ ID NO: 7678
  CDS (59)..(1840)

SEQ ID NO: 11575 - protein, 593 aa, Nicotiana tabacum; identical to SEQ ID NO: 7679

SEQ ID NO: 11576 - DNA, 1599 bp, Agaricus bisporus; identical to SEQ ID NO: 7680
  CDS (1)..(1599)

SEQ ID NO: 11577 - protein, 532 aa, Agaricus bisporus; identical to SEQ ID NO: 7681

SEQ ID NO: 11578 - DNA, 1446 bp, Buchnera aphidicola; identical to SEQ ID NO: 7682
  CDS (1)..(1446)

SEQ ID NO: 11579 - protein, 481 aa, Buchnera aphidicola; identical to SEQ ID NO: 7683

SEQ ID NO: 11580 - DNA, 1440 bp, Buchnera aphidicola; identical to SEQ ID NO: 7684
  CDS (1)..(1440)

SEQ ID NO: 11581 - protein, 479 aa, Buchnera aphidicola; identical to SEQ ID NO: 7685

SEQ ID NO: 11582 - DNA, 2354 bp, Gallus gallus; identical to SEQ ID NO: 7686
  CDS (81)..(1673)

SEQ ID NO: 11583 - protein, 530 aa, Gallus gallus; identical to SEQ ID NO: 7687

SEQ ID NO: 11584 - DNA, 1425 bp, Clostridium perfringens; identical to SEQ ID NO: 7688
  CDS (1)..(1425)

SEQ ID NO: 11585 - protein, 474 aa, Clostridium perfringens; identical to SEQ ID NO: 7689

SEQ ID NO: 11586 - DNA, 1425 bp, Corynebacterium efficiens; identical to SEQ ID NO: 7690
  CDS (1)..(1425)

SEQ ID NO: 11587 - protein, 474 aa, Corynebacterium efficiens; identical to SEQ ID NO: 7691

SEQ ID NO: 11588 - DNA, 2084 bp, Drosophila melanogaster; identical to SEQ ID NO: 7692
  CDS (229)..(1830)

SEQ ID NO: 11589 - protein, 533 aa, Drosophila melanogaster; identical to SEQ ID NO: 7693

SEQ ID NO: 11590 - DNA, 1901 bp, Eimeria tenella; identical to SEQ ID NO: 7694
  CDS (57)..(1652)

SEQ ID NO: 11591 - protein, 531 aa, Eimeria tenella; identical to SEQ ID NO: 7695

SEQ ID NO: 11592 - DNA, 3479 bp, Lactobacillus delbrueckii; identical to SEQ ID NO: 7696
  CDS (1277)..(3046)

SEQ ID NO: 11593 - protein, 589 aa, Lactobacillus delbrueckii; identical to SEQ ID NO: 7697

SEQ ID NO: 11594 - DNA, 1941 bp, Leishmania mexicana; identical to SEQ ID NO: 7698
  CDS (112)..(1611)

SEQ ID NO: 11595 - protein, 499 aa, Leishmania mexicana; identical to SEQ ID NO: 7699

SEQ ID NO: 11596 - DNA, 1452 bp, Methylobacterium extorquens; identical to SEQ ID NO: 7700
  CDS (1)..(1452)

SEQ ID NO: 11597 - protein, 483 aa, Methylobacterium extorquens; identical to SEQ ID NO: 7701

SEQ ID NO: 11598 - DNA, 1439 bp, Mycobacterium intracellulare; identical to SEQ ID NO: 7702
  CDS (1)..(1419)

SEQ ID NO: 11599 - protein, 472 aa, Mycobacterium intracellulare; identical to SEQ ID NO: 7703

SEQ ID NO: 11600 - DNA, 1635 bp, Thermoplasma acidophilum; identical to SEQ ID NO: 7704
  CDS (1)..(1635)

SEQ ID NO: 11601 - protein, 544 aa, Thermoplasma acidophilum; identical to SEQ ID NO: 7705

SEQ ID NO: 11602 - DNA, 1497 bp, Trypanoplasma borreli; identical to SEQ ID NO: 7706
  CDS (1)..(1497)

SEQ ID NO: 11603 - protein, 498 aa, Trypanoplasma borreli; identical to SEQ ID NO: 7707

SEQ ID NO: 11604 - DNA, 1629 bp, Yarrowia lipolytica; identical to SEQ ID NO: 7708
  CDS (1)..(1629)

SEQ ID NO: 11605 - protein, 542 aa, Yarrowia lipolytica; identical to SEQ ID NO: 7709

SEQ ID NO: 11606 - DNA, 1596 bp, Oryctolagus cuniculus; identical to SEQ ID NO: 7710
  CDS (1)..(1596)

SEQ ID NO: 11607 - protein, 531 aa, Oryctolagus cuniculus; identical to SEQ ID NO: 7711

SEQ ID NO: 11608 - DNA, 1799 bp, Xenopus laevis; identical to SEQ ID NO: 7712
  CDS (11)..(1606)

SEQ ID NO: 11609 - protein, 531 aa, Xenopus laevis; identical to SEQ ID NO: 7713

SEQ ID NO: 11610 - DNA, 2404 bp, Brachydanio rerio; identical to SEQ ID NO: 7714
  CDS (37)..(1635)

SEQ ID NO: 11611 - protein, 532 aa, Brachydanio rerio; identical to SEQ ID NO: 7715

SEQ ID NO: 11612 - DNA, 26 bp, Artificial sequence
  Primer sequence
atgtctagattagaaagattgacctc

SEQ ID NO: 11613 - DNA, 25 bp, Artificial sequence
  Primer sequence
ttaaacggtagagacttgcaaagtg

SEQ ID NO: 11614 - DNA, 2343 bp, Saccharomyces cerevisiae
  CDS (1)..(2343)
atggtagattttttaccaaaagtaacggaaataaatcctccatccgaaggtaatgatggtgaagataacataaagccactttcaagtggttcagagcagcggccgttgaaagaagaggggcaacaaggtggtagaagacatcaccggcggttgtcctctatgcatgagtattttgacccgttttccaacgcagaggtctattatggaccaataacagatccaagaaaacagtcaaaaattcatagactaaatagaaccagaactatgagtgttttcaataaagtttctgacttcaaaaacggaatgaaggattataccctgaaaaggaggggttctgaagacgacagcttcctcagcagccaaggtaaccgtagattttatattgataatgtggatctcgctttagatgagctgctcgctagtgaggacacagacaagaatcaccaaattaccatagaagacactgggcccaaagttattaaagtcgggacggccaattccaacggtttcaaacatgtaaatgttaggggaacatatatgctttctaacttgttgcaggaactaaccattgcaaaaagtttcggacgacaccaaatatttttggatgaggcgcgtataaatgaaaaccctgttgatagattatcaagattgataacgactcaattttggacgagtttaacgagaagagttgatctttataatattgcagaaattgctagagactcaaaaatagatacgccaggcgctaaaaatccaagaatttatgttccatataactgcccagagcagtacgaattttacattcaggcatctcaaatgaacccgtccttaaaacttgaagtggagtacttaccaaaagatattacagcagagtatgttaaatcattaaatgatacaccgggtttgttagccctggctatggaagaacacgttaatccatctactggtgaaaggtccctagttggttatccttatgcggtacctggcggtagattcaatgaattgtatggctgggattcatatttaatggcactgggactcatagaaagtaataaggttgatgttgcaagaggtatggtggagcattttatattcgaaattgatcactatagtaaaattttgaatgctaataggagttattatctttgcagatctcagccaccattcctaaccgatatggctctgctcgtatttgaaaagataggaggtaagaataatccaaacgctattcagttgttaaaacgcgcgttcagagctgctattaaagaatataaagaggtgtggatgtcgagccctaggttagattctctgacagggctgtcttgttatcattctgatggtattggtatccctccggaaactgaaccagatcattttgatactatattattaccgtatgctgaaaagtacaatgttactctggaaaagcttaggtacctttataacgaaggcatgattaaagaacccaaactggatgcattttttttacatgatcgtgccgtgagagagtcaggacatgacacgacttataggtttgaaggtgtatgtgcatatttagcgacaattgatctaaactccttgctctataaatatgagaaagatattgctttcgtcattaaggagtattttggtaatgaatataaagatgagaatgatggaacggtaaccgattctgaacactgggaggagctagctgaactgaggaaaacaaggattaataagtatatgtgggacgaagattcagggtttttcttctattataacacgaaactgaaatgcagaacgtcttatgagtctgcaacgactttttggagtttgtgggctggtcttgcaactgaagagcaagcaaaaatcacagtagaaaaagctcttcctcagttagaaatgctcggcggactagttgcatgcacagaaaaatcaagaggtcctatttctattgatagaccgatcaggcaatgggattatccttttggttgggcgccgcaccaaatattagcctggaaaggtttatctgcatatggttatcaacaagtagctacaagattggcttataggtggctgtacatgattacaaaatcatttgttgattataacggaatggtggtagaaaaatatgatgtgacaagagggactgatccgcatcgcgttgatgcggaatatggtaatcaaggtgctgattttaagggcgtcgctacagaaggctttggttgggtgaacacaagttatttgctcggattgaaatatatgaataatcatgcaagaagggctctcgctgcttgtagtccaccattgccatttttcaatagtttgaaaccctctgagaaaaaattgtattacctataa

SEQ ID NO: 11615 - protein, 780 aa, Saccharomyces cerevisiae
MVDFLPKVTEINPPSEGNDGEDNIKPLSSGSEQRPLKEEGQQGGRRHHRRLSSMHEYFDPFSNAEVYYGPITDPRKQSKIHRLNRTRTMSVFNKVSDFKNGMKDYTLKRRGSEDDSFLSSQGNRRFYIDNVDLALDELLASEDTDKNHQITIEDTGPKVIKVGTANSNGFKHVNVRGTYMLSNLLQELTIAKSFGRHQIFLDEARINENPVDRLSRLITTQFWTSLTRRVDLYNIAEIARDSKIDTPGAKNPRIYVPYNCPEQYEFYIQASQMNPSLKLEVEYLPKDITAEYVKSLNDTPGLLALAMEEHVNPSTGERSLVGYPYAVPGGRFNELYGWDSYLMALGLIESNKVDVARGMVEHFIFEIDHYSKILNANRSYYLCRSQPPFLTDMALLVFEKIGGKNNPNAIQLLKRAFRAAIKEYKEVWMSSPRLDSLTGLSCYHSDGIGIPPETEPDHFDTILLPYAEKYNVTLEKLRYLYNEGMIKEPKLDAFFLHDRAVRESGHDTTYRFEGVCAYLATIDLNSLLYKYEKDIAFVIKEYFGNEYKDENDGTVTDSEHWEELAELRKTRINKYMWDEDSGFFFYYNTKLKCRTSYESATTFWSLWAGLATEEQAKITVEKALPQLEMLGGLVACTEKSRGPISIDRPIRQWDYPFGWAPHQILAWKGLSAYGYQQVATRLAYRWLYMITKSFVDYNGMVVEKYDVTRGTDPHRVDAEYGNQGADFKGVATEGFGWVNTSYLLGLKYMNNHARRALAACSPPLPFFNSLKPSEKKLYYL

SEQ ID NO: 11616 - DNA, 1788 bp, Oryctolagus cuniculus (domestic rabbit)
  CDS (4)..(1740)
gccatgcccgggagcacctgggagctgcacctgctgcttctgctggggctggggctggggtccgagcaggccctccccccaccctgtgagagccagatttactgccatggggagctcctgcaccaggtccagatggcccggctctacccggacgataagcagtttgtggacatgccgctgtccacggctccagaccaggttctgcagagcttcgccgagctggccgcgacctacaacaacaccgtccccagggagcagctcgagaagtttgtccaggagcacttccaggcggtggggcaggagctggaatcatggacccccggggactggaaagagagcccccagttcctgcagaagatctcggaccccaagctgcgagcctgggcagagcagctgcacctgctctggaagaagctgggaaagaagataaagccagaggtgctgagccagcctgagcggttctctctgatctactctcaacatcccttcattgtgcctggcgggcgctttgtggagttctactactgggactcctactgggtcatggagggcctgctcctgtctgagatggccgagacggtgaagggcatgctgcaaaacttcctggacctggtgacggcctatgggcacatccccaatggtgggcgagtgtactacttgcagcgcagccagcccccgctcctgacgctcatgatggaccgatacgtggcgcacaccggtgaccttgccttcctacgggagaacattgagaccttggccttggaactggacttctgggctgagaacaggaccatctctgtgagctcggggggaaacagccacaccctgaaccgctatcacgtcccttacggggggcccaggcccgagtcctacagcaaagacacagagctggcacacaccttgccggaagggagctgggaaaccttgtgggcggagctcaaggccggcgccgagtccggctgggacttctcttcgcgctggctggttggcagcccaaacccggactcactcggcagcatccgaacgagcaagctggtgcccgtcgacctgaatgccttcctgtgccaggccgaagagctgctcagtggcttctacagcaggctcgggaatgaatcccaggctacgaagtacagaaatctgcgggcacagcgcatagcggccctgacggccctcctgtgggacgaggacaagggcgcttggttcgactacgaccttgagaaccagaagaagaaccacgagttttacccgtccaacctcactccactctgggccggctgcttctctgaccctgccatcgcagacaaggctctgcagtacctgcaggacagccagatcctgaaccaccgccatggaatcccaacctctctccagaacacaggccagcagtgggactttcccaatgcctgggccccccttcaggatctggtcatcagaggcctggccaagtcgccttcagctcggacacaggaagtggctttccagctggctcagaactggatccggaccaactttgatgtctactcccaaagatcagccatgtatgagaagtatgacatcagcaatgcacagccgggtggcggaggggagtatgaagtgcaggaggggtttggctggaccaacggagtcgccctgatgctcctggaccgctatggtgaccggctgagctcggggacccagctggcgctcctggagccccactgcctggccgctgccctcctgctcagcttcctaacacggtgaccacagggcggcctccctgcacctctgttcattaaacctctcaccggc

SEQ ID NO: 11617 - protein, 578 aa, Oryctolagus cuniculus (domestic rabbit)
MPGSTWELHLLLLLGLGLGSEQALPPPCESQIYCHGELLHQVQMARLYPDDKQFVDMPLSTAPDQVLQSFAELAATYNNTVPREQLEKFVQEHFQAVGQELESWTPGDWKESPQFLQKISDPKLRAWAEQLHLLWKKLGKKIKPEVLSQPERFSLIYSQHPFIVPGGRFVEFYYWDSYWVMEGLLLSEMAETVKGMLQNFLDLVTAYGHIPNGGRVYYLQRSQPPLLTLMMDRYVAHTGDLAFLRENIETLALELDFWAENRTISVSSGGNSHTLNRYHVPYGGPRPESYSKDTELAHTLPEGSWETLWAELKAGAESGWDFSSRWLVGSPNPDSLGSIRTSKLVPVDLNAFLCQAEELLSGFYSRLGNESQATKYRNLRAQRIAALTALLWDEDKGAWFDYDLENQKKNHEFYPSNLTPLWAGCFSDPAIADKALQYLQDSQILNHRHGIPTSLQNTGQQWDFPNAWAPLQDLVIRGLAKSPSARTQEVAFQLAQNWIRTNFDVYSQRSAMYEKYDISNAQPGGGGEYEVQEGFGWTNGVALMLLDRYGDRLSSGTQLALLEPHCLAAALLLSFLTR

SEQ ID NO: 11618 - DNA, 1488 bp, Nostoc sp. PCC 7120
  CDS (1)..(1488)
atgaccaaaaacaccgtcagaacctacatcaaacaaacctggaaaaccctcactcgctcccaccaacatttactagaatccgcccaagacaccaaactagaacaccaacccaacaccccttggattatctacatctccccccaagaagactgtaatacagtccagtccgtattagagcgatcactctcggcaaaagagatgcagcaaatagaaattcgcaccttacccagcgaagttgaagccatccaagaacacggattgttatatctccctggtgcttacgtcgttcctggtggtcgttttaatgaaatgtatggttgggatagctattttattttgcttggactgttgcaagatgaagaatgggaactagcccaaagtcaagttgatcagctactttaccaagtccagcattacggtacaatcctcaacgccaaccgtacctatatgctgacgcgatcgcaaccccccgttctgagtatgatggtcttggcgttattccaacacacccaagaccaagcatggctcaaatcaaccctgccattgctagaacagttttactattattgggtcgtaccgccgcatctaaattcagccacaggcttatctagatactacgccttaggcgaaggggctgcaccagaagtattattttccgagctagatgaaactggacgcagccactacgaacgtgtcaaggaatattacaagacatttgagattgatgattatgatgtgagtttgttttatgactcagaaagagacgaactcacagacttattttacaaaggcgatcgctccatgcgcgagtctggttttgatatcaccaaccgctttggcccctttagcgttgatatcgtccattatgcacctgtctgtctgaacagcctgctttatcaaatggagcaagacttggcgcaaattcacaagattttagataatcccgaacttgcagaacaatggagcgatcgcgccactttgcgccgtgagcgtatcaatcaatacctgtgggatgaagaaaaaggaatttatttagactatcacttctacagtggcaaacgccgtcattatgaatttgccactaccttctatcccctgtggacaggattatcctccccagaacaagcccaacgcattgtagaaaatctttccttatttacagccccagggggaatcttcaccagcacccatgtaacagggaaccaatgggacgcgccttttggctgggccccactcaccttaattgcagtccaaggactttatcgttacggatatcgcaaggagggggatgatattgctcataaattcctaactatggcgattcaagaatttacgaaatatggcttttttgtagaaaaatacgatgtagaacgttgttcggctcaagtttccgatgaaatctgctttggctatagttctaacgagataggttttggttggacgaacggagtcattttagaactattagctaaccttgacgattcatga

SEQ ID NO: 11619 - protein, 495 aa, Nostoc sp. PCC 7120
MTKNTVRTYIKQTWKTLTRSHQHLLESAQDTKLEHQPNTPWIIYISPQEDCNTVQSVLERSLSAKEMQQIEIRTLPSEVEAIQEHGLLYLPGAYVVPGGRFNEMYGWDSYFILLGLLQDEEWELAQSQVDQLLYQVQHYGTILNANRTYMLTRSQPPVLSMMVLALFQHTQDQAWLKSTLPLLEQFYYYWVVPPHLNSATGLSRYYALGEGAAPEVLFSELDETGRSHYERVKEYYKTFEIDDYDVSLFYDSERDELTDLFYKGDRSMRESGFDITNRFGPFSVDIVHYAPVCLNSLLYQMEQDLAQIHKILDNPELAEQWSDRATLRRERINQYLWDEEKGIYLDYHFYSGKRRHYEFATTFYPLWTGLSSPEQAQRIVENLSLFTAPGGIFTSTHVTGNQWDAPFGWAPLTLIAVQGLYRYGYRKEGDDIAHKFLTMAIQEFTKYGFFVEKYDVERCSAQVSDEICFGYSSNEIGFGWTNGVILELLANLDDS

SEQ ID NO: 11620 - DNA, 1638 bp, Pseudomonas aeruginosa
  CDS (1)..(1638)
atgcctgatcgaaccgctctaccccgcgccatgctcgcggcctgggtcctgctcctgctggcggcctgcagccagggcccggcgcctaccccgcccgcgtcctggggttggcaggacgccagcggcgaacgcgcgatcgcccccgacgaagcctatcccgagctgttccaggcggtgcaggaaaaccggctgttcagcgaccagaagcacttcgtcgatgcgctcccgctgcgcgagcctgcacggatccgcgccgactacctgcgcgagagggagcggcccggcttcgacctgcgcgccttcgtcggccgcaacttcgaggagtccggcagcgtcgagaccgccccgccggaagcgggtgccgatctcgccagccacatcagcgacctgtggccggcgttgacccgccactacgagcaggtgccggcccacagcagcctgctgccgctgccgaaaccctacgtggtccccggcggacgcttccgcgaggtgtactactgggactcctacttcaccatgctcggccttgcggagagcgggcagcaccagcgggtgcgcgacatgctcgacaacttcgcctacctgatcgatacctacgggcacattcccaacggtaaccgcagctactacctgagccgttcgcagccgccgttcttcgcctacatggtggatctccaggcaagacgcgaaggcgacgccgcctaccggcgctacctgccgcagctacagaaggaatacgcctactggatggaaggctccgccgggctgcgccccaacgaggcgcgcctgcacgtggtgaaactggccgacggaagcctgctgaaccgctactgggacaaccgtgacacaccgcgccaggagtccttcctggaggaccgggcgaccgccgcgcgcgccccgcagcgccccgcgggcgaggtctatcgcgacctgcgggccggcgcggaaagcggctgggacttctcctcccgctggctggacgacggccgcgaactggccagcatccgcaccaccgccatcgtcccggtggacctcaacgccctgctctaccatctcgaacgaatcatcgccaaggcctgcgccagcagcgcgctgaaggcctgcgagcaaggctacggcgcccgcgcggagaagcgacgacaggccatcgaagaccacctctggcacccggcgggctactacgccgactacgactggcaacgccggcggcccatcgagcggatcaacgccgccagcctcttcccgctattcaccgggctggcctccgccgaacgcgccggtcgtaccgccgacagcgtcgccgcccaactgctgcgcccgggcggactggccaccaccacccgtgccagcggccagcaatgggacgagccgaacggctgggcacccttgcagtgggtcgccgtacagggcctgcgcgcctacggccgggacgccctggcggaagacatcggccggcgattcctcgcccaggtgcagcaggtctacgaccgcgaaggaaaactggtggagaaatacgacatcagcggcaaccagggcggcggcggcggtggcgagtacccgttgcaggacggcttcggctggtccaacggcgtgaccctgcaactgctccgactctacggcccgggcgccggtcgctga

SEQ ID NO: 11621 - protein, 545 aa, Pseudomonas aeruginosa
MPDRTALPRAMLAAWVLLLLAACSQGPAPTPPASWGWQDASGERAIAPDEAYPELFQAVQENRLFSDQKHFVDALPLREPARIRADYLRERERPGFDLRAFVGRNFEESGSVETAPPEAGADLASHISDLWPALTRHYEQVPAHSSLLPLPKPYVVPGGRFREVYYWDSYFTMLGLAESGQHQRVRDMLDNFAYLIDTYGHIPNGNRSYYLSRSQPPFFAYMVDLQARREGDAAYRRYLPQLQKEYAYWMEGSAGLRPNEARLHVVKLADGSLLNRYWDNRDTPRQESFLEDRATAARAPQRPAGEVYRDLRAGAESGWDFSSRWLDDGRELASIRTTAIVPVDLNALLYHLERIIAKACASSALKACEQGYGARAEKRRQAIEDHLWHPAGYYADYDWQRRRPIERINAASLFPLFTGLASAERAGRTADSVAAQLLRPGGLATTTRASGQQWDEPNGWAPLQWVAVQGLRAYGRDALAEDIGRRFLAQVQQVYDREGKLVEKYDISGNQGGGGGGEYPLQDGFGWSNGVTLQLLRLYGPGAGR

SEQ ID NO: 11622 - DNA, 1854 bp, Homo sapiens (man)
  CDS (56)..(1807)
gaattccgggccgaaggtgcctgggcttgctcattcagtcacagtcacagccaccatgccagggaggacctgggagctgtgcctgctactgctgctggggctgggactggggtcccaggaggccctacccccaccctgtgagagtgagatttactgccacggggagctcctaaaccaagttcaaatggccaagctctaccaggatgacaagcagtttgtggacatgccactgtctatagctccagaacaagtcctgcagaccttcactgagctgtccagggaccacaatcacagcatccccagggagcagctgcaggcgtttgtccacgaacacttccaggccaaggggcaggagctgcagccctggacccctgcagactggaaagacagcccccagttcctgcagaagatttcagatgccaaactgcgtgcctgggcagggcagctgcatcagctctggaagaagctggggaagaagatgaagccagaggttctcagccaccctgagcggttctctctcatatactcagaacatcctttcattgtgcctggcggtcgctttgttgagttctactactgggactcctactgggtcatggagggtctgctcctctcagagatggctgagacggtgaagggcatgctgcagaacttcttggacctggtgaaaacctatgggcatgtccccaatggtgggcgcgtgtactacttgcagcggagccagcccccactcttgaccctcatgatggattgctacttgactcacaccaatgacaccgcctttctacaggaaaacattgaaacactagccttggaattggacttttggaccaagaacaggactgtctctgtgagcttggagggaaagaactacctcctgaatcgctattatgtcccttatgggggacccaggcctgagtcctacagcaaagatgtggagttggctgacaccttgccagaaggagaccgggaggctctgtgggctgagctcaaggctggggctgagtctggctgggacttctcttcacgctggctcattggaggcccaaaccccaactcgcttagcggcatccgaacaagcaaactggtgcctgttgacctgaatgccttcctatgccaagcagaggagctgatgagcaacttctattccaggctggggaacgactcccaggccacgaagtacagaatcctgcggtcgcagcgcttggccgccctgaacacagtcctgtgggatgagcagaccggagcctggttcgattacgaccttgagaagaagaagaaaaaccgggagttttacccatccaacctcactccactctgggccgggtgtttctctgaccctggcgtggcggacaaggctctgaaatacctggaggacaaccggatcctgacttaccagtatgggatcccgacctctctccagaagacaggccagcagtgggatttccccaatgcctgggcccccctgcaggacttggtcatcagaggcctggccaaggcacctttacgtcgggcccaggaagtggctttccagctggctcagaattggatccgaaccaattttgatgtctactcgcagaagtcagccatgtatgagaagtatgacgtcagcaacggtggacagcccggtgggggaggagaatatgaagttcaggagggatttggctgggacgaaggtgtggtcctgatgctgctggaccgctatggtgaccggctgacctcaggggccaagctggctttcctggagccccactgcctggcggccacccttctgcccagcctcctgctcagcctcctgccatggtgacagccctcctctcctcacctggccccagctcctgccccccggaattc

SEQ ID NO: 11623 - protein, 583 aa, Homo sapiens (man)
MPGRTWELCLLLLLGLGLGSQEALPPPCESEIYCHGELLNQVQMAKLYQDDKQFVDMPLSIAPEQVLQTFTELSRDHNHSIPREQLQAFVHEHFQAKGQELQPWTPADWKDSPQFLQKISDAKLRAWAGQLHQLWKKLGKKMKPEVLSHPERFSLIYSEHPFIVPGGRFVEFYYWDSYWVMEGLLLSEMAETVKGMLQNFLDLVKTYGHVPNGGRVYYLQRSQPPLLTLMMDCYLTHTNDTAFLQENIETLALELDFWTKNRTVSVSLEGKNYLLNRYYVPYGGPRPESYSKDVELADTLPEGDREALWAELKAGAESGWDFSSRWLIGGPNPNSLSGIRTSKLVPVDLNAFLCQAEELMSNFYSRLGNDSQATKYRILRSQRLAALNTVLWDEQTGAWFDYDLEKKKKNREFYPSNLTPLWAGCFSDPGVADKALKYLEDNRILTYQYGIPTSLQKTGQQWDFPNAWAPLQDLVIRGLAKAPLRRAQEVAFQLAQNWIRTNFDVYSQKSAMYEKYDVSNGGQPGGGGEYEVQEGFGWDEGVVLMLLDRYGDRLTSGAKLAFLEPHCLAATLLPSLLLSLLPW

SEQ ID NO: 11624 - DNA, 1830 bp, Tenebrio molitor (yellow mealworm)
  CDS (50)..(1717)
caaactggccaccacttttttagggttcgccagtaaagactcttactcgatgatccccttcctgcttatggtcgcttttgctgacaccgtccttcaagtgtcagcacagtcgcaaccatcatgtgacagtaaagtctactgtcagggtaagttgctccacgttgttgaaatgtcgcgaattttcaacgactccaagacgttcgtcgagttgaaaatgatcaacgacgaacaaaccaccctcgagaattttgacaactttctcagagacaccaaccacaagcgtacccgtgcagatctgatgaaatttgtcagcgacaacttcaagcaagagaacgagttcgaaagttggaccccgacggactttaccgacaacccgacactgttgtcgagaattgaagacaaaaccatcagacagtttgctcaagatttggtcaagatctggccgaccctcgccaggaaggtgaagaaagaagtactggattatccggagcactatagtttgttaccggtggacaatgggttcatcataccgggaggtcgcttcacggagttttactactgggactcttattggatagtggaggggctcctgttgagtgacatgcacgaaaccgtgcgagggatgttggacaacttcttgtcgatagtcgagaaatacgggttcataccgaacggtgctcgcgtcttctatctgaacaggtcccaaccaccattgctgaccttgatggtgtcgctgtatgtgtcggcaactaatgacatggagtggttggcaaagaacatccgcaccatcgatacagagttgcgtttttggctcaacaacagactagtcgacgtggtgaaagacggtattgtttacaaactcgctcaatacaactccaacagcggaagtcctcgtcctgagtcctactacgaagacgtcacaaccgctagcgtcttcagcgacgaaagagacaaagccgagctgtacatggacctgaagagcgccgccgagagcggttgggacttctcgtcgcggtggatcgtcgacgaatacggaggcaccagaggcaacctgtctgcccttcacacccggaggataattccggtggacctcaacgcgtttctctgtcaagctttccaaaagctgtccgaattctaccagaccctcggcgactaccccaacgccaccttctggtccaaactcgtcaaaatctggcaacacagtatcgagatggtccactacaacagagacgacggcatttggtacgactgggataacgagttgagtcagcacagaagaatgttcttcccttcgaatttcgcaccgctttggtccgaaactttcgactcacgcaacgctgaaatcttgggtgaaatggcggctgagtatttcataactcaaaacatgatggactaccacggaggaattcctacttcgttgagccacaccggagagcaatgggactatccgaacgcttggccgccaatgcagtccatcattgtgatgggtctggacaaaagtgggagttacagagctaaacaactagcgagagagttggctcgaagatgggtcaaagctaatctgattggttttagacagacgggtgagatgtttgagaagtacaatgttgaagttcctggacagaatggaggtgggggagagtacgtcgtccaaagcgggtttggatggacgaacggggtagttttagaatttataaaccaattttttacaacataaaaaacaacagagataatgttggcagcgttgggtatgcttttgtaagtgcgacacttgtagagtacattgtttatcaatattgtccatttaactagtttaaaataaattgtttt

SEQ ID NO: 11625 - protein, 555 aa, Tenebrio molitor (yellow mealworm)
MIPFLLMVAFADTVLQVSAQSQPSCDSKVYCQGKLLHVVEMSRIFNDSKTFVELKMINDEQTTLENFDNFLRDTNHKRTRADLMKFVSDNFKQENEFESWTPTDFTDNPTLLSRIEDKTIRQFAQDLVKIWPTLARKVKKEVLDYPEHYSLLPVDNGFIIPGGRFTEFYYWDSYWIVEGLLLSDMHETVRGMLDNFLSIVEKYGFIPNGARVFYLNRSQPPLLTLMVSLYVSATNDMEWLAKNIRTIDTELRFWLNNRLVDVVKDGIVYKLAQYNSNSGSPRPESYYEDVTTASVFSDERDKAELYMDLKSAAESGWDFSSRWIVDEYGGTRGNLSALHTRRIIPVDLNAFLCQAFQKLSEFYQTLGDYPNATFWSKLVKIWQHSIEMVHYNRDDGIWYDWDNELSQHRRMFFPSNFAPLWSETFDSRNAEILGEMAAEYFITQNMMDYHGGIPTSLSHTGEQWDYPNAWPPMQSIIVMGLDKSGSYRAKQLARELARRWVKANLIGFRQTGEMFEKYNVEVPGQNGGGGEYVVQSGFGWTNGVVLEFINQFFTT

SEQ ID NO: 11626 - DNA, 3143 bp, Bombyx mori (silkworm)
  CDS (187)..(1926)
cgatcgagtcggacgtacgcgattataatcgaataaaaaaaaaatgacaatcgaattataaaattattttgtctttaaaataaacagtttagttacttacttagtactagagtttagtacttagtgtaacggaattgttatcattattatatttgtttttgtaagtgaacgttgatcgtcttcacgatgaggttgtttctactactggtgggattgacgacggtaatcgcggatgacctaccgccgacttgcatcagaccagtttactgcaatagtacgctgctccattacgttcaaatggccagactctaccccgattctaaaactttcgtcgattttcaaatgcgtaaagacgagaacgcaacactgtccgccttccaagagctattggaccgcacgaatcataatccaacgaaagaagacctgcaggaatttgtcgttgacttttttgatgaaaccagcgaacttgaagaatggaaaccggatgaccataaagaaaacccgcctttcctcgccaaaattcgtgatcaaggtttccgggaattcgctaaagctttaaatgatatttggccaactttagccaggcgcgttaagccctcggtccttgaaaaacccgaacaatctagtctcgtgcctatgacacatggcttcatcgttcctggaggtcgatttaaagaaatctactattgggacgcatattggattatcgaaggtcttctaatcactgacatgaccgaaactgcaaaaggaatgatcgaaaacctaatcgagcttctgtataaatttggccacattcccaatggaagcagatggtattaccaagaacgtagccagcctcctttattggcggccatgataaagctttattacgaaaagactaaggacatcgaattcatcagaaagtatattagtgctttagaaaaggaattagaatattggctggacactcatcttatcgctttcaacaaggacgacagagtttacactctcctgaggtattatattccaagcgctggtcctcgaccggagtcttattatgaagattacgaattggctcagaaattagacaagaatactgatcctaatgatatttacgctgatttaaaaagcgccgctgagagcgggtgggacttttctacgcgctggtttatttcagaaagcggcgacaacagtggtaatctaaccaatttaaacacaaagaacgttatccccgtagacttgaatgctattttcgccggagcgttacagattacggcgaacttccaagctatactaaagaatcctcggagagcggctcactggggctacatggccgaacaatggagaagttctatagagcaagcattatgggatgaagaagacggagtctggcacgactacgacatattgaataataagccacgtagatatttttacactagcaacctagctcccctgtggatgaacgcagtcgaaaaaccatttctagctaagcatggcgctagagtcctggagtaccttcacgaatcgcaagcgctcgagtaccccggaggtgtcccggtgtctctagtcaacagtggagaacaatgggacttccctaacgcttggcctccagaagtcagcattgtcgttacggctatccaaaacattggttccgaggagagtagtaaattggcaaaagaactcgcccaggtctgggtgagagcttgtaaatcaggatttaccgaaaagaaacagatgtttgagaagtacgatgcgttgaacgctggtaaatacggcggcggcggtgaatacacggttcaagatggattcggatggtcgaacggcgttgtcctggagttcttagataggtacggagctgtactgacttcggtggactctgtagatgctagtgcaaataacggtcagtcaaacgaagaatctgagacggattctaaggaaaaataaatcgaggccgatgtgaatgacatttaatgatatttaagaacaagagttttaaagctaataattcattaaattctaagcaaaacaagatttcacaacttgtttactaatgtttattttcgtccgtatttttcctcaatctcaatccggtgctaaaatattagaaggttttataattgactgactcaatggtgtagtagttagcggccctgactatcgcgctgagggtcgtgggttcgattcccacatcaagccaacattgtgtggtgaacaggtttgtttgctctttgtctggcagcttattatctatatatgtatatatttaatcatatataagtatgtttatcagtatctggtacccgttaagctgctttcagactacgctatactttagtaccatatagtatagcagcctatagttaggcaataatttaaagtacagtacagtgtgagtctgtccataagaatgcattgtgtgggatattgttgtgctatgagagatatactatatatgctattatattatagcatagtctgaaagcggcttaacacagggaatcctaaataggagccggacgaccgtgccggatttgttcccagttacctatgtatatgaatattttatttaatatatatagttgagttcacaaaagcatttacgtgaaaaaaatggtgataatcccctttattaatttactgctggaatcattctgaaataatattaattcaaattcaggtggacgcgattaattgtgtactcccaaaaatgcattgtattattcctataatataaatgaagccacggctttttaacgcaactaaaagagtctaccgattagcgtctacgtcaaacgaaaagaaccatttagacttagttttggtaacaacagagagacttttcaatttattcatctgtgaacagataattaatttacaatttagcatttaaggatattttgttactgtattttaaatacggttcttcttgattaaattaagaaaatacctcacatagtgggggggctgattatcttaattaacctaagtacaattttagcttaagtgtctgttattgaaggttccaaaattaaataagaatgttgttaaaattacctaactgccatattatttcggtttgattcaaataaactatgtaacttgactgttttaaaaaaaaaaaaaaaaaaaaaaaaaaaaaaaaaaaaaaaaaaaaaaaaaaa

SEQ ID NO: 11627 - protein, 579 aa, Bombyx mori (silkworm)
MRLFLLLVGLTTVIADDLPPTCIRPVYCNSTLLHYVQMARLYPDSKTFVDFQMRKDENATLSAFQELLDRTNHNPTKEDLQEFVVDFFDETSELEEWKPDDHKENPPFLAKIRDQGFREFAKALNDIWPTLARRVKPSVLEKPEQSSLVPMTHGFIVPGGRFKEIYYWDAYWIIEGLLITDMTETAKGMIENLIELLYKFGHIPNGSRWYYQERSQPPLLAAMIKLYYEKTKDIEFIRKYISALEKELEYWLDTHLIAFNKDDRVYTLLRYYIPSAGPRPESYYEDYELAQKLDKNTDPNDIYADLKSAAESGWDFSTRWFISESGDNSGNLTNLNTKNVIPVDLNAIFAGALQITANFQAILKNPRRAAHWGYMAEQWRSSIEQALWDEEDGVWHDYDILNNKPRRYFYTSNLAPLWMNAVEKPFLAKHGARVLEYLHESQALEYPGGVPVSLVNSGEQWDFPNAWPPEVSIVVTAIQNIGSEESSKLAKELAQVWVRACKSGFTEKKQMFEKYDALNAGKYGGGGEYTVQDGFGWSNGVVLEFLDRYGAVLTSVDSVDASANNGQSNEESETDSKEK

SEQ ID NO: 11628 - DNA, 2256 bp, Saccharomyces cerevisiae
  CDS (1)..(2256)
atgagtcaagttaatacaagccaaggaccggtagcccaaggccgtcaaagaagattatcatcactaagtgaattcaatgatccattttcgaacgcagaagtctactatggccccccaacagacccaagaaagcagaagcaggcaaagcccgctaagatcaaccgtacgaggactatgagtgttttcgataatgtatctcctttcaagaaaactggttttggtaaacttcaacagactagacgtggttctgaggatgacacctattcaagtagtcaaggtaatcgtcgtttctttatcgaagatgtcgataaaacacttaatgaactactggctgctgaggataccgataaaaattatcagatcaccatcgaggataccggtccaaaagttttgaaagtcggtaccgcaaactcctatggctataagcatattaatattaggggtacgtatatgttatccaatttgttgcaggaactaactattgcgaaaagttttggtagacaccaaattttcttagatgaagctcgtataaacgaaaatcccgtcaacagattatcaagattgataaacacacagttctggaactctttgaccaggagagttgatctgaacaacgtaggcgaaattgcaaaagataccaagattgatacgccgggggcaaaaaatccaagaatctatgttccttatgattgtccagaacaatacgaattttatgttcaagcttctcaaatgcatccatctttgaaattagaagttgaatatttaccaaaaaaaataacggcagaatacgtcaaatccgtcaatgatacccccggtttactagcattggctatggaagagcacttcaatccttctactggtgaaaaaactctcattggttacccttatgctgttcctggtggtagattcaatgaattatatggttgggactcctatatgatggcactaggtctcctagaagccaacaagactgatgttgcaagaggtatggtggagcattttatttttgagattaatcactatggaaaaatattgaatgctaacagaagctactatctatgtagatcacagcccccattcttgactgaaatggccttggtagtattcaaaaaacttggtggtaggagtaatcccgatgctgtggatttgttgaaaagagctttccaagcaagcataaaagagtacaaaactgtttggaccgcatctccaaggcttgatcccgaaacaggcttatccaggtaccatcctaacggtctcggtattcctccggaaactgaaagtgatcacttcgataccgttttactaccatatgcatcgaaacacggcgttaccttagacgaatttaagcaactttataacgatggtaagataaaggagcctaaattggatgagttttttcttcatgaccgtggcgttagagaatctggacacgacactacatataggtttgagggcgtatgtgcctacctggccactattgacctgaattctcttctttacaaatacgagattgatattgcagacttcataaaggaattctgcgacgacaaatatgaagatcctttagaccattctataacaacttcagctatgtggaaagaaatggccaaaatcagacaagaaaagattaccaaatatatgtgggatgacgagtcggggtttttctttgactacaacacaaaaatcaagcacagaacgtcatacgaatccgcaactacattctgggcattatgggctggacttgccacgaaggagcaagcacagaaaatggtggagaaagcactacccaagttagagatgcttggaggtttagctgcatgtacggagcgttctcgaggcccaatttctatttcgagaccaattagacaatgggactatccatttggttgggcaccccatcaaattcttgcttgggaaggcctccgttcttatggttatttaactgtaacgaataggctagcttatagatggcttttcatgatgacaaaggcttttgtcgattataatggtattgtggttgaaaaatatgatgtcacaagaggaacagatcctcatcgtgttgaagcagaatacggtaatcaaggtgctgactttaaaggggcagctactgaaggttttggatgggtcaatgccagttacattcttggtttgaagtatatgaacagtcacgcaagaagagcgcttggtgcttgcattccaccaatatcattctttagcagtttaaggcctcaagaaagaaacctctatggactatag

SEQ ID NO: 11629 - protein, 751 aa, Saccharomyces cerevisiae
MSQVNTSQGPVAQGRQRRLSSLSEFNDPFSNAEVYYGPPTDPRKQKQAKPAKINRTRTMSVFDNVSPFKKTGFGKLQQTRRGSEDDTYSSSQGNRRFFIEDVDKTLNELLAAEDTDKNYQITIEDTGPKVLKVGTANSYGYKHINIRGTYMLSNLLQELTIAKSFGRHQIFLDEARINENPVNRLSRLINTQFWNSLTRRVDLNNVGEIAKDTKIDTPGAKNPRIYVPYDCPEQYEFYVQASQMHPSLKLEVEYLPKKITAEYVKSVNDTPGLLALAMEEHFNPSTGEKTLIGYPYAVPGGRFNELYGWDSYMMALGLLEANKTDVARGMVEHFIFEINHYGKILNANRSYYLCRSQPPFLTEMALVVFKKLGGRSNPDAVDLLKRAFQASIKEYKTVWTASPRLDPETGLSRYHPNGLGIPPETESDHFDTVLLPYASKHGVTLDEFKQLYNDGKIKEPKLDEFFLHDRGVRESGHDTTYRFEGVCAYLATIDLNSLLYKYEIDIADFIKEFCDDKYEDPLDHSITTSAMWKEMAKIRQEKITKYMWDDESGFFFDYNTKIKHRTSYESATTFWALWAGLATKEQAQKMVEKALPKLEMLGGLAACTERSRGPISISRPIRQWDYPFGWAPHQILAWEGLRSYGYLTVTNRLAYRWLFMMTKAFVDYNGIVVEKYDVTRGTDPHRVEAEYGNQGADFKGAATEGFGWVNASYILGLKYMNSHARRALGACIPPISFFSSLRPQERNLYGL

SEQ ID NO: 11630 - DNA, 2077 bp, Arabidopsis thaliana (mouse-ear cress)
  CDS (60)..(1940)
actctttcctttttggtgcgttattctaagagccctagtcagaattcaaacatttggcaatgaaatcatacaaacttaataaccctaatttactcatctccacgcacacacataataaactcttcttatcctcttctccattcaatctcttattctcttttccttccttcatataccttaaacagcaacgttctctgttcttcttcttctttttcttcctctgtttttctttcacaacttccatgttggactcggacacagacacggactcaggtcctgtggttgcaacaaccaaactcgtcactttcctccagcgtgtgcagcacacggcacttcgatcataccctaaaaaacaaacgcctgatcccaaatcctacattgatctatctctcaaacgtccctacagtctctccaccatcgaatcagccttcgatgatctcacgagcgagtcacatgaccagccagtgccagtggagacgcttgaaaagttcgtcaaggaatattttgacggtgcaggggaggatctgctgcaccacgaaccagtagatttcgtctcagatccctccggcttcctctccaacgtggagaacgaagaagtcagagaatgggcgcgtgaggtacacggtctttggagaaatctgagctgcagagtctctgactcagtaagagagtctgccgaccggcacacgcttctaccgttgccggaaccggttatcattcccggttcgagattcagagaagtctattactgggattcttattgggtcatcaaaggacttatgacgagtcaaatgttcactaccgccaaaggtttagtgacgaatctgatgtcacttgtggagacttatggttacgctttgaacggtgctagagcttattatactaacagaagccaaccacctttgttgagctccatggtctatgaaatttataatgtgacaaaagatgaagaacttgtgaggaaagcaatccctctgcttctcaaagagtacgagttttggaactcaggaaaacataaagtggttattcgagacgctaatggttatgatcacgttttgagccgttattatgctatgtggaacaagccaaggcctgaatcctctgttttcgatgaagaatctgcttcagggttctcgactatgttagagaaacaacggttccatcgagatatagccacggctgctgaatcaggatgcgatttcagcacgcgatggatgagggatcctcctaatttcacaacgatggctacaacatcagtggttcctgttgatctaaatgtttttcttctcaagatggaactcgatatagcgttcatgatgaaggtttctggagatcaaaatggttcagaccgttttgtgaaagcgtcaaaagcgagagagaaagcgtttcaaaccgtgttttggaacgagaaagcagggcaatggctggattactggctttcctccagtggtgaggaatctgagacatggaaggctgagaaccaaaacaccaacgtctttgcgtctaactttgcaccaatctggattaattccatcaattcagatgaaaatcttgtcaagaaagttgtgacagctcttaagaactcagggctcattgctcccgctggaatcctaacttctttgacaaactcaggacaacaatgggattctccgaatggatgggcaccgcaacaagagatgatcgtcacagggctcggaagatcgagtgtaaaagaagctaaagagatggcagaggatattgcaaggagatggatcaaaagcaactatcttgtctacaagaaaagtgggactatacatgagaagctcaaagttacagagcttggtgaatatggtggtggaggagaatatatgccacagaccggattcggatggtcaaatggagttatcttagcattcttggaggaatatggatggccctctcatcttagcattgaagcctagatttactaagtttattgaaagttaaataacggaattagacattttatgttacaaaaactttggtagatttgatcgtagtggattatttcttggggttttctgtcagaacgttttagagttacaaatgttttatgacc

SEQ ID NO: 11631 - protein, 626 aa, Arabidopsis thaliana (mouse-ear cress)
MKSYKLNNPNLLISTHTHNKLFLSSSPFNLLFSFPSFIYLKQQRSLFFFFFFFLCFSFTTSMLDSDTDTDSGPVVATTKLVTFLQRVQHTALRSYPKKQTPDPKSYIDLSLKRPYSLSTIESAFDDLTSESHDQPVPVETLEKFVKEYFDGAGEDLLHHEPVDFVSDPSGFLSNVENEEVREWAREVHGLWRNLSCRVSDSVRESADRHTLLPLPEPVIIPGSRFREVYYWDSYWVIKGLMTSQMFTTAKGLVTNLMSLVETYGYALNGARAYYTNRSQPPLLSSMVYEIYNVTKDEELVRKAIPLLLKEYEFWNSGKHKVVIRDANGYDHVLSRYYAMWNKPRPESSVFDEESASGFSTMLEKQRFHRDIATAAESGCDFSTRWMRDPPNFTTMATTSVVPVDLNVFLLKMELDIAFMMKVSGDQNGSDRFVKASKAREKAFQTVFWNEKAGQWLDYWLSSSGEESETWKAENQNTNVFASNFAPIWINSINSDENLVKKVVTALKNSGLIAPAGILTSLTNSGQQWDSPNGWAPQQEMIVTGLGRSSVKEAKEMAEDIARRWIKSNYLVYKKSGTIHEKLKVTELGEYGGGGEYMPQTGFGWSNGVILAFLEEYGWPSHLSIEA

SEQ ID NO: 11632 - DNA, 1767 bp, Caenorhabditis elegans
  CDS (1)..(1767)
atgttgaatccttggaatttcttcgtttttgtattattcataatatgtgggccactaggatccaatcaagttgaggttcatgtgtgcgacaccacaaattcaaacaactcattcatctattgtaatggaccaatattagatgcagtaaactatcattcactatacaatgattcaaaagaatttgttgatatgccattaaaagatgatcctcaaattgtttacaatgcgtggagggctaaatacggaaatcaatcatctgcaaacttgaataaaagcgatgttcaagcgtttgtaaatcaatatttcagtgctgctggaacagagcttgtcgtttgtacacctgacgattggcaagagaaaccaccaaaattggcaacaatcgctgatccgaaactccctattgaacaacatacatctcgttactctcttctgtatgttccaaatagttttattgtgcctggaggaagattccgcgagttttattattgggatgcatattggattatcaaaggattgattgcatctgatatgtataacacaactagaagtatgattagaaatcttgcatcaatggttgacaaatatggttttgtaccaaatggtggaagagtttattatcttcaaagaagtcagccaccattcctggctgcaatggtttacgaactttatgaagcaaccaacgacaaggcctttgttgctgaacttctgccaactctcttgaaagaattgaatttctggaatgaaaagagaatgactgatgtgcaaatgaatgggaaatcatttaaagtttatcaatataaaacagccagcaacgttcctcgacctgaatcataccgtgttgacacccaaaactctgcaaaattagcaaatggagctgatcagcaacagttttatcaagatcttgcaagcgccgccgagtctggatgggatttctcaactagatggttttctgattataaaactttgacatctatcgaaactaccaaggttttgcctgttgacctgaatggtttgctgtgctggaatatggatatcatggagtatctttacgagcaaattggtgacacaaagaattctcaaatattccgtaacaaaagagctgatttccgagatactgttcaaaatgttttctataatcgaacagatggaacttggtacgattataatttgagaacacaatcccataatccaagattctacacaagtaccgcagttcctttattcacaaattgctataacacattgaataccggaaaatcacaaaaagtattcgactatatggataaaatgggagtattcacttatccagggggaattccaacttcaatgtctcaagaaagtgaccaacaatgggatttcccaaatggatggagtccaaataatcatatgatcattgaaggattaagaaaatcagcaaatcccgaaatgcaagataagggattcctgattgcttccaaatgggttatgggcaacttccgagtgttctatgaaaccggccacatgtgggagaagtacaacgtgatcggcagctacccacaaccaggatctggaggtgaatatgatgttcaggatggatttggatggagcaacggagctatattggatcttctcttgacatataacgatcgattatttgttccagaaaactttgtcaacacaactgtcacaccttcggttgaatctactaccaaatctgctccaaaatatgctaagctaccatgggtactcgttttcgctttcatgattcgtcaactttttaattattaa

SEQ ID NO: 11633 - protein, 588 aa, Caenorhabditis elegans
MLNPWNFFVFVLFIICGPLGSNQVEVHVCDTTNSNNSFIYCNGPILDAVNYHSLYNDSKEFVDMPLKDDPQIVYNAWRAKYGNQSSANLNKSDVQAFVNQYFSAAGTELVVCTPDDWQEKPPKLATIADPKLPIEQHTSRYSLLYVPNSFIVPGGRFREFYYWDAYWIIKGLIASDMYNTTRSMIRNLASMVDKYGFVPNGGRVYYLQRSQPPFLAAMVYELYEATNDKAFVAELLPTLLKELNFWNEKRMTDVQMNGKSFKVYQYKTASNVPRPESYRVDTQNSAKLANGADQQQFYQDLASAAESGWDFSTRWFSDYKTLTSIETTKVLPVDLNGLLCWNMDIMEYLYEQIGDTKNSQIFRNKRADFRDTVQNVFYNRTDGTWYDYNLRTQSHNPRFYTSTAVPLFTNCYNTLNTGKSQKVFDYMDKMGVFTYPGGIPTSMSQESDQQWDFPNGWSPNNHMIIEGLRKSANPEMQDKGFLIASKWVMGNFRVFYETGHMWEKYNVIGSYPQPGSGGEYDVQDGFGWSNGAILDLLLTYNDRLFVPENFVNTTVTPSVESTTKSAPKYAKLPWVLVFAFMIRQLFNY

SEQ ID NO: 11634 - DNA, 2119 bp, Caenorhabditis elegans
  CDS (236)..(1993)
aatttggcacgagaaccagcatagccctgtgttattcttacaacgactccaaaaggtacacaactcaaattgtaaagtatatccacactatcaccgattagaaagatgttgctcaactgttgcaagtggagttcggatccaaagccagacaccacaagaaggagaaaaagaaagaagagaaccttccacttccttctcagctccatttcctacttcaacggctttttccaccaaaatgagcccgtcacccgtttggtgcgatggaactcttcttcacgccgttcaattatccggtcttttcccggattgtaagacctttgtggatatgccattgaagcatgatgcagacgtcacacttgccagatggaatgcccttatggctcttgctcctatcaccaatgacgtgttagcccttttccttcgggaaaactttgatgagccagaaggagaactagaagaatgtgccccgactgattgggcgcctatgactgatcaatttggtggcattatagatgaagattatcgaagattcgcagcagcgctgcatgccaaatggccaacgttatatagaaaaatttccaaaaaagtccgcgttaatccagaaaaatactcaattattccggttcccaatccatttgttgtgcctggcggaagattccgtgaaatgtactactgggattcgttctttacaatcaaaggtctcatcgcatctggaatgcttacaacagtcaagggaatgattgagaatatgatctacttagttgaaacatatggtttcattccaaatggtacacgtgtatattacttgaaccgatcacagccaccactattaacttggtgtgtcaaagcatattatgaagctactggtgacaaacaatttctgtcagatgtactgccaacacttagaaaagagttctcattcttccaaactcacaaaacatataatcatcctgattggaacactcctttgtatagattcgtagttgaaacatcacatccacgtccggaatcttatcgagaagatttggaaagcgccgagcatttggatactcttgagaagaaatgtgtactttggggagatttggccgcagcagctgaaagtggtcgtgacttctcatctcgtttctttgctgttcatggtccatatgctggtcaactggcaagcacacggacatctcaattgattcctgtagacttgaattcaatcatttgtggaaatatgaaaacattgagtgagatgtatacggtgtgtggagatttggaaagtgcaaaatactttgataatgagtatcgaacgctcagagatactattcgacaggttttgtggaatgaagagcataattgttggtttgactttgatgttgaagagggaaatcatgccacaagcttccacgacactaacttcttcccaatgtactgtgacagctatcatgaagatctcgactcacaagtggtagttgactatttgacaacatctggagccatcagcttccccggaggtattcctgtatccctagtgaattctggagaacaatgggattttccgaacagttggccaccaactacttgggttcttcttgaaggattacgaaaagttggtcaagaagaattagcattgagcttggtggagaaatgggtacagaagaacttcaatatgtggagaacaagtggaggaagaatgttcgaaaagtacaacgtagtctcaccatgcttcaaagtgaaaggaggtggtgaatacgtgatgcaagaaggattcggttggacaaacggcgtcattctagactttctcaagaactacggatccaaaatccggtggcaagttgcagaatcctgtgaatgctgtgatgtcacattatcacgtactcttatcaaaccaacatctcctgctccatcatcatcttcaactgctcgcctctttgctagtgaactcacacagacaccttccgtcgtgtcacttcaatcaatgttgtccgatggatcagttcagaattagatcaaatccttcgaaatagaattgaaaaatatatatgtttgtctccctttgtctcttcatgcggttcacactttcttgcgttatttattgaatataaaattacagattaataaatttattttatga

SEQ ID NO: 11635 - protein, 585 aa, Caenorhabditis elegans
MSPSPVWCDGTLLHAVQLSGLFPDCKTFVDMPLKHDADVTLARWNALMALAPITNDVLALFLRENFDEPEGELEECAPTDWAPMTDQFGGIIDEDYRRFAAALHAKWPTLYRKISKKVRVNPEKYSIIPVPNPFVVPGGRFREMYYWDSFFTIKGLIASGMLTTVKGMIENMIYLVETYGFIPNGTRVYYLNRSQPPLLTWCVKAYYEATGDKQFLSDVLPTLRKEFSFFQTHKTYNHPDWNTPLYRFVVETSHPRPESYREDLESAEHLDTLEKKCVLWGDLAAAAESGRDFSSRFFAVHGPYAGQLASTRTSQLIPVDLNSIICGNMKTLSEMYTVCGDLESAKYFDNEYRTLRDTIRQVLWNEEHNCWFDFDVEEGNHATSFHDTNFFPMYCDSYHEDLDSQVVVDYLTTSGAISFPGGIPVSLVNSGEQWDFPNSWPPTTWVLLEGLRKVGQEELALSLVEKWVQKNFNMWRTSGGRMFEKYNVVSPCFKVKGGGEYVMQEGFGWTNGVILDFLKNYGSKIRWQVAESCECCDVTLSRTLIKPTSPAPSSSSTARLFASELTQTPSVVSLQSMLSDGSVQN

SEQ ID NO: 11636 - DNA, 2208 bp, Schizosaccharomyces pombe
  CDS (1)..(2208)
atgccttcgaaattttcctctaaatacgtggatacagaagccatttcaaatgatgatgacaatccctttgcaaccgctaagagttattactccaaggatacagacttgtcgactcgggtaagtgctggccgtcctcgcaccttatccacttcgatggaggcatccgccgcaccaactataccagaattaaagaatttacgtcgacgtggaagtcttgatgaacataaacaaccacgaaaatttcttgttgatgttgataagacattgaatgcacttttggaatctgaagacaccgaccggaacatgcaaatcaccatcgaggataccggacctaaagttgtttcccttggcagcgctagctcgggtggatatcgcttgtatgagcttcgcggcacatatcaattgtcaaatttacttcaggaattgaccttggcaaaggattatggacgtcgatatattttacttgatgagcgaagacttaatgaaaaccctgtgaaccgactttctagactcatcaaaggtaccttttgggatgcccttactcgaagaatcgatgccagtgttttggatgttatttgccgtgataccaaagaccgatcaggatcacacgtgaatcgaatttatgttcctaaagccgaacaagagatgtatgaatactatgttcgcgctgctaaggaaaggccttacttgaatttacaggtcgaatatctgccggaagagattactccagaatgggtgagagatgtaaatgataagccagggttacttgcacttgcaatggaaaaataccaagatgatgaaggcaatacacatcttcgaggtgtgccatttgtcgttcctggtggccggtttaatgaactgtacggctgggactcttactttgaatcactgggtttgcttgttgacgatcgggttgacttggcgaaaggtatggtggagaattttatttttgaaattacctattacggtaagatcttgaatgccaaccgcacttattatcttcttcgctcccagcctccatttttgaccgatatggcccttcgagtttatgaacgtataaaaaacgaagaaggatctttagactttttgcatcgggccttttctgcgactataaaagaatatcacactgtttggactgccactccacgactggatcccaaaactggtctttcccgctatcgccctggaggactcggtattcctccggaaactgaagcttctcattttgagcatttgcttcgtccttacatggagaagtatcatatgactcttgaggagtttactcatgcatacaattaccaacaaattcatgaacccgcgttggatgagtatttcgtgcacgaccgcgcagttcgcgaaagcgggcatgatactacttatcggttggaaaaagtttgtgctgacttggccaccgtggatctgaactcgttgctatacaaatatgaaaccgacatctcacatgtgattttagaatatttcgatgacaagtttgtacttccaaacggaactatagaaacttctgccatttgggatcgtcgtgctcgtgctcgtcgtgctgcaatggaaaagtatctttggtcagaagctgattcgatgtggtatgattacaacacgaagttagaaacgaagagtacttatgaaagtgctactgctttctgggccttgtgggccggtgtggcaactccccgtcaagccgcaaaatttgttgatgttagtcttcccaagtttgaagttgctggaggtatagttgctggtacaaagagaagcttgggtaaagtgggtcttgataatcccagccgtcaatgggattatcctaatggctggagccctcagcagattttagcttggtatggattgattcgatacggatatgaagaggagactcgtagacttgtatatcgttggctatatactattactaaatcgtttgttgattttaatggtattgttgttgaaaaatatgatttgaccagaccagttgatccacatcgtgttgaagctgagtatggtaatcagggtgtcaatatcaaaggcgttgctcgcgaaggttttggatgggttaatgccagttacgaagtcggccttacattctgtaattcgcatatgcgtcgggctcttggtgcttgtacgactcctgatgttttctttgccggcatcaaggaagaatctcttcctgctttcgaaaacctttccattcataaaaattaa

SEQ ID NO: 11637 - protein, 735 aa, Schizosaccharomyces pombe
MPSKFSSKYVDTEAISNDDDNPFATAKSYYSKDTDLSTRVSAGRPRTLSTSMEASAAPTIPELKNLRRRGSLDEHKQPRKFLVDVDKTLNALLESEDTDRNMQITIEDTGPKVVSLGSASSGGYRLYELRGTYQLSNLLQELTLAKDYGRRYILLDERRLNENPVNRLSRLIKGTFWDALTRRIDASVLDVICRDTKDRSGSHVNRIYVPKAEQEMYEYYVRAAKERPYLNLQVEYLPEEITPEWVRDVNDKPGLLALAMEKYQDDEGNTHLRGVPFVVPGGRFNELYGWDSYFESLGLLVDDRVDLAKGMVENFIFEITYYGKILNANRTYYLLRSQPPFLTDMALRVYERIKNEEGSLDFLHRAFSATIKEYHTVWTATPRLDPKTGLSRYRPGGLGIPPETEASHFEHLLRPYMEKYHMTLEEFTHAYNYQQIHEPALDEYFVHDRAVRESGHDTTYRLEKVCADLATVDLNSLLYKYETDISHVILEYFDDKFVLPNGTIETSAIWDRRARARRAAMEKYLWSEADSMWYDYNTKLETKSTYESATAFWALWAGVATPRQAAKFVDVSLPKFEVAGGIVAGTKRSLGKVGLDNPSRQWDYPNGWSPQQILAWYGLIRYGYEEETRRLVYRWLYTITKSFVDFNGIVVEKYDLTRPVDPHRVEAEYGNQGVNIKGVAREGFGWVNASYEVGLTFCNSHMRRALGACTTPDVFFAGIKEESLPAFENLSIHKN

SEQ ID NO: 11638 - DNA, 2207 bp, Solanum tuberosum
  CDS (161)..(1906)
cttttctgagtaataacataggcattgattttttttcaattaataacacctgcaaacattcccattgccggcattctctgttcttacaaaaaaaaacatttttttgttcacataaattagttatggcatcagtattgaaccctttaacttgttatacaatatgggtaaagctataatttttatgatttttactatgtctatgaatatgattaaagctgaaacttgcaaatccattgataagggtcctgtaatcccaacaacccctttagtgatttttcttgaaaaagttcaagaagctgctcttcaaacttatggccataaagggtttgatgctaaactgtttgttgatatgtcactgagagagagtctttcagaaacagttgaagcttttaataagcttccaagagttgtgaatggttcaatatcaaaaagtgatttggatggttttataggtagttacttgagtagtcctgataaggatttggtttatgttgagcctatggattttgtggctgagcctgaaggctttttgccaaaggtgaagaattctgaggtgagggcatgggcattggaggtgcattcactttggaagaatttaagtaggaaagtggctgatcatgtattggaaaaaccagagttgtatactttgcttccattgaaaaatccagttattataccgggatcgcgttttaaggaggtttattattgggattcttattgggtaataaggggtttgttagcaagcaaaatgtatgaaactgcaaaagggattgtgactaatctggtttctctgatagatcaatttggttatgttcttaacggtgcaagagcatactacagtaacagaagtcagcctcctgtcctggccacgatgattgttgacatattcaatcagacaggtgatttaaatttggttagaagatcccttcctgctttgctcaaggagaatcatttttggaattcaggaatacataaggtgactattcaagatgctcagggatcaaaccacagcttgagtcggtactatgctatgtggaataagccccgtccagaatcgtcaactatagacagtgaaacagcttccgtactcccaaatatatgtgaaaaaagagaattataccgtgaactggcatcagctgctgaaagtggatgggatttcagttcaagatggatgagcaacggatctgatctgacaacaactagtacaacatcaattctaccagttgatttgaatgcattccttctgaagatggaacttgacattgcctttctagcaaatcttgttggagaaagtagcacggcttcacattttacagaagctgctcaaaatagacagaaggctataaactgtatcttttggaacgcagagatggggcaatggcttgattactggcttaccaacagcgacacatctgaggatatttataaatgggaagatttgcaccagaacaagaagtcatttgcctctaattttgttccgctgtggactgaaatttcttgttcagataataatatcacaactcagaaagtagttcaaagtctcatgagctcgggcttgcttcagcctgcagggattgcaatgaccttgtctaatactggacagcaatgggattttccgaatggttggcccccccttcaacacataatcattgaaggtctcttaaggtctggactagaagaggcaagaaccttagcaaaagacattgctattcgctggttaagaactaactatgtgacttacaagaaaaccggtgctatgtatgaaaaatatgatgtcacaaaatgtggagcatatggaggtggtggtgaatatatgtcccaaacgggtttcggatggtcaaatggcgttgtactggcacttctagaggaatttggatggcctgaagatttgaagattgattgctaatgagcaagtagaaaagccaaatgaaacatcattgagttttattttcttcttttgttaaaataagctgcaatggtttgctgatagtttatgttttgtattactatttcataaggtttttgtaccatatcaagtgatattaccatgaactatgtcgttcggactcttcaaatcggattttgcaaaaataatgcagttttggagaatccgataacatagaccatgtatggatctaaattgtaaacagcttactatattaagtaaaagaaagatgattcctctgctttaaaaaaaaaaaaaaaaa

SEQ ID NO: 11639 - protein, 581 aa, Solanum tuberosum
MGKAIIFMIFTMSMNMIKAETCKSIDKGPVIPTTPLVIFLEKVQEAALQTYGHKGFDAKLFVDMSLRESLSETVEAFNKLPRVVNGSISKSDLDGFIGSYLSSPDKDLVYVEPMDFVAEPEGFLPKVKNSEVRAWALEVHSLWKNLSRKVADHVLEKPELYTLLPLKNPVIIPGSRFKEVYYWDSYWVIRGLLASKMYETAKGIVTNLVSLIDQFGYVLNGARAYYSNRSQPPVLATMIVDIFNQTGDLNLVRRSLPALLKENHFWNSGIHKVTIQDAQGSNHSLSRYYAMWNKPRPESSTIDSETASVLPNICEKRELYRELASAAESGWDFSSRWMSNGSDLTTTSTTSILPVDLNAFLLKMELDIAFLANLVGESSTASHFTEAAQNRQKAINCIFWNAEMGQWLDYWLTNSDTSEDIYKWEDLHQNKKSFASNFVPLWTEISCSDNNITTQKVVQSLMSSGLLQPAGIAMTLSNTGQQWDFPNGWPPLQHIIIEGLLRSGLEEARTLAKDIAIRWLRTNYVTYKKTGAMYEKYDVTKCGAYGGGGEYMSQTGFGWSNGVVLALLEEFGWPEDLKIDC

SEQ ID NO: 11640 - DNA, 1966 bp, Caenorhabditis elegans
  CDS (1)..(1704)
atgctctacactgtaatcaacctcctagcacaaatctattgcaatggaccaattcttcaaactgtacaagattcacacatgtttccagactcgaagcacttcgtcgatatgtcactaaaatatgatccaattacgacacttcgacatttcgacgagcttggtgatcgaacttcagatatgattattttaagggaatttgtaacttcacattttaatccgcctggaagtgagctggttgaatggtttcctccagattgggtcgattttccatcaaactttttgaatattcatgattatcaccatagacgatgggcattgcatttacataggatttggaaagatttatgtagaaaagttcgagatgacgtcaagcatcgtcaagatcactattcacttctatatgttcctcatccatttattatcccgggtggtcgatttttggagttctactattgggatactttctggatactcaaagggcttctcttctcagaaatgtatgaaacagctcgaggagttatcaaaaatctaggatatatggttgataatcacggtttcgtaccaaatggaggtcgtgtctattatctaacacgttcccaaccacctctattgacaccgatggtctacgaatattacatgagcacaggagatttggattttgtaatggaaattcttccaacccttgacaaagaatacgagttttggattaaaaatcgacaggaatggttcaaagacaaagatggtgtcaagcagtttccatattatcaatataaggctaaactcaaagtaccgagaccagaatcatatcgtgaggattcggaattagcagagcatctgcaaactgaagcggagaaaattcaaatgtggagtgagatagcgtcggctgccgagacgggatgggatttctccactcgatggttttctcaaaatggagatacaatgcatcgaatggattctataagaacgtggagcattatcccagccgatttaaacgctttcatgtgtgcaaatgctcgaattctggcgagtctttatgaaattgctggtgatttcaaaaaagtgaaagtatttgaacaacgatacacttgggcaaaacgggaaatgcgtgaattacattggaatgaaacagatggtatttggtatgattatgatatcgaattgaaaactcattcaaatcaatattatgtatcaaatgctgttcctttgtatgcaaaatgttatgatgatgatgatgatattccacatcgtgttcatgattatttagagcgccaaggactattgaaatacacaaaaggtcttccaacatctcttgcaatgagtagtacgcagcaatgggataaggaaaacgcatggcctccaatgattcatatggttatcgaaggattccgtacaactggtgacataaaactgatgaaagttgctgaaaagatggcaacgtcatggcttactggaacatatcagtcatttatcagaactcatgctatgtttgaaaagtataatgttactccacatactgaagaaacttctggaggaggtggaggagaatatgaagttcaaactggctttggttggacaaatggcgttattttggatttattggacaaatacggagatcaatttgcatccagctctacagcttccaaattcagtttttccctttcgaatatcacatttgtagtttttattttgtatattttctcatagattcctgtagaatttgcacctgattttattattttctgttgtgtatagtccagttccctcatttagatcttttttaactaaagaatcaaaaacattgccatagcgattgccttaatttttttgttttaaatatcaaactcacattttgctttttctcatccggtccaaccccccattttcagattataacgattgttttctttcgggttctttttttccttattttcaaaaaaccttttttagttcataaaatttttactta

SEQ ID NO: 11641 - protein, 567 aa, Caenorhabditis elegans
MLYTVINLLAQIYCNGPILQTVQDSHMFPDSKHFVDMSLKYDPITTLRHFDELGDRTSDMIILREFVTSHFNPPGSELVEWFPPDWVDFPSNFLNIHDYHHRRWALHLHRIWKDLCRKVRDDVKHRQDHYSLLYVPHPFIIPGGRFLEFYYWDTFWILKGLLFSEMYETARGVIKNLGYMVDNHGFVPNGGRVYYLTRSQPPLLTPMVYEYYMSTGDLDFVMEILPTLDKEYEFWIKNRQEWFKDKDGVKQFPYYQYKAKLKVPRPESYREDSELAEHLQTEAEKIQMWSEIASAAETGWDFSTRWFSQNGDTMHRMDSIRTWSIIPADLNAFMCANARILASLYEIAGDFKKVKVFEQRYTWAKREMRELHWNETDGIWYDYDIELKTHSNQYYVSNAVPLYAKCYDDDDDIPHRVHDYLERQGLLKYTKGLPTSLAMSSTQQWDKENAWPPMIHMVIEGFRTTGDIKLMKVAEKMATSWLTGTYQSFIRTHAMFEKYNVTPHTEETSGGGGGEYEVQTGFGWTNGVILDLLDKYGDQFASSSTASKFSFSLSNITFVVFILYIFS

SEQ ID NO: 11642 - DNA, 1908 bp, Caenorhabditis elegans
  CDS (1)..(1908)
atgagatggacgccacaattactaataagtgttttaattggttatgttcaagcaagactagaaatcagtgagctgaggtttaaagatatattaagctctcactacattttcaaacccctggaagtcccttgcaacgaaagtctctgcactggacctctctcagaaatctattgccatggcccaattttaacaaattcctggcagtttggactacagaaaacatgtcctggagacaaactcaaggttactgcaaaagaggttctcgctaattttaacaagttgccgtggcctttgaagaaggaagtatttcagcaattttgcgaggaacatttcgagcaagtaaactatttggaagttgtaaatcttacagattatgaagttcagcctaagtttctgaatgaaattgggaatttgagccacagaaaacttgctgcagaaatgcacgagagatgggaacgacttgcacgccaattcacttccgatgtgcaacaccatccagatttatatcctcttattcccgtgcaaaacccgttcattgtgccaggcggccgatttgacgtatatttctactgggatactttttggatcatcaaaggtctactcgtctcaagaatgttcgaaacgactaaagggatcatcaataatttttcaaatctagtggtcacactgggctatatcccaaattctggaaacttgcagttgtctagaaggtctcaaccaccactcttcccacatatgatatgggagtacactaaagctacgggtaactatgaaaaacaatggatagatagtatggatatggaaatgaagttttgggagaataatcgaacgattgcgataggaactcacaagttattcctttacaagacactcacaaattgtccgcgacctgaaaacttcctaggagatttcaatattggaaaagctgccaaaactccatcagacgtttggcggtctatatcatcagcatgtgagagtggatgggatttcagttctagatggatgcacaataacgatacagatctatcaagtattcacaccgatctaattattcctgtcgatttgaatgttttcatcgcaaacaactatcggtacatggcatactatgcaaatcattttggaagatttgataagtctgcaagctatcggcaaaagtatgagaaactacgctatgcaattcaggaagtattgtgggataataatttaggcgcttggtttgactacgatatttcaatacagaaacgaaatttgaacttctacccatcaaatgtgtatccattaatgctggaagggatggataagtttgccgatcgtgttgaagattatatgaaaaaatcgggagcattggagtttgtgggcggtattccatcttcgttacctgctcagtccacgcaacagtgggattttccaaatgtttgggctccaaatcaacattttgtaattcaaagctttatggcttgcaataacagtttcctgcagcaagaagctaaaaaacaagctatggaatttattgaaactgtgtataacggaatgtacaacccaatagcaggactagatggaggagtatgggaaaagtacgacgcgaggagcacgaatggggctccaggagctggaggagagtacgtggttcaagaaggatttggttggacaaatggagccgttatggacctcatttggacacttagagactctcacaaaaaacagattagatctgaaaatttgaagcttgatcaaggccaacactttgcattggtgttaacagcttttatattttgtattgccatagcttttattgtgattatcaaaggaattatcaaaggaaacactttaaatcaacgggatgatgaagaagccggtgcccgtctactcgcggaagaaaacgacgaggacgaccaagaagagctgtga

SEQ ID NO: 11643 - protein, 635 aa, Caenorhabditis elegans
MRWTPQLLISVLIGYVQARLEISELRFKDILSSHYIFKPLEVPCNESLCTGPLSEIYCHGPILTNSWQFGLQKTCPGDKLKVTAKEVLANFNKLPWPLKKEVFQQFCEEHFEQVNYLEVVNLTDYEVQPKFLNEIGNLSHRKLAAEMHERWERLARQFTSDVQHHPDLYPLIPVQNPFIVPGGRFDVYFYWDTFWIIKGLLVSRMFETTKGIINNFSNLVVTLGYIPNSGNLQLSRRSQPPLFPHMIWEYTKATGNYEKQWIDSMDMEMKFWENNRTIAIGTHKLFLYKTLTNCPRPENFLGDFNIGKAAKTPSDVWRSISSACESGWDFSSRWMHNNDTDLSSIHTDLIIPVDLNVFIANNYRYMAYYANHFGRFDKSASYRQKYEKLRYAIQEVLWDNNLGAWFDYDISIQKRNLNFYPSNVYPLMLEGMDKFADRVEDYMKKSGALEFVGGIPSSLPAQSTQQWDFPNVWAPNQHFVIQSFMACNNSFLQQEAKKQAMEFIETVYNGMYNPIAGLDGGVWEKYDARSTNGAPGAGGEYVVQEGFGWTNGAVMDLIWTLRDSHKKQIRSENLKLDQGQHFALVLTAFIFCIAIAFIVIIKGIIKGNTLNQRDDEEAGARLLAEENDEDDQEEL

SEQ ID NO: 11644 - DNA, 2541 bp, Debaryomyces hansenii CBS767
  CDS (1)..(2541)
atgagcaatccatcccactcgagatcagtttcatcttcgagtgaagatgacaatccttatgatacaccagagaattactatggtcctaagaccaaccctgttggtgcaggcaagaattcgaaattaggaaaggttagaacattttccgtctttgaaccaaaacggtcacaattttttgatgattacaaccctggtttagccaattacgatcctggtttagctaactcggatgttaccgaacagcctgacaaagaaacgagtccattttcagattcgccaacgccagaagtcgaatgcaaatgggatttcaagcagtcatctgggcttgccccactgacgggaaagaaagtggatgatattccctcaacacataaccctaaaagagggaacagaaattctatagtgccaatctatgaagacatttcgctggattcggtggaggatttcaatgcatcgacgaaacctgatcctaaacgtttgcattataggcgagcctcaatggatgatacgttcctcaaaccaagaaagttctatatcaacgacattgaccttacacttaaggagctcttgaagaatgaagatactgaccacaattttcaaattactatcgaagataatgggcccaaagttatcaaattaggtacggccaactcaaatggatatcgacaggcaccaattagaggtacatacatgttgtccaacttgttacaagagctcacaatagctaagaggcttggtagagaccaaatgattttggatgagaccagattgaatgaaaatccagtgtaccgtatgaagcgtcttattacgactcaattctggaggtcattaacaagattgttgactagagacaatataatggaaatgtctaaggatactaagattgaagaagaaataactgacgaaaatggtcaagttcaacataataaggagagtcatagaatatacattccttataacagaaaggatcagtttgattatttcaatagtataaaagaagcaaacccagatattagtcttgatgtccaatatttgccagaaattattgatgctgactatgtaaaatcgattaataaaaagccaggtttgttggcccttagtgctgcccctgacccaaatgattcaaccaacttaattagtcaaccatatattgtcccaggcggtagatttaatgaattatatggatgggattcttatatggaaaccattggtttattggttgatgtcactgttgatgatcaggaacatttaaagttagctaggggtatgacagagaatttcatatatgaaattcatcattacggtaaaatattgaatgctaacagatcctattatttgacaaggtcgcagccacctttcttaactgacatggccttgagagttttcaataaaactatggaagtagctccagaaaggctagaagagtcgatggactttataagaagagccattgaggcggccattaaagagtataataacgtctggtttgcagagccaaggttagacaaagagacaggtttatcttgttatcatccagttggaaaaggtatacctccagagactgaggctagtcatttcaatgcgattttagatccttacatcaagaaatatggcatctctcagactgattttattgaagagtataataatgggaccattaaggaacctgaattagacgagtatttcctacacgacagggctgtaagagaatcgggacatgatacatcttataggttagaaggtaagtgtgcggatctagccacagtggacttaaattccttgttgtataagtacgaagcagatatcgcctttgttatcgagtcactctgtgatggaaaattggaaaataaggacactggcgaaatcgaaacaccagagaaatggagagagaaggctaatttgagaaagaaaagaattactaagtacttgtggaacgaggaggactcgattttctatgactataatattaaaaagaagagacaaacaggttacgaatcggcgactacgttttggcctttatggtcacaagtagcctctgcagaacaagcggatatgctagttaagaattcgacacagaaactagaagaatttggtggacttgcggctggcaccttgaagtctcgaggtggtatcaatttacacagaccatcaagacaatgggactatccctatggatgggctccacagcagattctagcatggatcgggttgtgtaattacggttacgaaggagttgctcgtagattagcctatcgttggttatatctaatgactcaagctttcgttgattataatggtgttgtggtggagaaatataatgtcactaagggtgccattccacacaaagttgatgcagaatacggtaaccaaggcttggatttcaaaggggttgctatggaagggtttggctgggttaacgcaagttatgtgtttggcttgacatttatgaatcttcatgcttgtagatgtttaggaactctcaccccacccgatgttttcttgagatatttacatcctcaacaaagaaaagactatcagtga

SEQ ID NO: 11645 - protein, 846 aa, Debaryomyces hansenii CBS767
MSNPSHSRSVSSSSEDDNPYDTPENYYGPKTNPVGAGKNSKLGKVRTFSVFEPKRSQFFDDYNPGLANYDPGLANSDVTEQPDKETSPFSDSPTPEVECKWDFKQSSGLAPLTGKKVDDIPSTHNPKRGNRNSIVPIYEDISLDSVEDFNASTKPDPKRLHYRRASMDDTFLKPRKFYINDIDLTLKELLKNEDTDHNFQITIEDNGPKVIKLGTANSNGYRQAPIRGTYMLSNLLQELTIAKRLGRDQMILDETRLNENPVYRMKRLITTQFWRSLTRLLTRDNIMEMSKDTKIEEEITDENGQVQHNKESHRIYIPYNRKDQFDYFNSIKEANPDISLDVQYLPEIIDADYVKSINKKPGLLALSAAPDPNDSTNLISQPYIVPGGRFNELYGWDSYMETIGLLVDVTVDDQEHLKLARGMTENFIYEIHHYGKILNANRSYYLTRSQPPFLTDMALRVFNKTMEVAPERLEESMDFIRRAIEAAIKEYNNVWFAEPRLDKETGLSCYHPVGKGIPPETEASHFNAILDPYIKKYGISQTDFIEEYNNGTIKEPELDEYFLHDRAVRESGHDTSYRLEGKCADLATVDLNSLLYKYEADIAFVIESLCDGKLENKDTGEIETPEKWREKANLRKKRITKYLWNEEDSIFYDYNIKKKRQTGYESATTFWPLWSQVASAEQADMLVKNSTQKLEEFGGLAAGTLKSRGGINLHRPSRQWDYPYGWAPQQILAWIGLCNYGYEGVARRLAYRWLYLMTQAFVDYNGVVVEKYNVTKGAIPHKVDAEYGNQGLDFKGVAMEGFGWVNASYVFGLTFMNLHACRCLGTLTPPDVFLRYLHPQQRKDYQ

SEQ ID NO: 11646 - DNA, 1947 bp, Yarrowia lipolytica CLIB99
  CDS (1)..(1947)
atgacacgatcaagaagttatagcctgccaacaccacctcaacccagaacaccaagacggttcagtgccagcagtctcatactgggtggtgagaaaaggttcatagcaagtgatcatacagtcgagcaactgctgcttctctgtgacgacgaaggacatatcacgatcgacaccaccacgacttcttctgacaattttctacaggtggagacagatgctgggtggtgctaccaggtcataggcgcctaccagttagctactgtactcaattatctcctccttaaacgagggggtcctgaaactgggttgaaaaggctgaaacaaaaccagaagacaattgctccgagttcttgcgtgacacatatctcaagcgacaaaattttggaacccccacaccagagacttaaaaaccttgtggacaatcaattttggcaccaattgaccaggtctatggataccaagacgatctattctctattgggggattcaaaagtgcagggtgaaggagttttgtatttaccacatgctagtgagcaacgccaatactatgcaagcctggatgtaaatttacaagatctacccaagagaatctcacctgaatatgtcctcagcatcaattctagtcctggtgtgctagcacttgctatggacaaaagccacaatcctttgccttacatcgttccaggaggtcgtttcaacgaaatgtatggctgggatagctatttcgagctcttgggtcttctcgaaagcggggggcctgggtatattcacatcgccgagtcaatgtgcttgcatttttgctaccagatcaagaattatggcaagatactgaatgccaacagaagttactatctcagcagatcgcagcctccatttcttacagacatgggcctgagagtctactgtcgtactcgcaacaaggagtttctgaaagaaatctataactctgcagtcacagaatacaacacagtatggatgggaaacccgagactggacagacgtactggactatcgaagtattgcccagcagggttaggtattccacctgaagtggagacagggcacttcgacggagtccttggaccgtacgcgcagaagtatgggcttactttggatgaatttgttcaagcatacaactctggtaacatcgttcagccagaactagatgagtactttttgcatgatcgagcaattagagagtctggtcacgatacctcttacagattagaaggcgtctgtgctgacctcgctactgttgacctgaactcattgctatacaagtatgaagttgaccttgagtacattgagcgggagctgaatctcagcccatgcggattctatgaagctgcagagagacgaaaggaagcattcacgcaattcttgtggaactccgaagactcatgtttttacgactacaattgcaagaccaacgctcaaaggaagtacacctcgagcacgggtctgtggccactgtggtcgggaattgccactcgcgaacaagcgagggggatcgtgtctactatagcgtccctcgaagaatatggcggcctggcatccggctctaaggcatcattggatgagttttctggaggatcaggggttcctagacaatgggactaccctaatggatgggccccacaccaggttttggcatggcagggactgcaaaactatggatacgataacgtggcaactagactcgcattcaaatggtgtgctatgatggttcattcattcagagactactccgggttggtggtggagaaatacaacgttaccgatcctaccaaaccccatgttgtcacagctgagtatggaaatcagggatccgtagcctcaggctttggatgggtcaatgcttcctacgtagtgggactagggtacctgagcaatcagcaacgacaacgattagagtggggtgtgtggaagagacacgaaaagctgtaa

SEQ ID NO: 11647 - protein, 648 aa, Yarrowia lipolytica CLIB99
MTRSRSYSLPTPPQPRTPRRFSASSLILGGEKRFIASDHTVEQLLLLCDDEGHITIDTTTTSSDNFLQVETDAGWCYQVIGAYQLATVLNYLLLKRGGPETGLKRLKQNQKTIAPSSCVTHISSDKILEPPHQRLKNLVDNQFWHQLTRSMDTKTIYSLLGDSKVQGEGVLYLPHASEQRQYYASLDVNLQDLPKRISPEYVLSINSSPGVLALAMDKSHNPLPYIVPGGRFNEMYGWDSYFELLGLLESGGPGYIHIAESMCLHFCYQIKNYGKILNANRSYYLSRSQPPFLTDMGLRVYCRTRNKEFLKEIYNSAVTEYNTVWMGNPRLDRRTGLSKYCPAGLGIPPEVETGHFDGVLGPYAQKYGLTLDEFVQAYNSGNIVQPELDEYFLHDRAIRESGHDTSYRLEGVCADLATVDLNSLLYKYEVDLEYIERELNLSPCGFYEAAERRKEAFTQFLWNSEDSCFYDYNCKTNAQRKYTSSTGLWPLWSGIATREQARGIVSTIASLEEYGGLASGSKASLDEFSGGSGVPRQWDYPNGWAPHQVLAWQGLQNYGYDNVATRLAFKWCAMMVHSFRDYSGLVVEKYNVTDPTKPHVVTAEYGNQGSVASGFGWVNASYVVGLGYLSNQQRQRLEWGVWKRHEKL

SEQ ID NO: 11648 - DNA, 2298 bp, Candida glabrata CBS138
  CDS (1)..(2298)
atggatgaagggcctttgggcaagggtgctgtggccacaccagcaatggtcgagaaagtcgctaacgagagtccaaagaagacaagaccaaggagactgtcctcgctgaacgagttctatgaccctttctccacagcagaagtctattacggtcccgctaccgaccccaggaagcagaaaaagagctcgactaagctcaacaggacaagaaccatgagtgtcttcgacaacacttccatcgccaagaccactgccagcttcggccaattccaattgaaaagaaggggttccgaggacgacagtctaactgcaagtcaaggtaacagaaagttcttcatcgaggatgtcgacggcaccctggaagaacttctatccagcgaagacacagaccgtaattatcagatcacaatcgaagacaccggcccaaaagtgttgaaagtcggtaccgctaactctggaggttacaaacatgtcaacattagaggtacctacatgctttcgaaccttttacaagaacttacaattgcaaagagttttggtagacactccatcttcctggatgaagcaagaattaacgaaaacccagtgaacagattgtcaagattgatcaccaatcagttctggaataacttgactagaagaatagatttgaataacatcggagaaattgctagtgatactaaagttgacacaccagaggcaaagaaccctagagtctacgtcccatacaactgccctgaacaatacgaattttacattcaagcatcccagatgaacccttcgatgaaactcgaagtcgaatacttaccaaaagatataaccccggagtacgtaaagtcattgaatgcaacacctggtttgctggctctggcaatggaagaacacgtcaacccagcaactggtgaggtgtccctaattggttacccatatgcagttccaggtggtagattcaatgaactatatggttgggattcttacatgatggcactgggattattggaaagtaataaggtcgacgttgcccgtggtatggtagaacactttatcttcgaaattgaacattacggtaagatattgaatgctaacagaagttattatctgtgtagatcgcaaccaccatttttgactgatatggctttagtggtattcaacagaattggtggtgataataacccaaacgcaatcgatttcttaaagagatctttcaaagccgctatcaaggaatataaaacggtctggatggctcatccaagactagatccagaaaccggtctatcatgctatcatcctgatggtttaggtattccacctgaaacagaacctactcatttcgatagtatattaacgccatacgctgcaaagtactattgcacaattcctgagttcattgcgatgtacaacgatggctcagtaaaggaacctcatcttgacgagtttttcttacatgatcgtggtgttagagaatctggtcacgacaccacttatagattcgaaggtgtttgcgcatatctagctaccattgatctcaactcactgctttacaagtacgaggtcgatatcgctaatttcatagaaaaatatcataacgatgaataccatgatccatttgatggaacagttaccaattctgcttactggcgcgatctagcagctaaaagaaaggaaaatataactaaatatatgtgggacgaagagactggtttcttttatgactacaatatcaaagtgaagtgcaggactaactatgagtcagcaactacgttttggtctttatgggcaggattagcaactccggaacaagcaaaaaagatggttgaattagcattgccgaagcttgaaatgctaggtgggttggttgcttgtacagaagagtccagaggacctatttctattgatagacctcatagacagtgggattatccttttggttgggcaccacatcaaatacttgcttgggagggcttaaatgattacggttacacctctgttgcaacgagattggcatacagatggttatttatgatgaccaaagcatttgttgactataacggtattgtggtagagaagtatgatgttacacgaggcactgatcctcatcgtgttgatgctgaatatggtaatcaaggtgcagacttcaagggggttgctaaagaagggtttggctgggttaatactagttacatattagggttgaagttcatgaacagtcatgctagaagagcgttaggagcatgcattcccccagcaccattcttcaatagtttgaaagatgatgaaaagagcatatatggtctttaa

SEQ ID NO: 11649 - protein, 765 aa, Candida glabrata CBS138
MDEGPLGKGAVATPAMVEKVANESPKKTRPRRLSSLNEFYDPFSTAEVYYGPATDPRKQKKSSTKLNRTRTMSVFDNTSIAKTTASFGQFQLKRRGSEDDSLTASQGNRKFFIEDVDGTLEELLSSEDTDRNYQITIEDTGPKVLKVGTANSGGYKHVNIRGTYMLSNLLQELTIAKSFGRHSIFLDEARINENPVNRLSRLITNQFWNNLTRRIDLNNIGEIASDTKVDTPEAKNPRVYVPYNCPEQYEFYIQASQMNPSMKLEVEYLPKDITPEYVKSLNATPGLLALAMEEHVNPATGEVSLIGYPYAVPGGRFNELYGWDSYMMALGLLESNKVDVARGMVEHFIFEIEHYGKILNANRSYYLCRSQPPFLTDMALVVFNRIGGDNNPNAIDFLKRSFKAAIKEYKTVWMAHPRLDPETGLSCYHPDGLGIPPETEPTHFDSILTPYAAKYYCTIPEFIAMYNDGSVKEPHLDEFFLHDRGVRESGHDTTYRFEGVCAYLATIDLNSLLYKYEVDIANFIEKYHNDEYHDPFDGTVTNSAYWRDLAAKRKENITKYMWDEETGFFYDYNIKVKCRTNYESATTFWSLWAGLATPEQAKKMVELALPKLEMLGGLVACTEESRGPISIDRPHRQWDYPFGWAPHQILAWEGLNDYGYTSVATRLAYRWLFMMTKAFVDYNGIVVEKYDVTRGTDPHRVDAEYGNQGADFKGVAKEGFGWVNTSYILGLKFMNSHARRALGACIPPAPFFNSLKDDEKSIYGL

SEQ ID NO: 11650 - DNA, 2253 bp, Candida glabrata CBS138
  CDS (1)..(2253)
atgcctacgcttacattttatttaggtgcggatgacgctgtggatggcggggtgaagagcaaaagcatggccttcagcgaccccttccataagaacgtcaaggtacagtcacctgagccggagcctgtggacgcaaaggagaagaagaagctcaatagaaccagaactatgagtgtgttctacaacgtggctgacttcaaggatgacgaagagataaggaagcacaaactcaagagaagggcctcagaggatgacacttacatcagcagcaaaggtaccagaagactatttgtgaaggatgtcgactggactttgaaagagttgctgcaaaacgaggacacagaccagaatttccagattacagtagaggacacaggtcctaaagttatcaaactgggtactgccaactctgcgggttataaccacatcgacatacgagggacgtatatgttgtctaatttgctacaggagttgaccatcgcccataacttcggacagaggcaactgtacttgccagaatcaaggctaaacgaaaacccagtacaccgcctgaaaagggtaatagagactcacttctgggatgggctcaccaggcggctcgatttaaacaccattggtgaggccgcccaggagaaaaaaattgatactccagaggctaagaatccaagagtttatgtaccatatgactgtcccgagatgtatgaatacttcattcaggcttcccaaatgaatccctcagtaaagctagaagtagaatatttgccaaaagacattacacccgaatacgtacaatcactgaacgaaaccccaggcttactcgcaatcgctatggataagcatgtgaacccaaccacaggtgaaacttcattagttggattcccatatgtcttcccaggtggcagatttaatgaactttacggttgggattcttacttgataaccttgggacttctcgctagtaagcgcaccgatttagccagaggaatggtagagcatttcatattcgaaatagaacattatggcaagattttgaatgcaaacaggacctactatctgtgccgctctcaaccgcctttccttactgatatggctaatgttacatttaatggaatgggcggcaataagaatccaattgcagtagatttactaaggagggcctttagagccgcaattaaggagtataaaacggtatggatggcaaaaccaagattagacgaaaagacagggctatcgtgttaccaccctgatggtgttggtataccacccgagactgaaccagagcacttcgatacaaaactaaggccatacgcaaaaaaatacaatgtgacaattccagaatttagaagaatgtacaatgccaaagaggttcatgaaccagaattagatgaattcttccttcatgaccgaggtgtgcgtgaatccggtcacgatacgacatatcgactagaaggagtctgcgcctaccttgctacaatagatctaaattctttattatacaaatatgaggttgatattgcaaacttcattaaagaattttgcaatgacaagtatgtcgatccatatgataaaagtgtaactacctctgaagattggatgaatttggctaacaagcgcaaagaaaggataaagttttatatgtgggatgaagaggccggctttttctttgactataacgtgaagactgaaaagcgtacgtcttatgagtccgcaaccacattttgggctatgtgggcaggcgttgcaagccctcaggaggctgaaattatggtcaagaaggccgttccaaaactagaaacgttaggtggtattgttgcttgtacagaaagctcgagagggcctatagcaattgataggccatatagacaatgggattatccatttggttgggctcctcatcaaatattggcctggaaaggattttcgaactatgggtacgacaacattgctagacgcttagtgtacaggtggctttacatgatgactaaagcgtttgttgactataatgggattgtggtagagaaatatgatgttaccaaagtcactgatcctcataaaattacagctgaatatggaaatcaaggagttgatttcaaaggatatgccagagaaggatttggttgggtgaactcatcctttttacttggtctgcaatatctggataaccatgccataagagctctaggtgcctgtatacctccaaaacctttcttgaacggattacgtgcgaaagaaaaagcacgttatggcctataa

SEQ ID NO: 11651 - protein, 750 aa, Candida glabrata CBS138
MPTLTFYLGADDAVDGGVKSKSMAFSDPFHKNVKVQSPEPEPVDAKEKKKLNRTRTMSVFYNVADFKDDEEIRKHKLKRRASEDDTYISSKGTRRLFVKDVDWTLKELLQNEDTDQNFQITVEDTGPKVIKLGTANSAGYNHIDIRGTYMLSNLLQELTIAHNFGQRQLYLPESRLNENPVHRLKRVIETHFWDGLTRRLDLNTIGEAAQEKKIDTPEAKNPRVYVPYDCPEMYEYFIQASQMNPSVKLEVEYLPKDITPEYVQSLNETPGLLAIAMDKHVNPTTGETSLVGFPYVFPGGRFNELYGWDSYLITLGLLASKRTDLARGMVEHFIFEIEHYGKILNANRTYYLCRSQPPFLTDMANVTFNGMGGNKNPIAVDLLRRAFRAAIKEYKTVWMAKPRLDEKTGLSCYHPDGVGIPPETEPEHFDTKLRPYAKKYNVTIPEFRRMYNAKEVHEPELDEFFLHDRGVRESGHDTTYRLEGVCAYLATIDLNSLLYKYEVDIANFIKEFCNDKYVDPYDKSVTTSEDWMNLANKRKERIKFYMWDEEAGFFFDYNVKTEKRTSYESATTFWAMWAGVASPQEAEIMVKKAVPKLETLGGIVACTESSRGPIAIDRPYRQWDYPFGWAPHQILAWKGFSNYGYDNIARRLVYRWLYMMTKAFVDYNGIVVEKYDVTKVTDPHKITAEYGNQGVDFKGYAREGFGWVNSSFLLGLQYLDNHAIRALGACIPPKPFLNGLRAKEKARYGL

SEQ ID NO: 11652 - DNA, 2385 bp, Metarhizium anisopliae var
  CDS (42)..(2255)
ggccacctccacgttcgtcagtctgcgccctcgtcataaccatggcgggaacgacaaaccaccaagcgcatggctcggatgactacaatgtgtttgacgacgcaaagacatactatgcttctgaagagcgacatcagaaccgatttggctcccggacacgtacatactctcagaacagcttgatgaagcagtttgaacgaaacggcctgcgtgaaccacacagaagaggcagccacgacgagagttctctgccccaaggccgccgattcctcatccaagtcgaccctactctcgaaagcttgcaagcacaagaagataccgatggcaatatgcaaattaccatcgaggacgaaggccccaaagtgctctccttacgaaccgcagcttctgctggccacaatcgtttcgaagtccgaggcacatatatgctctccaatctactgcaggaattgaccttggcaaaagaatacgggcggaaacaaatcgttctcgatgagggtcggctaaatgagaacccagtggatcgtctgtcccgcctgatccgtgaccacttctgggatggcctgactagacgtatcgatgcatccagtatcgaaatagccgcgcgagaccccaaggattggacagatgatcctcgaccacgaatctacgtccctgctggagtgccggagcagtatgaatactacaagcaagttgccgaggagcggcctgagattcgtctagatgtccagcagctccctgaaaagatcacacccgagctgatccgggacatgaacgagaagcccggcctactggcggtcgaaaccgaacaggttgtggaccctgaaacgggtcgaaagacgctacggggcctcccgttcgtagtacctggaggaagattcaacgaattatacggctgggacagctacatggagtcacttggcctgttggtcaacgacagggttgacttggcaaagtcaatggtgctgaacttttgcttctgcattgaacactacggaaagatactcaatgctacccgctcgtactatcttggccgatcacagcctccattcttaaccgacatggcattgcgtgtgtacgagaaaatcaagcatgaaccagacgccaaggagttcctcagacggtcgatactagccgccataaaggagtaccacagtgtctggacatgtgagccccggcttgacccggtcactggtttgtcgagatatcggccagagggtcttggtgtgcctccggaaactgaggctggccattttgtgcacattcttgagccgtatgtcaagaagcacaatatggagttcaaggagtttgttcgcgcgtacaattatggcgagatcaaagagcctgaactggatgactattttatgcacgatcgagcagtgcgagagtctgggcatgacactacatatcgattcgaaggcatttgtgccgaccttgccacaattgatctcaactcacttttgttcaaatacgaaacagacattgcgcgcacaatccgcaatgtttttgacgacaagcttgtgatcccgggcgagttctgcgataggacgccatatcagccgggagaagtgctggcttctgcagcttgggatcgacgcgcgaagcgacgcaagctcactgtcgacaagctgatgtgggacgaagaacagggtgtcttttttgattacgacactgcaaagcgggagcgatgcaactacgaaagctcaaccacgttttgggctctgtgggcgggcattgctacgccgaagcaggcagccgacatggttaagaagggcttgccgcgatttgaagcgtacggcggtctgttggctggcactgagaagtctcgaggggatatcggactcgagcgtcccaaccgacaatgggactacccatacggctgggctcctcagcagatgcttgcttggactggtctgctccggtatagcttcacagaagaggccgagcgtctggcctacaagtggctgtttatgattaccaaggcgtttgttgatttcaacggtgtcgttgtggaaaagtatgacgtgacgcgaccagccgatcctcatcgtgtggatgccgagtatggtaaccaagggctggactttaaaggtgttgccaaagaagggtttggctgggttaatgccagttatgtgtatggtctgcagattgtaaatgcccatatgcgtcgcgccttgggtactctgacaccgtacccgacgtttatcaaggcaattgaactgagtttggagaaggaattggctgatttgccgtgaatagcggcatgaagcggctcaaggtggcgggtaaagagagcgtgaaatggcattgctacagcgtgtgtgtctgtgggttccatagtagttaccgattaattgccctctcaatgaaaaaaaaaaaaaaaaa

SEQ ID NO: 11653 - protein, 737 aa, Metarhizium anisopliae var
MAGTTNHQAHGSDDYNVFDDAKTYYASEERHQNRFGSRTRTYSQNSLMKQFERNGLREPHRRGSHDESSLPQGRRFLIQVDPTLESLQAQEDTDGNMQITIEDEGPKVLSLRTAASAGHNRFEVRGTYMLSNLLQELTLAKEYGRKQIVLDEGRLNENPVDRLSRLIRDHFWDGLTRRIDASSIEIAARDPKDWTDDPRPRIYVPAGVPEQYEYYKQVAEERPEIRLDVQQLPEKITPELIRDMNEKPGLLAVETEQVVDPETGRKTLRGLPFVVPGGRFNELYGWDSYMESLGLLVNDRVDLAKSMVLNFCFCIEHYGKILNATRSYYLGRSQPPFLTDMALRVYEKIKHEPDAKEFLRRSILAAIKEYHSVWTCEPRLDPVTGLSRYRPEGLGVPPETEAGHFVHILEPYVKKHNMEFKEFVRAYNYGEIKEPELDDYFMHDRAVRESGHDTTYRFEGICADLATIDLNSLLFKYETDIARTIRNVFDDKLVIPGEFCDRTPYQPGEVLASAAWDRRAKRRKLTVDKLMWDEEQGVFFDYDTAKRERCNYESSTTFWALWAGIATPKQAADMVKKGLPRFEAYGGLLAGTEKSRGDIGLERPNRQWDYPYGWAPQQMLAWTGLLRYSFTEEAERLAYKWLFMITKAFVDFNGVVVEKYDVTRPADPHRVDAEYGNQGLDFKGVAKEGFGWVNASYVYGLQIVNAHMRRALGTLTPYPTFIKAIELSLEKELADLP

SEQ ID NO: 11654 - DNA, 1752 bp, Anopheles gambiae str
  CDS (1)..(1752)
atgtccatgctaattgtcgttcttttttctaccctctcttccctgcacagtgaaatctactgccatggggagctgctcaagacggtgcagatgagcgagatctatcccgactcgaagacgttcgtcgacatgaagatgcgcaagtcgccgaacgagacgcttgactcgttccacgagtttatggtcgcgcaggacaacagcccgtcgaaggcgaagctgaaggagtgggtggaatcgaactttgagaagcccggggctgagtttgaaaactggacgccggacgactggaccgcaagcccgaaattcctcgcgcgcatcaaggacgaagatttgcgcggtttcgcctccgaactgaataagatctggcactcgctcggccgtaagatgacgtcggatgtggcgctcaatccggacctctactcgatcatccacgtggaccatccggtaatcgtgccgggtggacggttccgcgagttctactactgggactcgtactggatcgtcaaggggctgctgctgtccgagatgtacagcaccaccaagggcatgctggagaacttcctgtcgatcatccagcggtacgggttcatcccgaacgggggccgcatctactacagcatgcgctcgcagccgccgctgctgtgcggcatggtcaagtcgtacgtcgacgccaccaacgacaccaagttcgcgatggacagcgtggaaacgctcgagcgcgagttccagttcttcatgaacaactacgtgacggaggtgaacaaccaccagctggcgacgtacggctacaagtcgagcgggccgcgccccgaatcgtaccgcgaggacgtgctgagtgcggccatcttccagcgggaggaggacaagcaggactactactgcgagctgaaggcggccgccgaaagtgggatggacttttccagccgctggttcatcaaggacggcacgaacgcgggcaacctgaccgacctgaagtgccgctcgatcgtggcggtcgagctgaacgcgatcctgtattggaacgcgctgatcattgccgagttctacggctaccggaacgacattggctcgatcgcgaagaaggaagagtacctggccaaggcggacgagctgaagaaagcgatcaatgcggtgctgtgggacgagcaggaaggggcgtggttcgattacgatctgatcaacaagaagctgcgcaagtacttcacgccgaccaacctgtcgccgctctgggtcggctgctacgatcgggaggacaaggagctgccgaagcgcatcctggcgtacatcgaccggctgcagctcgaccgctatccgggcggtgtgccgaacacgctgcaaaacaccaacgagcagtgggacttcccgaacgtgtgggccccgatgcagcacatgctcgtaatggggctcgattcgctggagaatgcggaagcgaaggagctggccttcagctgggcccagcgctgggtccgggggaactacctaacctacaacaatacgcattccatgttcgaaaagtacgatgcgcaagagctcggtggacatggcagtggtggtgagtacgaagtccagaccggcttcggctggaccaacggtgccgcaatggatctgatgaacaagtacgccgacagactgacgacagtggatgctgcggaacaaccggaagacaatggaaacggtgcgctggtagcatactccatcaataccggcattattgccacactgttagcattcttcgttggagtcttcgggtga

SEQ ID NO: 11655 - protein, 583 aa, Anopheles gambiae str
MSMLIVVLFSTLSSLHSEIYCHGELLKTVQMSEIYPDSKTFVDMKMRKSPNETLDSFHEFMVAQDNSPSKAKLKEWVESNFEKPGAEFENWTPDDWTASPKFLARIKDEDLRGFASELNKIWHSLGRKMTSDVALNPDLYSIIHVDHPVIVPGGRFREFYYWDSYWIVKGLLLSEMYSTTKGMLENFLSIIQRYGFIPNGGRIYYSMRSQPPLLCGMVKSYVDATNDTKFAMDSVETLEREFQFFMNNYVTEVNNHQLATYGYKSSGPRPESYREDVLSAAIFQREEDKQDYYCELKAAAESGMDFSSRWFIKDGTNAGNLTDLKCRSIVAVELNAILYWNALIIAEFYGYRNDIGSIAKKEEYLAKADELKKAINAVLWDEQEGAWFDYDLINKKLRKYFTPTNLSPLWVGCYDREDKELPKRILAYIDRLQLDRYPGGVPNTLQNTNEQWDFPNVWAPMQHMLVMGLDSLENAEAKELAFSWAQRWVRGNYLTYNNTHSMFEKYDAQELGGHGSGGEYEVQTGFGWTNGAAMDLMNKYADRLTTVDAAEQPEDNGNGALVAYSINTGIIATLLAFFVGVFG

SEQ ID NO: 11656 - DNA, 1752 bp, Anopheles gambiae str
  CDS (1)..(1752)
atgtccgtgctaattgtcgttcttttttctaccctctcttccctgcacagtgaaatctactgccatggggagctgctcaagacggtgcagatgagcgagatctatcccgactcgaagacgttcgtcgacatgaagatgcgcaagtcgccgaacgagacgctcgactcgttccacgaatttatggtcgcgcaggacaacagcccgtcgaaggcgaagctgaaggagtgggtggaattgaactttgagaagcccggggccgagtttgaaaactggacgccggacgactggaccgccagcccgaaattcctcgcgcgcatcaaggacgaagatttgcgcggtttcgcctccgaactgaataagatctggcactcgctcggccgtaagatgacgtcggatgtggcgctcaatccggacctctactcgatcatccatgtggaccatccggtaattgtgccgggtgggcggttccgcgagttctactactgggactcgtactggatcgtcaaggggctgctgctgtccgagatgtacagcaccaccaagggcatgctggagaacttcctgtcgatcatccagcggtacgggttcatcccgaacgggggccgcatctactatagcatgcgctcgcagccaccgctgctgtgcggcatggtcaagtcgtacgtcgacgccaccaacgacaccaagttcgcgatggacagcgtggaaacgctcgagcgcgagttccagttcttcatgaacaactacgtgacggaggtgaacaaccaccagctggcgacgtacggctacaagtcgagcgggccgcgccccgaatcgtaccgcgaggacgtgctgagtgcggccatcttccagcgggaggaggacaagcaggactactactgcgagctgaaggcggccgctgaaagtgggatggacttttccagccgctggttcatcaaggacggcacgaacgcgggcaacctgaccgacctgaagtgccgctcgatcgtggcggtcgagctgaacgcgatcctgtactggaacgcgctgatcattgccgagttctacggctaccggaacgacattggctcgatcgcgaagaaggaagagtacctggccaaggcggacgagctgaagaaagcgatcaatgcggtgctgtgggatgaggcggaaggggcctggttcgattacgatctgatcaacaagaagctgcgcaagtacttcacgccgaccaacctatcgccgctctgggtcggctgctacgatcgggaggataaggagctgccgaagcgcatcctggcgtacatcgaccggctgcagctcgaccgctatccgggcggcgtgccgaacacgctgcaaaacacgaacgagcagtgggacttcccgaacgtgtgggccccgatgcagcacatgctcgtgatggggctcgactcgctggacaatgcggaagcgaaggagctggccttcagctgggcccagcgctgggtccgggggaactacctgaccttcaacaaaacgcattccatgttcgaaaagtacgatgcgcaagagctcggtggacatggcagtggtggtgagtacgaagtccagaccggcttcggctggaccaacggtgccgcaatggatctgatgaacaagtacgccgacagactgacgacagtggatgctgcggaacaaccggaagacaatggaaacggtgcgctggtagcatactccatcaataccggcattattgccacactgttagcattcttcgttggagtcttcgggtga

SEQ ID NO: 11657 - protein, 583 aa, Anopheles gambiae str
MSVLIVVLFSTLSSLHSEIYCHGELLKTVQMSEIYPDSKTFVDMKMRKSPNETLDSFHEFMVAQDNSPSKAKLKEWVELNFEKPGAEFENWTPDDWTASPKFLARIKDEDLRGFASELNKIWHSLGRKMTSDVALNPDLYSIIHVDHPVIVPGGRFREFYYWDSYWIVKGLLLSEMYSTTKGMLENFLSIIQRYGFIPNGGRIYYSMRSQPPLLCGMVKSYVDATNDTKFAMDSVETLEREFQFFMNNYVTEVNNHQLATYGYKSSGPRPESYREDVLSAAIFQREEDKQDYYCELKAAAESGMDFSSRWFIKDGTNAGNLTDLKCRSIVAVELNAILYWNALIIAEFYGYRNDIGSIAKKEEYLAKADELKKAINAVLWDEAEGAWFDYDLINKKLRKYFTPTNLSPLWVGCYDREDKELPKRILAYIDRLQLDRYPGGVPNTLQNTNEQWDFPNVWAPMQHMLVMGLDSLDNAEAKELAFSWAQRWVRGNYLTFNKTHSMFEKYDAQELGGHGSGGEYEVQTGFGWTNGAAMDLMNKYADRLTTVDAAEQPEDNGNGALVAYSINTGIIATLLAFFVGVFG

SEQ ID NO: 11658 - DNA, 2079 bp, Neurospora crassa
  CDS (1)..(2079)
atggtatcacgattccttggggcaactgtgcccctggctgctgctattctgcctggagcccgcgcgctgtatgtcaatggctcagtaacggctccatgcgactcgccaatctattgctatggcgagcttctacaccaggtcgagctagctcgtccattctccgattcaaagaccttcgtcgatatgcccaccatcaaacccgtggatgaggtgcttgaagctttcagcaagctaaccctcccattgagcaacaactcggagctccacgaattcctcagcacctatttcggacccgctggtggcgagcttgaagcagtaccaaccgaccagctccatgtatcgccgacatttcttgacaatgtcagtgacgatgtgatcaagcaatttgtcgattcggttatcaacatctggccagacctcaccaggaaatacgtgggcgcgggcgaattatgcacgggatgcgctgacagcttcatccccgtcaaccgtaccttcgtcgtggctggtggccgcttccgtgaaccctactactgggactcgttctggattctcgaaggtcttctgcgcacggggggtgccttcaccgagatctcgaagaacattattgagaacttccttgacttggtggagcagatcggatttgttcccaacggagcaagactctactaccttgaccgctcgcagcctccactcctgacgcagatggtcaggatctatgttgaacacaccaacgatacaagcatcctcgagagagcggtgccagttctgaagaaggaatgggagtggtggacgaccaaccgcacggtcgaagtcactgcggatggaaagacatactctctccagagataccacgtcgacaacaaccaaccccgtcccgagtcttaccgtgaagattacattaccgctaacaacaactcttattatgctacctctggtatcatttacccagagacaactcctcttaatgacacccagaaagcgctgctctacgcaaacctcgccagtggcgccgagtcaggatgggactacagttctagatggctgaagaaccctggcgacgctgcccgcgacgtgtacttccctctccgctcgctcaatgtcctcgagattgtccctgttgacctcaactcgatactttaccagaatgaggtcaccatcggcaagtttctcgctcagcagggcagcaaggacgaagctgaggagtgggccaagaaagccgaagagcgcagcgaagccatgtacaagctcatgtggaactcgacgctgtggagctactttgattataacttaacatcgtcctcccaaaatatctatgtgcccgccgaccctcaagtcttccccttcgaacagcccagcggcacccccgagggctaccaggttctcttctctgtcaaccagatgttccccttctggactggtgctgccccagaccagctcaaaggcaacccattggctgtcaagcttgcctttgaacggatcaagaacttgctcgacaacaaggccggtggcattcctgctaccaactttgtcactggccaacagtgggacgagcctaacgtatggccacccctcatgcatgtcctcatggacggcctcctcaacaccccggccaccttcggcgaggatgacccggcgtatcaggagacacagactctggccctccgtcttgctcagcgttacgtcgactcgaccttctgtacctggtacgccaccggcgggtctacatcggagacgccgaagctgcaaggtctcggttccgacctcaagggcatcatgttcgagaagtactctgacaactcgaccaacgtcgctggtagcggaggcgagtacgaggtcgtggaaggcttcggctggaccaatggcgtgctgatttgggccgcggacaagtttggtgataagctcaagaggccagattgtggtgatattacccctgcgcaagtgggcaagagggccgacatcactatggagaagagggcggttgagctggatgtctttgatgccaagttcacaaagaagttcgccaggaaggggaagcttgagaagctgaaggccaagttcaagaggcgcgccgctatctag

SEQ ID NO: 11659 - protein, 692 aa, Neurospora crassa
MVSRFLGATVPLAAAILPGARALYVNGSVTAPCDSPIYCYGELLHQVELARPFSDSKTFVDMPTIKPVDEVLEAFSKLTLPLSNNSELHEFLSTYFGPAGGELEAVPTDQLHVSPTFLDNVSDDVIKQFVDSVINIWPDLTRKYVGAGELCTGCADSFIPVNRTFVVAGGRFREPYYWDSFWILEGLLRTGGAFTEISKNIIENFLDLVEQIGFVPNGARLYYLDRSQPPLLTQMVRIYVEHTNDTSILERAVPVLKKEWEWWTTNRTVEVTADGKTYSLQRYHVDNNQPRPESYREDYITANNNSYYATSGIIYPETTPLNDTQKALLYANLASGAESGWDYSSRWLKNPGDAARDVYFPLRSLNVLEIVPVDLNSILYQNEVTIGKFLAQQGSKDEAEEWAKKAEERSEAMYKLMWNSTLWSYFDYNLTSSSQNIYVPADPQVFPFEQPSGTPEGYQVLFSVNQMFPFWTGAAPDQLKGNPLAVKLAFERIKNLLDNKAGGIPATNFVTGQQWDEPNVWPPLMHVLMDGLLNTPATFGEDDPAYQETQTLALRLAQRYVDSTFCTWYATGGSTSETPKLQGLGSDLKGIMFEKYSDNSTNVAGSGGEYEVVEGFGWTNGVLIWAADKFGDKLKRPDCGDITPAQVGKRADITMEKRAVELDVFDAKFTKKFARKGKLEKLKAKFKRRAAI

SEQ ID NO: 11660 - DNA, 3036 bp, Drosophila melanogaster
  CDS (661)..(2208)
cagtcggttttctttcgtctcgccggttggtcgcacttttttttacatttatatcgaaacaacgtgcatgcgcagaaatccccacgaagatttgatttagtggaccttgatgcgacagttatcctgccagcgtatatctcgccgatataggtgtatattacaatccggtcgctttttgcgctgctgttatccaagtttctgatgtgagcagcagagctgaaaagcgcgaaattcgctgagcgaaaactatttaacaaccgtaagttgcacggtcgtgattagtctcgtggcgctgctcgaaggcaaaagaagcaaccaggcgttacggtggatcgaaattcgaataataatacggcagtgatcaaatcgagtgataaatgcaaacaacgcatattgacgtgataaacaagtggcaagaataaacaaaacattttggtcaaattgaaatcttcgcttcgcgcccgcaaccttgcgagaatctcaacatattttgcgacatcaggaaacaacagtctttgtcgcaatatggcctctccagcgaatccatcgagcaatcacaaaatgaacggaaatggtaaaatctactgcgagggcaatctgctgcacaccatccaaacggcagtgcccaaactatttgcggattcgaaaacgtttgtggacatgaagctgaacaattcgcccgacaagaccctcgaggactttaatgccatgatggaggccaagaatcagacgccaagcagtgaggatctcaagcagtttgtcgataagtacttcagtgcaccgggcaccgagcttgagaaatggacgcccaccgactggaaggagaatcccagtttcctcgacctgatctccgacccagatctgaagcaatggggcgtcgagctgaatagcatttggaaggacttgggacgcaaaatgaaggacgaggtgtcaaagaatcccgaatactactcaatcattcccgtgccaaatccagtgatcgtgcccggcggtcgtttcattgagttctactactgggactcctactggatcatccgtggacttctctacagccagatgtttgacaccgcgcgcggcatgattgagaacttcttttccattgtcaatcggttcggttttattccaaacggcggtcgagtctactaccacggtcgctcccagccgccacttctaaccggtatggtcaagtcgtacgtggacttcaccaacgatgacaagttcgccatcgatgccctggacacgctggagcacgagttcgagttctttgtgaacaaccacaatgtcacggtgaagaatcacagcctgtgtgtgtaccgcgattcgtcgtccggaccgcgaccagaatcctaccgagaggatgtggagaccggcgaggagttccccacggatgaggccaaggaactgcattacagtgaactcaaggcaggcgccgaatcgggcatggactttagctcgcgctggttcatctcaccgactggaaccaatgatggcaaccggagcgctctgagcaccacctccattgtgcccgtcgacctgaatgcctatctctactggaacgccaagttgattgccgagttccattccaaagcgggcaacaccaaaaaggtcaccgaatacgagaccaaggccgagaaactccttctgggtatccaagaagttttgtggaacgaggaggccggtgtctggttggactacgatatgattaaccagaagcctcgcgattactacacgcccaccaatctatctccactgtgggtgaaggccttcaacatttcggagtccgaaaagatatcggcttcggttatggcctacattgagaggaacaagctggacagcttccctggcggagttcccaacacgctgagctacaccggagaacagtgggatgcccccaatgtgtgggcaccgatgcagtacatcctggtcgagggcctaaacaacctgaacactcccgaggccaagaatatgtcactgaagtgggccaccaggtgggtgaagacaaactttgcggcgtttagcaaggacaggcacatgtacgagaagtacaacgccgatgagttcggagttggaggcggcggtggcgagtacgaggtacagactggattcggttggtccaacggtgtgatcatcgagtggctgagcaagcacgggcgcgacatttccattggatccggttgtggctgcctagcaggtgaaaagcggcagtagaaagaatctgtagccaggccagaacgcaatccatcagacatcattgtcagcatcatcacaggctcgaagccaaagcttattcaaaaaattgtatttagatatttgtatattattaaggctccaatcagaagcgctcatcaactgctcatccttaggctaagaaaatgctgtctctctcgctctgcgcaatctttatacctttaaaagccgctgtctataaccaatatctgtaccgcgaaccatcgacatctcgagccaagcaccacgaaccacagcaccacagttacagcaccgccaggaatcaagatctgaagtccgccatccgtcgagcatctgtgtactgtctgttgtccatgtagtaaaccacgtccagtccacgtttgcacactcgtgtgacttgtccaaattcaagaaataagaacgcaaagaacgctatctatcaagttgaggattcacgagtaatcgtatgatgggcatcgtgggcgtggcagctgtcactatagttgctctgatagcaggtcgtgttctatggtgagacaatgtgtgccaaaacaagacgtaattgctactcaagtagtgtgattcccccctccgtgtttgtgcgtgtgttgtgaagtctgtagttgctaacgtttttcgttgagtgcggagattgcagtattagtttatcattatttggtagttgaagtgagagttgtatatactgaatttatatgggcatgcccgaaattgttattacgttttaatatttagcaaatacctataccaatcctagctcctcgcaaccaaatgaagacacaaatacaattgttaacaataatttacaaa

SEQ ID NO: 11661 - protein, 515 aa, Drosophila melanogaster
MKLNNSPDKTLEDFNAMMEAKNQTPSSEDLKQFVDKYFSAPGTELEKWTPTDWKENPSFLDLISDPDLKQWGVELNSIWKDLGRKMKDEVSKNPEYYSIIPVPNPVIVPGGRFIEFYYWDSYWIIRGLLYSQMFDTARGMIENFFSIVNRFGFIPNGGRVYYHGRSQPPLLTGMVKSYVDFTNDDKFAIDALDTLEHEFEFFVNNHNVTVKNHSLCVYRDSSSGPRPESYREDVETGEEFPTDEAKELHYSELKAGAESGMDFSSRWFISPTGTNDGNRSALSTTSIVPVDLNAYLYWNAKLIAEFHSKAGNTKKVTEYETKAEKLLLGIQEVLWNEEAGVWLDYDMINQKPRDYYTPTNLSPLWVKAFNISESEKISASVMAYIERNKLDSFPGGVPNTLSYTGEQWDAPNVWAPMQYILVEGLNNLNTPEAKNMSLKWATRWVKTNFAAFSKDRHMYEKYNADEFGVGGGGGEYEVQTGFGWSNGVIIEWLSKHGRDISIGSGCGCLAGEKRQ

SEQ ID NO: 11662 - DNA, 1632 bp, Coxiella burnetii
  CDS (1)..(1632)
atgccctaccctttaccgtttcctaaaaccagggaatcaaggcctccaggacgacctccggtaaaacgataccctcaaattgaagggccgctgtttatcgtctcgcaatctcagcaagttttctctgattctaaaacctgggttgactgtattccgcgaatttcaccggctgaaattttatgccgttttcaacaagagagaacagcaccacactttaatttaattcattttatttcacagcattttgaagtgcccaacccggtggaacgtttacttgcttttgatccctctcatacaatggaaacttatattcagtcgctttggcctctgttaacctataacgccgacagtgctcagccggattattcttcgctaattccgttaccccacccctacgtcatccccggtgggcgttttcgagaaatttattattgggatagttatttcactgctgaaggacttgcctgttctgatcagctcgacctcgtgatcaatatggcaaaaaatttagcccatttaatagaaactattggtcatatccctaacggcaataggatttattatcgtagccgctcgcagccttctttctttggttgcctcattgagattatcgcgcaacatcaaggagtcgatgctataaaacccttcgtgagagcactggaaaaagaataccggttttggatggcgggagaagatcgactaacaccacaaagtcccgctcatcgacgcgtggtgctgctagacgatcagtgtgttttaaatcgctattgggataatttatcgctgccgcgtccggaatcttatcgagaagacgtgttgctttataagcaagctgcgcctttagagaaacggcatttgtatcgaaatattcgcgccgcatgcgaatcgggatgggatttctcatcgcgatggatgagagataaagagagattaacatcgatttataccaccgagcttgttccggtagatcttaatgccatactttatcacatggaaataaaactggccgattatttcgagcattttagtaatcgacgcaaagccgaattttttcaacgccgagctgaacggcgaaaacaagccattgtgcaatactgttgggacaccgataaacaattttattttgattattgttggacagaaaaagaaaaaacggcttcgttcactttagcagccgctttcccgttattttttaaattagcttcttcatttcaagcagcggcggttactgataaattaataaaagattttttttatcccggcggtttagtcactactttagatgaaagcgcccaacaatgggataaacccaatggctgggcgccgctgcattggattgctattaaagggcttcttaattacggttatgaaaccgaagccaaaataattaccgaacgttggcttgcccttaatcgtcaggtgtttcagcgcacaggaaaaatgatggaaaaatacaatgtgtgtgaccctcaccttaaagccggtggcggcgaatatccactccaagacggtttcgggtggacaaacggaatcgctgtcgccttaaatgcccttttttcccaacgttggggagagcatttgtttacgggctttgaaatacatcaggaaaggcgggagactcatcactattaa

SEQ ID NO: 11663 - protein, 543 aa, Coxiella burnetii
MPYPLPFPKTRESRPPGRPPVKRYPQIEGPLFIVSQSQQVFSDSKTWVDCIPRISPAEILCRFQQERTAPHFNLIHFISQHFEVPNPVERLLAFDPSHTMETYIQSLWPLLTYNADSAQPDYSSLIPLPHPYVIPGGRFREIYYWDSYFTAEGLACSDQLDLVINMAKNLAHLIETIGHIPNGNRIYYRSRSQPSFFGCLIEIIAQHQGVDAIKPFVRALEKEYRFWMAGEDRLTPQSPAHRRVVLLDDQCVLNRYWDNLSLPRPESYREDVLLYKQAAPLEKRHLYRNIRAACESGWDFSSRWMRDKERLTSIYTTELVPVDLNAILYHMEIKLADYFEHFSNRRKAEFFQRRAERRKQAIVQYCWDTDKQFYFDYCWTEKEKTASFTLAAAFPLFFKLASSFQAAAVTDKLIKDFFYPGGLVTTLDESAQQWDKPNGWAPLHWIAIKGLLNYGYETEAKIITERWLALNRQVFQRTGKMMEKYNVCDPHLKAGGGEYPLQDGFGWTNGIAVALNALFSQRWGEHLFTGFEIHQERRETHHY

SEQ ID NO: 11664 - DNA, 2211 bp, Magnaporthe grisea
  CDS (1)..(2211)
atgagcgaagctcctcaggcccgtcgggtagggtctgtagacgaccacagcgtctacgatgatgcaaagacgtactatacatccgaggagcggcacaacaactcgaggagcggtcctaggcagaggacgtactcgcagaacagcttgcttggtcagatggagcgattgggcctgaaggaaccattccggagaggcagtcatgacgagtccaaccacaatagacgtttcctcatccaggtcgaccccacccttgaaagcctgaaatcccaagaggataccgatgggaatatgcaaatcaccatcgaggacaacgggcccaaggttcttacgcttcgcactgcagggtccaacggccacaacagatttgacattcgtggcacttacatgctttcgaacctcctccaagagctgacgctggcacaagaatatggacgcaaacaagtcattcttgatgaggcacgtctgaacgaaaacccggtcaatcgtctgtccagattgattcgggaccacttctgggatgctcttactcgtcgcatcgatgcatctagcattgaggtagcagccaaggatcccaaagactggaccgacgaccctcggccccgcatttacgtgccaaagggggcacctgagcagcttgagtactacaaaaagttggctgcggataagcccgatatacgcctggatgtcgttgagcttcccgagactattactcccgagtatgtcgtcggcatcaacaaagccccgggtcttcttgccgtggacatggaagagactgtggaccccaagaccggggagagggtcatgagcggtcgtccattcgtcgttcctggcggtcgcttcaacgagctgtacggctgggacagctacatggagtctctcggtctccttgttaacgacaaggtctacctggccaagtccatggtcttgaacttctgcttctgtatcaagcactatggaaaaatcttgaacgccactaggtcttactacctttgccgatcccagccgccattcctcactgacatggctctgcgcgtctacgacaagattcgacacgagcctgacgcaaccgagtttcttcggaccgccatccttgctgcaatcaaggagtaccacagtgtttgggtggccgagccccgcttggacccagtcactggcctctcacgatataggcccgagggaaccggcgtgccgccggagaccgaagctgaccacttcttgcacatcttggagccttactacaagaaacacaacatgaccttcaaggagtttgtcgaagcgtacaactttggtcgcatccgagaaccggagctggacaagtacttcctgcacgaccgggccgtgcgagagtctggccacgatacttcataccgtctggagggtgtatgtgcagaccttgcgaccgttgatctcaacaccttgctgttcaagtacgaaacagacattgcgcgtaccattcgcaacgtgtttggagacaagctcgtcatcccagccgagtactgcgtcggttccctccagccaggtcaggttgagacgtcggcaatttgggaccgacgatctaagcggagaaagctcgccattgacaagtatctgtggaacgaggaggcgggtatgtacttcgactatgacactgccaagcgccagcagtgcaactacgagagctgcacgaccttttgggcgctgtgggctggcgttgcaagccccaagcaagcggctattatggtcacgcgggcactccccaagttcgaggcatacggaggtttgctttcaggcacagaggaatcaaggggccagataggactggatcgcccaaaccgtcaatgggactacccctatggctgggcgccacagcagatgcttgcctggacgggcctgtatcgctacagcttcaccgaggaggctgaaaggctggcatacaagtggcttttcatgatcaccaaagcctttagcgacttcaacggcgtcgtggtagagaagtatgacgtaacgcgccctgtggacccgcaccgcgtcgatgcggagtatggaaaccagggtcttgggttcaagggagttgcgaaggaaggattcggctgggtcaacgccagttacatctacggacttcagatcatcaatgcccacatgcgccgcgcgttggggaccctcacgccgtacgacaccttcatcaaggcacttgaggataatcgtaaccgcgctctgtcagagatggtctga

SEQ ID NO: 11665 - protein, 736 aa, Magnaporthe grisea
MSEAPQARRVGSVDDHSVYDDAKTYYTSEERHNNSRSGPRQRTYSQNSLLGQMERLGLKEPFRRGSHDESNHNRRFLIQVDPTLESLKSQEDTDGNMQITIEDNGPKVLTLRTAGSNGHNRFDIRGTYMLSNLLQELTLAQEYGRKQVILDEARLNENPVNRLSRLIRDHFWDALTRRIDASSIEVAAKDPKDWTDDPRPRIYVPKGAPEQLEYYKKLAADKPDIRLDVVELPETITPEYVVGINKAPGLLAVDMEETVDPKTGERVMSGRPFVVPGGRFNELYGWDSYMESLGLLVNDKVYLAKSMVLNFCFCIKHYGKILNATRSYYLCRSQPPFLTDMALRVYDKIRHEPDATEFLRTAILAAIKEYHSVWVAEPRLDPVTGLSRYRPEGTGVPPETEADHFLHILEPYYKKHNMTFKEFVEAYNFGRIREPELDKYFLHDRAVRESGHDTSYRLEGVCADLATVDLNTLLFKYETDIARTIRNVFGDKLVIPAEYCVGSLQPGQVETSAIWDRRSKRRKLAIDKYLWNEEAGMYFDYDTAKRQQCNYESCTTFWALWAGVASPKQAAIMVTRALPKFEAYGGLLSGTEESRGQIGLDRPNRQWDYPYGWAPQQMLAWTGLYRYSFTEEAERLAYKWLFMITKAFSDFNGVVVEKYDVTRPVDPHRVDAEYGNQGLGFKGVAKEGFGWVNASYIYGLQIINAHMRRALGTLTPYDTFIKALEDNRNRALSEMV

SEQ ID NO: 11666 - DNA, 2097 bp, Magnaporthe grisea
  CDS (1)..(2097)
atgtctcctctgtggaagacggcagcagcaattgctgttgctgcctctggatccttggtcaatgctgtgtacatcaacgggtccatcataacgccatgtgactcgctcatttactgccgcggcgagctgctcaaggaggtggaactggctcatccttttgccgactccaagacgtttgtggacatgcccacgatcaagccggtggacgaggttattgaagccttcaacaagctccagaagcctctcagtaacaacacggagcttcaggacttcctacgcgagaatttcgctcaggctggtggtgagcttgaggaggtacccaactcggaactggagacggatcctgtctttttggacaaactcgacgacacggtcatccgcgagttcgtggaaaaggtcatcgatatatggccctccctcaccagacgctacaagggcccctccaactgcgaagcttgcgccgacagcttcatccccgtcaaccgcacgttcgtcgtcgctggcggtcgattccgagagccttactattgggactcgtactggatcctcgagggtctgttgagaaccggtggcgctttcaccaacatctccaagaacaccgtggagaactttttggatcttgtagaaaccattggttttgtgcccaatggtgccaggatctactacaagaaccgttcccagccccccttgctttcccagatggttcgcatctatgtggagcataccaatgacacttccatcctgggccgtgccgtcccgctcctcatcaaagagcatgagttcttcatcaacaaccgctccatcgacgtcgaagcatccaatggcaagacatatagactgcaaagatacgccgtgacaaacacacagccccgacccgaatcttaccgagaggactacattacagccagcaataggtcctactactcaccgtcaggcattatctacccagagtctcaccagcttaacgagtccgagaaggcggttctctactctcatctcgccagtggagccgagtccggttgggactacacctcgagatggttgtcgacacccagtgatgctgttcgcgacaattacttccctctccgatcgcttaacaccaacaacatcgtgcccgttgatctcaactctatcctgtacgccaacgaggtcgcaatcgcagagttcttgaacagaactggcaacagcacaggagcttcggattggatggatcttgccaaacagcggagcgaagccatgtacgcgctgatgtggaacgagacactatggagctactttgactacaacatgacctccaagacccagaacaggttcattcctgtcgacgaggatgccgtatcgatcgagacgaacaacgccccagccggccaacaggtgtttttccacgtagcgcagtactatccgttctggaccggcgcggcgccccgtagccttaagaacaacccgctggcggtcctcagggcatacgaacgtatcgatgcataccttgacatcaagcgcggcgccataccggccaccaacctcaagactggccagcagtgggacgagcctaacgtgtggccgccgctaatgcatatcctgatggagggcctgaccagggtccccgcaacgtttggagaggacgacgtggcctggactgagatccaggacctcgcactaaggctgggtcagaggtaccttgactcaacgttctgcacttggtacgccacgggcgggtcgacgagcgagacaccgcagttgcaagggctcaatgcggaggacaagggtatcatgtttgagaagtacggcgataactcaaccaatgtcgccggttcgggaggcgaatacgaagtggtcgagggtttcgggtggacaaacggagtgctcatgtgggttgccgacaccttcaacaacaagctgacgaggccagactgcggcaacatcacggccgccaatgtgcactcggacggctcccaggcgaggaagaggggtgagatgtggagcgctctcgagatgcatccatacgacgcggcgtggaccaaggagtttggggcgaggaaggtcaggagggataaggctgaggcaagggcgttggggaacgtcatgggaggtgtttag

SEQ ID NO: 11667 - protein, 698 aa, Magnaporthe grisea
MSPLWKTAAAIAVAASGSLVNAVYINGSIITPCDSLIYCRGELLKEVELAHPFADSKTFVDMPTIKPVDEVIEAFNKLQKPLSNNTELQDFLRENFAQAGGELEEVPNSELETDPVFLDKLDDTVIREFVEKVIDIWPSLTRRYKGPSNCEACADSFIPVNRTFVVAGGRFREPYYWDSYWILEGLLRTGGAFTNISKNTVENFLDLVETIGFVPNGARIYYKNRSQPPLLSQMVRIYVEHTNDTSILGRAVPLLIKEHEFFINNRSIDVEASNGKTYRLQRYAVTNTQPRPESYREDYITASNRSYYSPSGIIYPESHQLNESEKAVLYSHLASGAESGWDYTSRWLSTPSDAVRDNYFPLRSLNTNNIVPVDLNSILYANEVAIAEFLNRTGNSTGASDWMDLAKQRSEAMYALMWNETLWSYFDYNMTSKTQNRFIPVDEDAVSIETNNAPAGQQVFFHVAQYYPFWTGAAPRSLKNNPLAVLRAYERIDAYLDIKRGAIPATNLKTGQQWDEPNVWPPLMHILMEGLTRVPATFGEDDVAWTEIQDLALRLGQRYLDSTFCTWYATGGSTSETPQLQGLNAEDKGIMFEKYGDNSTNVAGSGGEYEVVEGFGWTNGVLMWVADTFNNKLTRPDCGNITAANVHSDGSQARKRGEMWSALEMHPYDAAWTKEFGARKVRRDKAEARALGNVMGGV

SEQ ID NO: 11668 - DNA, 1920 bp, Pimpla hypochondriaca
  CDS (1)..(1758)
atggcgaaaacgacacccatggctaagccttcggtgggcctgttgaccctccaagtgttggttttttgcgcgttgaccggaagtctcgcgagcgctggcagcatcggccacgtcacacctcgatcggatctctgtgacagcgaggtctactgccagggcgaactactcaagaccatccagctgggcgaagttttcaaagatggaaaaacgttcgtcgatcattaccaagtgaacgatccatcagtcaccgttgccaacttccgaaaattgatggcggagaccggtggaaagccgaataaagatcagttgacgcagtacgtgaaggagaattttgcccaggagaacgaggtgatcgattggtcgccgccggattggcaagagaatccggaattccttcagcgcgtccaagatccggtattcaggaagtgggcgaaggacctgaacgacgtgtggaaaattatctcgaggaaggtggcgccgtccgtcgccgaacaccccgagaggcacagcataatatccgtcgacaatggattcatcgtgccgggcggcagattccaagaattctactactgggacagttactgggtcatggagggtcttctgctgaccggaatgaaaaacacgtccagaggaatcttggaaaatttcctgtcgatggtgacgcgcttcggtttcataccgaacggcggtcgcgtttactacctcatgaggagtcagccacctctgctcatccccatggtcgatctctatcttacgcacacgggtgacatgcaattcttgagggacaacatagggacgctggaaaaggaacttggttacttcttaagccagaaaacggtggacgtaaccaagaacggcaaaacttataaaatggcgcgttacattgtgagcagcaatgggccacgtcctgaaagttaccgtgaggactatgaactggcaaaaaatatcaacgacgaggccgaaaaacgtcgattctacgaggatttaaaagcggcggccgaaagcggttgggacttctcgtcgcgttggtacatttcggagaacgggacgagaggcagcctatccaatatcgctaccagaaacatcatacccgttgaactgaacgcgttcctgcaaagaaacgcccggatgctcgcgcagttccatactacccttggaaaccccacgaaagcaaagtactacaaggacatagcgacttcctatcagcaggcgatagacgacgtcttgtggagcgagtcggagggcgtctggctcgacttcgacctgcggaattcccagcatcgaaactacttcttccccaccaacgtggctccgctctacacgcagagtttcgactccagcaaggcgcagatctacggacagagggcagccgcttatctgacgaggaatggaatcctggactatatgggcggcacaccagcctcgctattccccaccggtgagcaatgggatctgccgaacgcgtggccacctctgcaatcgatcatcgttcaggccctcagaaattcgaacgaggagtccgccgagaaactggccaaggagctcgcgatccggtggctcagggcgaatcacaagggttacagtcagtctgggcaaatgttcgagaagtacgacgccctaaaccctggcaaattcggcggtggcggtgaatatgtagtgcaggagggcttcgggtggaccaacggtgtggtttatgaatttttgaacagctatcccaatgctacccccgacgataacgtccatatgaataacaactaggcggcttgaattccctgcgggattaaattgtggtgagtgaaatgattttttgtgtcgagttatcgtcgatgcgtttagtctgtaatgtaaataaaccagtattgtaagtccccattattttaagaattaaactttacacagtttaaaaaaaaaaaaaaaaaa

SEQ ID NO: 11669 - protein, 585 aa, Pimpla hypochondriaca
MAKTTPMAKPSVGLLTLQVLVFCALTGSLASAGSIGHVTPRSDLCDSEVYCQGELLKTIQLGEVFKDGKTFVDHYQVNDPSVTVANFRKLMAETGGKPNKDQLTQYVKENFAQENEVIDWSPPDWQENPEFLQRVQDPVFRKWAKDLNDVWKIISRKVAPSVAEHPERHSIISVDNGFIVPGGRFQEFYYWDSYWVMEGLLLTGMKNTSRGILENFLSMVTRFGFIPNGGRVYYLMRSQPPLLIPMVDLYLTHTGDMQFLRDNIGTLEKELGYFLSQKTVDVTKNGKTYKMARYIVSSNGPRPESYREDYELAKNINDEAEKRRFYEDLKAAAESGWDFSSRWYISENGTRGSLSNIATRNIIPVELNAFLQRNARMLAQFHTTLGNPTKAKYYKDIATSYQQAIDDVLWSESEGVWLDFDLRNSQHRNYFFPTNVAPLYTQSFDSSKAQIYGQRAAAYLTRNGILDYMGGTPASLFPTGEQWDLPNAWPPLQSIIVQALRNSNEESAEKLAKELAIRWLRANHKGYSQSGQMFEKYDALNPGKFGGGGEYVVQEGFGWTNGVVYEFLNSYPNATPDDNVHMNNN

SEQ ID NO: 11670 - DNA, 2190 bp, Leptosphaeria maculans
  CDS (1)..(2190)
atgagctcgcaatactcgaagcctcgccgaacctcgactgccctcgacccttacgctgccccccacgtctactacggcgaaagccactcgcgcaagcacattagggcgaggacctactcagcgaacttggaacattctggccgcaatgccccaatcacagatggatttccccagggtcgtcgcatcagtcacgatgaggttcctgcgcagccacgtcgctttctcgtccaagtcgagcctaccctgaagacgcttctcgcccgcgaggattcggactcgaattgccaaatcaccatcgacgacaagggtccaaaggtcatatctctgggcaccctggcctcgaatgcccacaacaaattcgacgttcgcggcacttatatgctgtccaacctgctccaggagctcaccctcgcccaggactacggccgcaagacgattgtgctggacgaagcacgcctaaatgaaaatcctgtaaaccgccttgcccgcctcattgaacattctttctgggatggccttacacgacgcatcgatggctccaatatcgccaaagtcggcgtcgaccccaaggactggacggatgacccacgcccgcgcatatacatcccccagggcgcgccagagcaacatgaatattacagtcgcatcgccagagagcatcctgagatgcgactagatgtggtttggctgcaaaaggattgcgacaatgaagagtacgtacgcgacttgaacaaggcccctggtcttctcgccatcgccatggaagagtggattgatcccgagaccaagaagaaggatttgagggggctaccctttgtcgttcctggcggtcggttcaacgaactttatggctgggacagctacatggaatcgctcggtctgctcgtcaacaaccgggtcgacttggtcaagtccatggtcattcacttttgtttctgcatcaaacactacaacaagatcctcaacgcaaaccgaacctactatctctgccgctcgcaaccgcctttcttgaccgacatggcgcttcgttgctatgaccgcatcaagcacgaaccgggcgctctggacttccttcgcgaagccatcttggcagccattaaggaataccactcggtgtggatgtcggctccccgcttggatcctgtcaccggcttgtccaggtaccgacctggtggtatgggcgtaccacccgagaccgaagcaactcacttcaagcatgttctcgatccctatgctaagaagcatggcatgacattcgaagagtttgtcgacgcatacaactatcaacgagtgcacgagcctgagctcgacaattacttcctccacgatcgggctgtacgcgagtctggtcacgacacctcgtatcgtctggaaaaggtcgctgcagatcttgctgtggtggacgtcaacgcactgctttacaagtatgaagtcgacattggacgatgtattcggaactttttcaatgatgctcttgaaattcctgccgagttctgcacaggcgacatgaagccgggccaagtggagaagtctgccgcctgggagcgccgcgctagaagacgccgtgctcaagttgacaagtacctttgggatgaggaggccggcatgtacttcgactataacaccgtcaagcagcagcgcaccggctacgagagcgccacgaccttttggcccatgtggtctggtctcgcaacaccacgacaggctagcattcttatggagaaggctttgcccaaactggaagtgtttggtggccttgtgtcgggtacagaaaagtcacgtggcaaggttggcttggatcggcctaaccgccagtgggattatccattcggttgggctccgcaacagatccttgcgtgggtcggtatgcagcgctatgggtacgatgtggaggcccagcgattggcttatcggtggctgttcatggtcacaaaagcgtttgtcgacttcaatggtgttgtcgttgaaaagtacgatgtgacgaggaagattgatccgcacaaggtggaagcagagtatggaaaccaaggaagtgatttcaagggtgttcctcgggaaggctttggctgggtcaacgcaagctacatctacggcctcacccttctcaacgcacacgagcgtcgtgcccttggagctctgactgactgggatacctatgctaaggccattgcagacctgggcctggcatga

SEQ ID NO: 11671 - protein, 729 aa, Leptosphaeria maculans
MSSQYSKPRRTSTALDPYAAPHVYYGESHSRKHIRARTYSANLEHSGRNAPITDGFPQGRRISHDEVPAQPRRFLVQVEPTLKTLLAREDSDSNCQITIDDKGPKVISLGTLASNAHNKFDVRGTYMLSNLLQELTLAQDYGRKTIVLDEARLNENPVNRLARLIEHSFWDGLTRRIDGSNIAKVGVDPKDWTDDPRPRIYIPQGAPEQHEYYSRIAREHPEMRLDVVWLQKDCDNEEYVRDLNKAPGLLAIAMEEWIDPETKKKDLRGLPFVVPGGRFNELYGWDSYMESLGLLVNNRVDLVKSMVIHFCFCIKHYNKILNANRTYYLCRSQPPFLTDMALRCYDRIKHEPGALDFLREAILAAIKEYHSVWMSAPRLDPVTGLSRYRPGGMGVPPETEATHFKHVLDPYAKKHGMTFEEFVDAYNYQRVHEPELDNYFLHDRAVRESGHDTSYRLEKVAADLAVVDVNALLYKYEVDIGRCIRNFFNDALEIPAEFCTGDMKPGQVEKSAAWERRARRRRAQVDKYLWDEEAGMYFDYNTVKQQRTGYESATTFWPMWSGLATPRQASILMEKALPKLEVFGGLVSGTEKSRGKVGLDRPNRQWDYPFGWAPQQILAWVGMQRYGYDVEAQRLAYRWLFMVTKAFVDFNGVVVEKYDVTRKIDPHKVEAEYGNQGSDFKGVPREGFGWVNASYIYGLTLLNAHERRALGALTDWDTYAKAIADLGLA

SEQ ID NO: 11672 - DNA, 1980 bp, Encephalitozoon cuniculi GB
  CDS (1)..(1980)
atgaacttcacctggtggatgagatggactcttgtccctcttaccatacatgcagcaaaaaggccatcgaagatgcccaggatggacaccaatccctgtgttagcaggaagttgcttgaggctgcattcgaaaacaaaattaccaaggacagcaaatacttagtggacaaactctttttgaaacctcctgaggaaattgatgaaatgcttagaagcatggaatctgaaggcaagttctttaggagcgaagaggatttctggaatttcgtggggatgcattctatcgagccgggatcggaattcatctttgccaaggataacgaagagcttgaagcgagcatgttcagtggtgttccggaatatgtgagtaggcttgaggaaaggctattagagcccaatccgcagagagaaagtgaagggttcaagcaaagcttagaaaccctcgttagagtttctaaagagcttaatgatgcatggaagaacctctatgtaaagcagagagatttggataagggatattactcaactatgataaaagtcaagaatccgttcgtcatccctggagatagatttaaggagtgttactactgggatacatactggataatagagggcctggtcaaaagcgggatgcacaaaattgccgtgggcatggtcgagaatttcattctcttaatagaaaagtatggattcatccctaatggaacgagaacgtactacctaaacagaacccagcctccatacttctgcatgatgctctttaccgtttatagacacgttccatggacagaggaggtggaggagattataaaaaggggactgaaggcagccgtaatggagtataactttttcatgaactacagaaaggaagagatcgagaaagatggcaagtcatatgtgcttaatgtttacagggtttctgactgcacgccaagggcagagtcctatagtgaagacagaaaggtggcggaaaataacaaaagtaaggacgaggtgtatagaagaagagaagaggacatttactcaaaccttaaggctggagcggaatcaggatgggattactcctccagatggttaggtgttcgtggagagctcgactcgataagaacttctaagagggttcccgcagacttgaatgcaataatgtatgccaacgaacttataataatgaagttatttgaagtagttgaaggcaagaggtcaaagaatgccgaggacttcaagaagaaaagcgaggagaggtacagggcaatcaatgctgttctatggagcgatgaggagggtgtgtggaacgactacgatatcgaaaaaaagaagcacacatcaccaggcttctacttctcaaatctggcgccaatgtgctatggaatcagccctccgccagacaagaacatcactgtttacgatattttgaatgcctttgcagaagagatatttggacaccctggaggaatgccagcaagcggatctaaaaacaaaaacagccccgagcagtgggattatccgaatgtatggccccctcttgtgcatataatgacgtttttcctggaaaggataggcgagcggcaaatggcattgcatctggcaaggtccctcttagaaaacatatctgtttccacatccatttccgatgtgacaaggagagggatctttgaaaaatataactgcgaaagagtcggggattctgggtacaagggcgagtatgcacctcaggttggatttggctggaccaacggatctgccatccattttctggaacacttttctttcgagcttgcttctacaaaatctcatgcagtgtcgtatcaagaaattaaggatttaatggaaaagaaggtggctagtagagaagttcccagaaaacataccccagaaaactgtcttcttctggaagataaactctgggacatagaatcgcactcggaagggcccaatagctccagcggacggcctcatcctgttgtacctactacggtatga

SEQ ID NO: 11673 - protein, 659 aa, Encephalitozoon cuniculi GB
MNFTWWMRWTLVPLTIHAAKRPSKMPRMDTNPCVSRKLLEAAFENKITKDSKYLVDKLFLKPPEEIDEMLRSMESEGKFFRSEEDFWNFVGMHSIEPGSEFIFAKDNEELEASMFSGVPEYVSRLEERLLEPNPQRESEGFKQSLETLVRVSKELNDAWKNLYVKQRDLDKGYYSTMIKVKNPFVIPGDRFKECYYWDTYWIIEGLVKSGMHKIAVGMVENFILLIEKYGFIPNGTRTYYLNRTQPPYFCMMLFTVYRHVPWTEEVEEIIKRGLKAAVMEYNFFMNYRKEEIEKDGKSYVLNVYRVSDCTPRAESYSEDRKVAENNKSKDEVYRRREEDIYSNLKAGAESGWDYSSRWLGVRGELDSIRTSKRVPADLNAIMYANELIIMKLFEVVEGKRSKNAEDFKKKSEERYRAINAVLWSDEEGVWNDYDIEKKKHTSPGFYFSNLAPMCYGISPPPDKNITVYDILNAFAEEIFGHPGGMPASGSKNKNSPEQWDYPNVWPPLVHIMTFFLERIGERQMALHLARSLLENISVSTSISDVTRRGIFEKYNCERVGDSGYKGEYAPQVGFGWTNGSAIHFLEHFSFELASTKSHAVSYQEIKDLMEKKVASREVPRKHTPENCLLLEDKLWDIESHSEGPNSSSGRPHPVVPTTV

SEQ ID NO: 11674 - DNA, 1972 bp, Mus musculus
  CDS (24)..(1649)
ccacgcgtccgaccgtgcccaggatgacctgggagctgcacctgctgcttctgctggggctgggacttaggtcccaggaggccctgccaccaccctgtgagagatctactgccatggagagctcctgcaccaagttcagatggcccagctctaccaagatgacaagcagtttgtggatatgtcactggccacatctccagatgaagtcctgcagaagttcagtgagctggccacagtccacaaccacagcatccccaaggaacagcttcaggaatttgtccagagtcacttccagcccgtggggcaggagctgcagtcctggacccctgaggactggaaggacagccctcagttcctgcagaagatctcggatgctaatctgcgtgtctgggcggaggagctacacaagatctggaaaaagctgggaaagaagggactcgtactgggtgatggaaggcctgcttctttctgagatggcctcaacagtgaagggtatgctgcagaactttctggatctggtgaagacctacggacatatccccaatggtggacgcatatattacctgcaacggagccagcccccactcctgactctcatgatggatcgatatgtagctcataccaaggatgtcgccttccttcaggagaatattgggactctagcctctgaactggacttctggactgtgaacaggactgtctctgtagtctcaggaggacaaagctatgtcttaaatcgctactatgtcccttatgggggacccaggccagagtcctacaggaaagacgcagaattggcaaactctgtgccagaaggggaccgagagactctgtgggctgagctcaaggctggggctgagtctggctgggacttctcttcacgctggcttgttggaggcccagaccctgatttgctcagcagcatccgaaccagcaaaatggtacccgctgatctgaacgcgttcctgtgccaagcagaggaactgatgagtaacttctactccagactagggaacaacacagaggccacaaagtacaggaacctgcgggcccagcgcttggccgccatggaagctgtcctgtgggacgagcagaagggtgcctggttcgactatgacttggaaaaggggaagaagaacctggagttttatccctccaacctcaccccactttgggctggctgcttctcagaccctagtgttgctgacaaggctctgaagtacttggaggacagcaagatcttgacctaccaatatggaatcccaacctctcttcgtaacacaggccagcagtgggacttccccaatgcctgggccccactgcaggacctggtcattagaggtttggccaagtcagcttccccccggactcaggaggtggctttccagctggcccagaattggatcaaaaccaacttcaaagtctactcccaaaagtcagcgatgtttgagaagtatgacatcagcaacggtggacatccaggtggaggaggggagtatgaagttcaggaaggatttggctggacaaacggattggccctgatgcttctggatcgctatggtgaccagttgacttcagggacccagttagcttccctgggaccccactgcctagtggctgcccttcttctcagtcttctgctacagtgacaagaacaagaatggactcactgcctgcgctttctcccctggccccagctcatggttcattaaacccttgctctacctcccttctagccccacccccaccctgccccttcctgctcatagtgtcctgagccaagaagtgaccaagaggtcaagactgtaattttcacggtgttctgagccaagaagtgaccaagaggtcaaggttgtaattttcacgagggcggaaactgaatcctgatacctaaagtatcctatcgggtaccaaatatagttcagacttccacactcaaaaaaaaaaaaaaaaaaaaaaaaaaaaaaaaaaa

SEQ ID NO: 11675 - protein, 541 aa, Mus musculus
MTWELHLLLLLGLGLRSQEALPPPCERSTAMESSCTKFRWPSSTKMTSSLWICHWPHLQMKSCRSSVSWPQSTTTASPRNSFRNLSRVTSSPWGRSCSPGPLRTGRTALSSCRRSRMLICVSGRRSYTRSGKSWERRDSYWVMEGLLLSEMASTVKGMLQNFLDLVKTYGHIPNGGRIYYLQRSQPPLLTLMMDRYVAHTKDVAFLQENIGTLASELDFWTVNRTVSVVSGGQSYVLNRYYVPYGGPRPESYRKDAELANSVPEGDRETLWAELKAGAESGWDFSSRWLVGGPDPDLLSSIRTSKMVPADLNAFLCQAEELMSNFYSRLGNNTEATKYRNLRAQRLAAMEAVLWDEQKGAWFDYDLEKGKKNLEFYPSNLTPLWAGCFSDPSVADKALKYLEDSKILTYQYGIPTSLRNTGQQWDFPNAWAPLQDLVIRGLAKSASPRTQEVAFQLAQNWIKTNFKVYSQKSAMFEKYDISNGGHPGGGGEYEVQEGFGWTNGLALMLLDRYGDQLTSGTQLASLGPHCLVAALLLSLLLQ

SEQ ID NO: 11676 - DNA, 2074 bp, Caenorhabditis elegans
  CDS (23)..(2047)
ggtttaattacccaagtttgagatgagagagactctcttagctatcctattaatagtttacgtttctgcaagaccacaaaaagatccaagagggccgaatatcatagacgataatgccgattttggaacaccagagcatgacaatcgagtacataccgagctaacgcaattgaccgataaggaagtcgctcagttgattggatccgactattttaatggaagtgttctaccatgtgataatgaaacagcgcctggacaatggatgatctactgtagtggtaaacttctacagactgtcatggccgtccaattgtatccggattccaagacttttgtggatcagccaatgaaagaaaatcaaactggaaagtctattatggagcattttgaaaaacgtttccctgtttctattgagaagataaccaagaaagatgttgccgaatttgttgatgaatttttcgataaagaaggcaacgagttagatgtttgcgatcttcctgactggaggcccattacagaacaattggctaatatcaaagatgctagctatcaggcctttgctcaacgacttcatttcatttggattcaactttgccgccagataaagccagaagtgaaaaatgatccatctcgtttctctctcatttatgtgccatatcagttcatccttcctggaggaaggttccgtgaattctactattgggatgcatattggatactcaaagggttaatcgcgtctgaactgtattcaactgcaagaatgatgatattgaacttcgcacatataattgaaacgtatggttttgtgccgaacggaggccgagtttattaccttcgaagatctcagccaccgtttttcgcaccaatggtatacgagtattacttggcaactcaggacattcaactagtagcagatttgataccagttatcgaaaaagagtacacattttggagtgaaagaagaactgttaatgtgacctatgagcatccggacttgaatgaaacacttcacatgttccagtacagaacagaggctgaaactccaagacctgaaagtttcagagaggatgtactgagtgcagaacattttacaacaaaggataggaagaagcagtttttcaaagacttgggaagtgcggcagaaagcggatgggacttttcgagtagatggtttaaaaatcataaagatatttcaactattgagacaactaatatagtaccagtggatttgaatgcctttctttgctacaacatgaacattatgcaattgttctataaacttaccggaaaccccttgaaacatttggagtggtcatctcgttttacaaacttccgtgaagcattcacaaaggtattctacgtaccggctcgaaaaggatggtacgactataatcttcggacactcacccacaatactgacttcttcgcatccaatgctgtacctctattctcgcagtgctacgacccactgaactctcagattgcagtggatgtgtacaatgaaatgcagaattctggggcgttctcaatacccggcggaattccaacaagtatgaacgaggagacgaaccagcaatgggatttcccaaatggttggagtccaatgaatcatatgatcattgaaggacttcgcaagtctaacaatccaattctacaacaaaaggcgtttactcttgctgagaaatggctggagactaatatgcaaacattcaatgtttccgatgaaatgtgggagaaatataatgtaaaggagccactgggaaagttggcgactggtggagaatacgaagttcaggccggattcggttggaccaatggtgcagcactggatttaattttcacatattccgatcgactacagtataacgggccgatattagaatcattggtcggatcacaaacgacgtctatgaaatcgtcaccagattcgtcgacatctctaccaattgatatcaccactaccatcacgacatcatcatcatcctctactttcgggtacagtaacattctcacacttattacggtgtttgtattatatattttatagattcgattgtttttataggaattatta

SEQ ID NO: 11677 - protein, 674 aa, Caenorhabditis elegans
MRETLLAILLIVYVSARPQKDPRGPNIIDDNADFGTPEHDNRVHTELTQLTDKEVAQLIGSDYFNGSVLPCDNETAPGQWMIYCSGKLLQTVMAVQLYPDSKTFVDQPMKENQTGKSIMEHFEKRFPVSIEKITKKDVAEFVDEFFDKEGNELDVCDLPDWRPITEQLANIKDASYQAFAQRLHFIWIQLCRQIKPEVKNDPSRFSLIYVPYQFILPGGRFREFYYWDAYWILKGLIASELYSTARMMILNFAHIIETYGFVPNGGRVYYLRRSQPPFFAPMVYEYYLATQDIQLVADLIPVIEKEYTFWSERRTVNVTYEHPDLNETLHMFQYRTEAETPRPESFREDVLSAEHFTTKDRKKQFFKDLGSAAESGWDFSSRWFKNHKDISTIETTNIVPVDLNAFLCYNMNIMQLFYKLTGNPLKHLEWSSRFTNFREAFTKVFYVPARKGWYDYNLRTLTHNTDFFASNAVPLFSQCYDPLNSQIAVDVYNEMQNSGAFSIPGGIPTSMNEETNQQWDFPNGWSPMNHMIIEGLRKSNNPILQQKAFTLAEKWLETNMQTFNVSDEMWEKYNVKEPLGKLATGGEYEVQAGFGWTNGAALDLIFTYSDRLQYNGPILESLVGSQTTSMKSSPDSSTSLPIDITTTITTSSSSSTFGYSNILTLITVFVLYIL

SEQ ID NO: 11678 - DNA, 2496 bp, Artemia sanfranciscana
  CDS (256)..(2367)
gtgagaacactgtatacaatacttctcttgtatcagattgttcgcccgctcaacatctttgtgatatttctatatagaagtgatattcgattctctttccagagatgaacatcaggatttcaaggaggaaatgaaaagattgcgcagactcagaggaaaaggtccaccaaagaaaggagaaggcaaacgtgcaagtaaaaagtgaacttttgttagtgactcttgaaaagaataaaagatattttatcactaaacatgtgcgcatttttgagttttttcgtcgtttttggatttgctacaacagttagttgtagaggcgatctggttctcagtgaaagagcaaaacaactaccgcctgtttgtgctagcgaaatttactgccatggaacattcctgcatacaatacagatggcagggctgtttcgagactcgaaaacctttgtagataaaaagctaaagataaatccagaagaagttttagctagctttgaagttttgatgaactcaaccgatcaaaatcccagccgggaccaattggctgcttttataaatctacacttcgagccagaagggtcagaatttgaagaatgggatccaatagattggcattctaacccaagttttttggatggtattagagacacgaacttgaaaatatggggaaattctctccacgaagcctggacatggttaggtcgaaaaatccgtgacgacgtgagaataaatccccaattatattcgatgatgtatctccccaaccctttcatcattcctggtggtcgtttccgtgaaacttactactgggattcctattggattatcaaagggcttcttatctcgggaatgcatgagacggtgaagggtatgttgttgaactttttgctgatggtggataccattggccttgtacccaatggtggaaggatatattatgagaaacgatctcagcctccacttcttactccaatggtggaactttacgttaatgctacgggagacattgaatttttaaagcaaaacattcacctgttggaaaaagagatggatttttggcttcaggagcgaacggtcaacgttgatgggcaccggcttatccgttacgatgttaaagttggcggtccccgacctgaatcttacaaggaagatatagaagcaattcatcataaccctgatttagaagcacaattggatttctatatgaacatagcagctggtgctgaaacaggatgggatttctcaagccgatggtattggaacggggatatacaaactaatttgtcacatgttcgaacccgtgacatactacctgtagacctgaattcttttattgcttgggactttgatattatgtcccgctttgaaaagcagttaggtcgagacaacgcatcagttgtctattctgatttatacagtgaatggaaaacgtcgattaatgccattttgtgggatgatgaagctggtagctggtttgattacgattctgcgcatcggagatggaacacgaacttttatgtttctaatttgactcccttattcgtaggatgttacgatccgaaaacagttcatcatgaagacgttgccaccagagtactcgattaccttgaaaaaagtaacgccttgaagtttcctggtggtgtaccaacatcattgatgcagacaagccaacaatgggactttcctaatggctggcctcctctccagcacatgctggttatgggacttgacaagaccggtgatccaagggccaaagaactggcttttgacgttgcgcagagatgggttttcaataattatgaagcgttcacgcaaagcttacctaatgccatgtttgaaaagtatgacgtaacggtcgttggcctccccggtggtgggggagagtacgacgttcaactaggttttggctggacaaatggtgtagtaatggactttttagttaaatacggtgagagattgacttcagtccgtgacgcaaaacaactaatttggagtccatcatcagtttcagttggagttggtgctggtgcaacgttcctcggtgcttggattggtcttgcaagtactcgattctatcgccaacttttcaagtccgaccacaaaatgggaggcatccatggtgtggctgaggcaattcaaggacttattgcctgtgttggttctctgctcgtggctactgcagcactttttagtgaaaaggatacgacgaaacgacctacctctggacagacccctcagtccagcccaataaggagaacaaaatcgttacccggcttcttattgttccaacgaggaagtaaaggcgacgaagagcatctcttaaggaaccgcgcaattagtgaagaatgttcgtattcttctatagaagaatgatgaaggagactttaggtggatacaattttcttcatattgctaggaaatgccagaagttcaaattaatattcattgtaaattttcgagtgtgatattttcttagtaaagcggtttcttcataaaaaaaaa

SEQ ID NO: 11679 - protein, 703 aa, Artemia sanfranciscana
MCAFLSFFVVFGFATTVSCRGDLVLSERAKQLPPVCASEIYCHGTFLHTIQMAGLFRDSKTFVDKKLKINPEEVLASFEVLMNSTDQNPSRDQLAAFINLHFEPEGSEFEEWDPIDWHSNPSFLDGIRDTNLKIWGNSLHEAWTWLGRKIRDDVRINPQLYSMMYLPNPFIIPGGRFRETYYWDSYWIIKGLLISGMHETVKGMLLNFLLMVDTIGLVPNGGRIYYEKRSQPPLLTPMVELYVNATGDIEFLKQNIHLLEKEMDFWLQERTVNVDGHRLIRYDVKVGGPRPESYKEDIEAIHHNPDLEAQLDFYMNIAAGAETGWDFSSRWYWNGDIQTNLSHVRTRDILPVDLNSFIAWDFDIMSRFEKQLGRDNASVVYSDLYSEWKTSINAILWDDEAGSWFDYDSAHRRWNTNFYVSNLTPLFVGCYDPKTVHHEDVATRVLDYLEKSNALKFPGGVPTSLMQTSQQWDFPNGWPPLQHMLVMGLDKTGDPRAKELAFDVAQRWVFNNYEAFTQSLPNAMFEKYDVTVVGLPGGGGEYDVQLGFGWTNGVVMDFLVKYGERLTSVRDAKQLIWSPSSVSVGVGAGATFLGAWIGLASTRFYRQLFKSDHKMGGIHGVAEAIQGLIACVGSLLVATAALFSEKDTTKRPTSGQTPQSSPIRRTKSLPGFLLFQRGSKGDEEHLLRNRAISEECSYSSIEE

SEQ ID NO: 11680 - DNA, 1986 bp, Oryza sativa
  CDS (27)..(1718)
ctgtccccttactccggccgattcacatggcgcccaccgccgcggttgccgggggtggcgtggaggcggaggcgctgctggggctgctgcagcgggtgcagtcggaggcgctgcgggcgttcgggccgaacgacttcgaccccaagctctacgtcgacctgccgctcgccgccgacgccagcgcggcggccgcgctggcgtcgctgccgcgggcggcgccgtcgaggggcgagatggaggcctacatctcgaggtacttcgcgctggccgggtccgacctcgtcgccgccgccgacccgccggacttcgagcgcgacccccccgggttcctgcccagggtggagcgcgccgaggcgcgggcctgggcgctggaggtgcacgcgctgtggaaggacctgacgcggcgggtggcgccggccgtcgcggcgcgccccgaccggcacacgctgctgccgctccccggcagggtggtcgtgccgggctccaggttccgggaggtctactactgggactcctactgggtcgtcagaggtttactggtgagcaaaatgtatgagacggcaaaggatatcgtgcttaatcttgtgtatcttgttgagaaatatggttttgttctgaacggggcaagatcgtactacactaaccgaagccagccaccacttttaagctccatggttttagacatatacatggcaactggtgatatggcttttgtgaggagggtatttccctcactgctgaaagagcatagtttctggatgtcagaggttcacaatgtggcagtaatggacaatcatggacgggtacataatttgagtcgctaccaggctatgtggaacaaacctaggccagaaagtgcaacaattgatgaggaatttgcttcaaaactttctacggctgctaaagaaaaattctaccaccaagttgcttctacagctgaaacaggatgggattttagctctcgatggatgagggattctactgacatgacaactctgacaacatcttgcataatacctgtggacttgaacacattcatattgaagatggaacaggacatagctttctttgctaaactcattggagagagcacaacatcagaaatattttcagaggcttcaaaagcacgccataatgcaattgattctgttctgtggaacgctgacatggagcaatggcttgactactggcttcctactgatggaaactgccagggagtctaccaatggaaatctatctcacagaaccgcgccatctttgcttctaattttgtacctttgtggttaaatgctcaacattcaggcttggagcaatttgtcgatgaggcaaaatcagtgagagtcatgagaagcctccagaaatcaggattactgcaacctgcaggaatcgcaacttccttatcaaacacagggcaacaatgggattttccaaacggatgggccccgttgcagcatctgatagtcgagggattgttgaggtctggttcaggagaggcaagggaacttgctgaggacattgccacgaggtgggtgagaacaaactatgatgcctataaggctaccggcgcgatgcatgagaagtacgatgtggtgacctgtggaaaatctggaggtgggggtgaatacaaaccccagactggttttggttggtccaacggtgtgatattatcattcttggatgaatttggatggcctcaggacaagaagatagactgctagtcatcatgatgaatgttaaaccccatcttcgcagatgcagaatgtggctaggctaggcaggtgtttttgtgtgcaactgtatatacacggctgtgcattacacgcaaagttgaagaggcattctgcaattctgctgtagtttttatctgacaaacatttgcattcagatttcagagcatcacccgcaactgtgtttttttttctttttttgtaacttgccctttgctgtaactcgtatcaaagctcaaagcaagaagaatcttcatgt

SEQ ID NO: 11681 - protein, 563 aa, Oryza sativa
MAPTAAVAGGGVEAEALLGLLQRVQSEALRAFGPNDFDPKLYVDLPLAADASAAAALASLPRAAPSRGEMEAYISRYFALAGSDLVAAADPPDFERDPPGFLPRVERAEARAWALEVHALWKDLTRRVAPAVAARPDRHTLLPLPGRVVVPGSRFREVYYWDSYWVVRGLLVSKMYETAKDIVLNLVYLVEKYGFVLNGARSYYTNRSQPPLLSSMVLDIYMATGDMAFVRRVFPSLLKEHSFWMSEVHNVAVMDNHGRVHNLSRYQAMWNKPRPESATIDEEFASKLSTAAKEKFYHQVASTAETGWDFSSRWMRDSTDMTTLTTSCIIPVDLNTFILKMEQDIAFFAKLIGESTTSEIFSEASKARHNAIDSVLWNADMEQWLDYWLPTDGNCQGVYQWKSISQNRAIFASNFVPLWLNAQHSGLEQFVDEAKSVRVMRSLQKSGLLQPAGIATSLSNTGQQWDFPNGWAPLQHLIVEGLLRSGSGEARELAEDIATRWVRTNYDAYKATGAMHEKYDVVTCGKSGGGGEYKPQTGFGWSNGVILSFLDEFGWPQDKKIDC

SEQ ID NO: 11682 - DNA, 2123 bp, Glycine max
  misc_feature (2095)..(2095): n is a, c, g, or t
  CDS (134)..(1807)
aaagaaatgatatttgtattgaagcaataataaaccaatgacaacagagttggggtagaactagaaagcatccctagcaaaagtcaaggttggccccttgcgtcaatcgccggcttcgaaatcgctgtcaattatggcatcacactgtgtaatggccgtgacgccctcaacccctcttctctccttcctcgaacgcctccaagaaacagccttcgaaaccttcgcccattccaacttcgatcccaaaacctacgtggacatgcctctcaagtccgccctcacgattaccgaggacgcgttccagaagcttccgaggaacgccaacgggtccgtgccggttgaggatttgaagcgtttcatagaagcctactttgaaggtgcaggggatgatctggtgtaccgggacccacaggatttcgttcccgagccggagggtttcttgcccaaggtgaaccaccctcaggttagggcctgggccttgcaggtccattcactttggaaaaacttgagccggaaaatatccggtgcggtgaaggcacagccagacttacatacgctgctccctctccctggttcggttgtcattcccgggtcgcgttttcgcgaggtttattactgggattcctattgggttattaggggcctgctggccagtcaaatgcatgacacagctaaggctattgtcaccaatctcatttccttgatagataaatatggctttgttcttaatggggctagagcttactacactaacaggagccagcctccccttttaagcgccatgatttatgagatatacaatagcacgggtgacgtggaattagttaaaagatctctacctgccttactgaaagaatatgaattttggaattcagatatacataaactgaccattttggatgctcaaggttgcactcataccttaaatcgttattatgcaaagtgggacaaacccaggccggaatcgtccataatggacaaggcatctgcttccaacttctccagtgtttcagaaaaacagcagttttaccgtgaactggcatcagctgctgaatcaggatgggatttcagcaccagatggatgagaaatccacctaatttcacaacattggctacaacatctgtaatacctgttgatttgaacgcatttctactcgggatggaacttaatattgccttatttgcaaaagttactggagataatagcactgctgaacggttcctggaaaattctgatcttagaaagaaggcaatggactctattttctggaatgcaaacaagaaacagtggcttgattactggctcagcagtacatgtgaggaggttcatgtttggaaaaacgagcatcagaatcaaaatgtatttgcttccaattttgttcctttgtggatgaagccattttactcagatacttcgcttgtgagtagtgttgttgaaagtctcaaaacatctggcctgctccgtgatgctggagttgcaacttctttgactgattcagggcaacagtgggactttccaaatgggtgggcgccgcttcaacacatgctagtggaaggactgctaaaatcaggattgaaagaagcaaggttattggctgaggaaattgccatcagatgggtcacaaccaattatattgtttataagaaaacaggtgtaatgcatgaaaagtttgacgtggagcattgtggagaatttggaggtgggggcgaatatgtaccccagactggttttggctggtcaaatggagttgtgttggcattcttggaggagtttggatggcctgaagatcggaacatagaatgttgatgtgcccagagatagaaaggtggaaaaaatttggtacgctgcaagaatttattcatgaaagctatttgcatgaggggttgaagaaaagtagttaataaatgcgtcaaaagccacttgttaaagcctataatgaaagttgagatgatttgagtttattactttatttgccatttgatgttttacttggaagtatgttcagaaaattcaacaaaagtgatggatgtcatcacatatcaatgctttggcacaaattgatgcataattggaccatttgatgtgagttgcttnatatactggcgtctgacgggattaaaga

SEQ ID NO: 11683 - protein, 557 aa, Glycine max
MASHCVMAVTPSTPLLSFLERLQETAFETFAHSNFDPKTYVDMPLKSALTITEDAFQKLPRNANGSVPVEDLKRFIEAYFEGAGDDLVYRDPQDFVPEPEGFLPKVNHPQVRAWALQVHSLWKNLSRKISGAVKAQPDLHTLLPLPGSVVIPGSRFREVYYWDSYWVIRGLLASQMHDTAKAIVTNLISLIDKYGFVLNGARAYYTNRSQPPLLSAMIYEIYNSTGDVELVKRSLPALLKEYEFWNSDIHKLTILDAQGCTHTLNRYYAKWDKPRPESSIMDKASASNFSSVSEKQQFYRELASAAESGWDFSTRWMRNPPNFTTLATTSVIPVDLNAFLLGMELNIALFAKVTGDNSTAERFLENSDLRKKAMDSIFWNANKKQWLDYWLSSTCEEVHVWKNEHQNQNVFASNFVPLWMKPFYSDTSLVSSVVESLKTSGLLRDAGVATSLTDSGQQWDFPNGWAPLQHMLVEGLLKSGLKEARLLAEEIAIRWVTTNYIVYKKTGVMHEKFDVEHCGEFGGGGEYVPQTGFGWSNGVVLAFLEEFGWPEDRNIEC

SEQ ID NO: 11684 - DNA, 2819 bp, Drosophila melanogaster
  CDS (201)..(1991)
agtattcttgcgctgactggcgctggttgtgcttgtgttgttcagtttgagttctgggatcgcgagcatatcctgtgcgccaaaggatatacagcatatatcaggatatatcagcagcctcagcaacgtatttcgtattttcattcacgcagattgaaagttcgttgctttattagccgcgtgaattgtccagtgaaagtatgttcaagctaccgaccatcagcctgctcctcgtgagctggagttgcctggtggccttgtcccaggccaagacctacagcctgcccgatctcaccaccgactataacaatgccattcccgtcgacgaggaggaggcacaggatccgttcgccagctgtaaaatctactgcgagggcaatctgctgcacaccatccaaacggcagtgcccaaactatttgcggattcgaaaacgtttgtggacatgaagctgaacaattcgcccgacaagaccctcgaggactttaatgccatgatggaggccaagaatcagacgccaagcagtgaggatctcaagcagtttgtcgataagtacttcagtgcaccgggcaccgagcttgagaaatggacgcccaccgactggaaggagaatcccagtttcctcgacctgatctccgacccagatctgaagcaatggggcgtcgagctgaatagcatttggaaggacttgggacgcaaaatgaaggacgaggtgtcaaagaatcccgaatactactcaatcattcccgtgccaaatccagtgatcgtgcccggcggtcgtttcattgagttctactactgggactcctactggatcatccgtggacttctctacagccagatgtttgacaccgcgcgcggcatgattgagaacttcttttccattgtcaatcggttcggttttattccaaacggcggtcgagtctactaccacggtcgctcccagccgccacttctaaccggtatggtcaagtcgtacgtggacttcaccaacgatgacaagttcgccatcgatgccctggacacgctggagcacgagttcgagttctttgtgaacaaccacaatgtcacggtgaagaatcacagcctgtgtgtgtaccgcgattcgtcgtccggaccgcgaccagaatcctaccgagaggatgtggagaccggcgaggagttccccacggatgaggccaaggaactgcattacagtgaactcaaggcaggcgccgaatcgggcatggactttagctcgcgctggttcatctcaccgactggaaccaatgatggcaaccggagcgctctgagcaccacctccattgtgcccgtcgacctgaatgcctatctctactggaacgccaagttgattgccgagttccattccaaagcgggcaacaccaaaaaggtcaccgaatacgagaccaaggccgagaaactccttctgggtatccaagaagttttgtggaacgaggaggccggtgtctggttggactacgatatgattaaccagaagcctcgcgattactacacgcccaccaatctatctccactgtgggtgaaggccttcaacatttcggagtccgaaaagatatcggcttcggttatggcctacattgagaggaacaagctggacagcttccctggcggagttcccaacacgctgagctacaccggagaacagtgggatgcccccaatgtgtgggcaccgatgcagtacatcctggtcgagggcctaaacaacctgaacactcccgaggccaagaatatgtcactgaagtgggccaccaggtgggtgaagacaaactttgcggcgtttagcaaggacaggcacatgtacgagaagtacaacgccgatgagttcggagttggaggcggcggtggcgagtacgaggtacagactggattcggttggtccaacggtgtgatcatcgagtggctgagcaagcacgggcgcgacatttccattggatccggttgtggctgcctagcaggtgaaaagcggcagtagaaagaatctgtagccaggccagaacgcaatccatcagacatcattgtcagcatcatcacaggctcgaagccaaagcttattcaaaaaattgtatttagatatttgtatattattaaggctccaatcagaagcgctcatcaactgctcatccttaggctaagaaaatgctgtctctctcgctctgcgcaatctttatacctttaaaagccgctgtctataaccaatatctgtaccgcgaaccatcgacatctcgagccaagcaccacgaaccacagcaccacagttacagcaccgccaggaatcaagatctgaagtccgccatccgtcgagcatctgtgtactgtctgttgtccatgtagtaaaccacgtccagtccacgtttgcacactcgtgtgacttgtccaaattcaagaaataagaacgcaaagaacgctatctatcaagttgaggattcacgagtaatcgtatgatgggcatcgtgggcgtggcagctgtcactatagttgctctgatagcaggtcgtgttctatggtgagacaatgtgtgccaaaacaagacgtaattgctactcaagtagtgtgattcccccctccgtgtttgtgcgtgtgttgtgaagtctgtagttgctaacgtttttcgttgagtgcggagattgcagtattagtttatcattatttggtagttgaagtgagagttgtatatactgaatttatatgggcatgcccgaaattgttattacgttttaatatttagcaaatacctataccaatcctagctcctcgcaaccaaatgaagacacaaatacaattgttaacaataatttacaaa

SEQ ID NO: 11685 - protein, 596 aa, Drosophila melanogaster
MFKLPTISLLLVSWSCLVALSQAKTYSLPDLTTDYNNAIPVDEEEAQDPFASCKIYCEGNLLHTIQTAVPKLFADSKTFVDMKLNNSPDKTLEDFNAMMEAKNQTPSSEDLKQFVDKYFSAPGTELEKWTPTDWKENPSFLDLISDPDLKQWGVELNSIWKDLGRKMKDEVSKNPEYYSIIPVPNPVIVPGGRFIEFYYWDSYWIIRGLLYSQMFDTARGMIENFFSIVNRFGFIPNGGRVYYHGRSQPPLLTGMVKSYVDFTNDDKFAIDALDTLEHEFEFFVNNHNVTVKNHSLCVYRDSSSGPRPESYREDVETGEEFPTDEAKELHYSELKAGAESGMDFSSRWFISPTGTNDGNRSALSTTSIVPVDLNAYLYWNAKLIAEFHSKAGNTKKVTEYETKAEKLLLGIQEVLWNEEAGVWLDYDMINQKPRDYYTPTNLSPLWVKAFNISESEKISASVMAYIERNKLDSFPGGVPNTLSYTGEQWDAPNVWAPMQYILVEGLNNLNTPEAKNMSLKWATRWVKTNFAAFSKDRHMYEKYNADEFGVGGGGGEYEVQTGFGWSNGVIIEWLSKHGRDISIGSGCGCLAGEKRQ

SEQ ID NO: 11686 - DNA, 2265 bp, Kluyveromyces lactis
  CDS (1)..(2265)
atggatggcaaagtaaataataacccaccacgttctagacatagaagaacttcttcattagaagaagtagtggatcctttttccactcctgatgtgtattatgggccaaaaagtgatccttcaaagcttttgagcaaaaataggtttacccgtactagaacatttagtgttgcggaacccggtggtggtaagggacattcttcgtcttatacttccccttatttcgatactacagtgcctctacggcgtagaggctctgaagacgattcgtatagtgcaagtcaaggtcagagaagattttacatcgaggatgtggataagacgctaaaggagttgttagccagtgaggataccgatgggaactaccaaattactatagaggatactggtccaaaagttatcagggttggtactgtaaattcgaacggttacaagcatgtgcatattaggggtacctatatgctttcaaaccttttgcaagagttgactttagccaaacttttcaataggaaacaggttatcttggatgaggcaagattgaatgaaaatccagttaacaggatgacaagactgattagtggtcaattttggaaatcattgacaagaagaattgactctaacaatatcgcaaagattgcgtacgacaccaagatcgatacaccaaaggcgaaaaaccctagaatctatgtcccatacaattgccaagatgaatatcaacaattggtccaatggtctgaaatggacccatcgttacaacttgaagtcaattatttgccaaaggacattactcctgaatttgtgaaatccctaaatgataaaccggggcttttatgtttggcaatggaatcgcatatggatccagtcactggtgaggaaacgtgggttgggtttccttatgcggttcctggtggtcgttttaatgaactttatgggtgggattcctatttcatggcattaggtctcttagagagtaacaaattggatgttgccagaggtatggttgaacacttcatcttcgaaattgatcactatgggaaaatcttgaatgctaacagatcgtactatttatgtagatcacagccacccttcctaacagatatggcactacaggtgtgtaggaagatgggtggagataaaaacccggtagctgttgatctattgagaagggcctttaaagcggctatcaaagaatatttaactgtttggacggctagtccaagactagatgaaaagacaggtctttcgtgttatcatcctgatggtattggtattccaccagagacagagcctggtcactttgactccattttgaggaaatatgctgaaaaatacaatgtctccatacctgaattcagagatctttacaattcacagaaggttcacgaaccagatttggatgttttcttcttacatgatcgtggtgtaagagaaagtggtcatgacaccacgtataggtttgaaaatgtttgtgcttatctagccacgattgatttgaattcgttgttatataagtatgaagtggacattgcctatgttatcaagaaatactttggggataatttcgaaggattgccagaaggtcatagaacttctaacgactgggagaagttggctgaagttagaaaggaaagaattgacaaatatctatgggatgaagaaactggtttctactacgactataatgtaaagactgagaaaagaacgagttatgaatcagttacaacattctgggccctttgggcggggatgtcttcacaggagcaagcacaaagaatggttgagaatgccttgccaaaacttgaggagttcggtggattggtagcatgtactgcgcgctcccgtggtgagctcagtttggatagaccaacaagacagtgggactatccattcggttgggctccacatcagatattggtttgggatggtctagtccgttatggttatgaaaatcacactagacgccttgcttatagatggttgttcttaatgacaaaagcattcgtcgattataacgggattgtcgttgaaaaatacgacgtcacaaggggtacagaccctcacagagttgatgctgaatatggtaatcaaggtgcagactttaaaggtgttgctactgagggcttcggatgggtgaattcaagttacctgttaggaatgaagtatatgaataattttgccagaagggcattaggtacttgcgtcactccaaaagtattctttggaagactaccaccaaaagaaaagaagaaatatggtttagaatga

SEQ ID NO: 11687 - protein, 754 aa, Kluyveromyces lactis
MDGKVNNNPPRSRHRRTSSLEEVVDPFSTPDVYYGPKSDPSKLLSKNRFTRTRTFSVAEPGGGKGHSSSYTSPYFDTTVPLRRRGSEDDSYSASQGQRRFYIEDVDKTLKELLASEDTDGNYQITIEDTGPKVIRVGTVNSNGYKHVHIRGTYMLSNLLQELTLAKLFNRKQVILDEARLNENPVNRMTRLISGQFWKSLTRRIDSNNIAKIAYDTKIDTPKAKNPRIYVPYNCQDEYQQLVQWSEMDPSLQLEVNYLPKDITPEFVKSLNDKPGLLCLAMESHMDPVTGEETWVGFPYAVPGGRFNELYGWDSYFMALGLLESNKLDVARGMVEHFIFEIDHYGKILNANRSYYLCRSQPPFLTDMALQVCRKMGGDKNPVAVDLLRRAFKAAIKEYLTVWTASPRLDEKTGLSCYHPDGIGIPPETEPGHFDSILRKYAEKYNVSIPEFRDLYNSQKVHEPDLDVFFLHDRGVRESGHDTTYRFENVCAYLATIDLNSLLYKYEVDIAYVIKKYFGDNFEGLPEGHRTSNDWEKLAEVRKERIDKYLWDEETGFYYDYNVKTEKRTSYESVTTFWALWAGMSSQEQAQRMVENALPKLEEFGGLVACTARSRGELSLDRPTRQWDYPFGWAPHQILVWDGLVRYGYENHTRRLAYRWLFLMTKAFVDYNGIVVEKYDVTRGTDPHRVDAEYGNQGADFKGVATEGFGWVNSSYLLGMKYMNNFARRALGTCVTPKVFFGRLPPKEKKKYGLE

SEQ ID NO: 11688 - DNA, 2045 bp, Mus musculus
  CDS (24)..(1754)
ccgttctaggcaccgtgcccaggatgacctgggagctgcacctgctgcttctgctggggctgggacttaggtcccaggaggccctgccaccaccctgtgagagccagatctactgccatggagagctcctgcaccaagttcagatggcccagctctaccaagatgacaagcagtttgtggatatgtcactggccacatctccagatgaagtcctgcagaagttcagtgagctggccacagtccacaaccacagcatccccaaggaacagcttcaggaatttgtccagagtcacttccagcccgtggggcaggagctgcagtcctggacccctgaggactggaaggacagccctcagttcctgcagaagatctcggatgctaatctgcgtgtctgggcggaggagctacacaagatctggaaaaagctgggaaagaagatgaaagcagaagtcctcagctaccccgagaggtcctccctaatctactcaaagcaccccttcattgtgcccggggggcgctttgttgaattctactactgggactcgtactgggtgatggaaggcctgcttctttctgagatggcctcaacagtgaagggtatgctgcagaactttctggatctggtgaagacctacggacatatccccaacggtggacgcatatattacctgcaacggagccagcccccactcctgactctcatgatggatcgatatgtagctcataccaaggatgtcgccttccttcaggagaatattgggactctagcctctgaactggacttctggactgtgaacaggactgtctctgtagtctcaggaggacaaagctatgtcttaaatcgctactatgtcccttatgggggacccaggccagagtcctacaggaaagacgcagaattggcaaactctgtgccagaaggggaccgagagactctgtgggctgagctcaaggctggggctgagtctggctgggacttctcttcacgctggcttgttggaggcccagaccctgatttgctcagcagcatccgaaccagcaaaatggtacccgctgatctgaacgcgttcctgtgccaagcagaggaactgatgagtaacttctactccagactagggaacgacacagaggccacaaagtacaggaacctgcgggcccagcgcttggccgccatggaagctgtcctgtgggacgagcagaagggtgcctggtttgactatgacttggaaaaggggaagaagaacctggagttttatccctccaacctctccccactttgggctggctgcttctcagaccctagtgttgctgacaaggctctgaagtacttggaggacagcaagatcttgacctaccaatatggaatcccaacctctcttcgtaacacaggccagcagtgggacttccccaatgcctgggccccactgcaggacctggtcattagaggtttggccaagtcagcttccccccggactcaggaggtggctttccagctggcccagaattggatcaaaaccaacttcaaagtctactcccaaaagtcagcgatgtttgagaagtatgacatcagcaacggtggacatccaggtggaggaggggagtatgaagttcaggaaggatttggctggacaaacggattggccctgatgcttctggatcgctatggtgaccagttgacttcagggacccagttagcttccctgggaccccactgcctagtggctgcccttcttctcagtcttctgctacagtgacaagaacaagaatggactcactgcctgcgctttctcccctggccccagctcatggttcattaaacccttgctctaccttcccttatagccccacccccaccatgccccttcctgctcataatgtgtcctgagccaagaagtgaccaagaggtcaagactgtaattttcacagtgttctgagccaagaagtgaccaagaggtcaaggttgtaattttcacgagggcggaaactgaatcctgatacctaaagtatcctatcgggtaccaaatatagctcagagttccacactc

SEQ ID NO: 11689 - protein, 576 aa, Mus musculus
MTWELHLLLLLGLGLRSQEALPPPCESQIYCHGELLHQVQMAQLYQDDKQFVDMSLATSPDEVLQKFSELATVHNHSIPKEQLQEFVQSHFQPVGQELQSWTPEDWKDSPQFLQKISDANLRVWAEELHKIWKKLGKKMKAEVLSYPERSSLIYSKHPFIVPGGRFVEFYYWDSYWVMEGLLLSEMASTVKGMLQNFLDLVKTYGHIPNGGRIYYLQRSQPPLLTLMMDRYVAHTKDVAFLQENIGTLASELDFWTVNRTVSVVSGGQSYVLNRYYVPYGGPRPESYRKDAELANSVPEGDRETLWAELKAGAESGWDFSSRWLVGGPDPDLLSSIRTSKMVPADLNAFLCQAEELMSNFYSRLGNDTEATKYRNLRAQRLAAMEAVLWDEQKGAWFDYDLEKGKKNLEFYPSNLSPLWAGCFSDPSVADKALKYLEDSKILTYQYGIPTSLRNTGQQWDFPNAWAPLQDLVIRGLAKSASPRTQEVAFQLAQNWIKTNFKVYSQKSAMFEKYDISNGGHPGGGGEYEVQEGFGWTNGLALMLLDRYGDQLTSGTQLASLGPHCLVAALLLSLLLQ

SEQ ID NO: 11690 - DNA, 1656 bp, Ralstonia solanacearum
  CDS (1)..(1656)
atgctcgatccccgtggccttgcacggccatcccggttttgcccgcgcatcatctacgccggcacctcgcacattcgccgcgccaccgccgcggcgctgctggcggccagcctctgtgccctgcctgcctgtgccgatgtcggcgttggcgcggcgttgccgctttcgccggacaagctctatggcgaactgttcgtcgccgtgcagaccgcgcaggtctatcccgaccagaagaccttcgtcgatacggtgcccaaggcggacccggcggtcatcctgcaggcctatcgggcgcagaaggacgtgcccggcttttcgctgaaggcgttcgtcgaccagtacttcaccgtgccgttcgagaccgtcatcacgccgcccgccgggcagtcgctgcgcgcgcacatcaactggctgtggccggcgctcacgcgcaccacggccacggcgccggacaacagctcgctgattccgctgcccaagccctacgtggtgccgggcgggcgcttccgcgaggtctactactgggatacgtatttcacgatgctcgggctgcaggcgtccgggcgcgatgatctcgtcgacagcatgctcgacaacttcgcctaccagatcaaccggttcggccacatccccaacggcaaccggacgtactacctgagccgctcgcagccgccgttcttcgcgctgatggtggagctcgcggccacgaaggaaggggaggccgcctacacccgctacctggccccgctgcgcaaggagtacgcctactggatgcgcggcgccgccggcacggcccccgggcaagccagcggcaacgtggtggtgctgcccgacggcaccgtgctcaaccgctactgggacgatgaggccacgccgcgccccgagtcgtatctgcaggatgtcgccacggcgcagcaggcaccggaccgccccgccgccgaggtctggcgcgacctgcgtgccgccgccgagagcggctgggatttcagctcgcgctggttcggcgacagcgccacgctggccaccatccgcaccacgtccatcctcccggtcgatctcaatgcgctgatgttccaactggagaagaccatcgccaagggctgcgccgtggcgcgcgatttcgcctgcacggtcgagttcggcaaccacgcgcgcaagcgggcggttgcggtcgagcgctacctgtggcatcccgccggctactacgcggattacgactggaagctcggcaaggtgcgcgacaacctgtcggcggccgcgacgtatccgctgttcgtgcagatggcgccatgggggcgggcccggcagacgctgcgccagacgcagacggcgctgctgcaggtcggcggcttgtccaccacgacgctgcacacgcagcagcagtgggatgccccgaacggctgggcgccgctgcagtggattgcgctgcaggccagccagcactatggccaggcgctgctggcccagaccatcggcgagcgcttcctcggcagtgtcgagcgcctgtacgcggccgagcagaagctggtcgagaaatacatcgtcgacggcagcggcacgggcggcggcggtggcgagtatccgctgcaggacggcttcggctggaccaacggcgtgacgctcaggctgctcgacgcatacgggcgcgggcagtga

SEQ ID NO: 11691 - protein, 551 aa, Ralstonia solanacearum
MLDPRGLARPSRFCPRIIYAGTSHIRRATAAALLAASLCALPACADVGVGAALPLSPDKLYGELFVAVQTAQVYPDQKTFVDTVPKADPAVILQAYRAQKDVPGFSLKAFVDQYFTVPFETVITPPAGQSLRAHINWLWPALTRTTATAPDNSSLIPLPKPYVVPGGRFREVYYWDTYFTMLGLQASGRDDLVDSMLDNFAYQINRFGHIPNGNRTYYLSRSQPPFFALMVELAATKEGEAAYTRYLAPLRKEYAYWMRGAAGTAPGQASGNVVVLPDGTVLNRYWDDEATPRPESYLQDVATAQQAPDRPAAEVWRDLRAAAESGWDFSSRWFGDSATLATIRTTSILPVDLNALMFQLEKTIAKGCAVARDFACTVEFGNHARKRAVAVERYLWHPAGYYADYDWKLGKVRDNLSAAATYPLFVQMAPWGRARQTLRQTQTALLQVGGLSTTTLHTQQQWDAPNGWAPLQWIALQASQHYGQALLAQTIGERFLGSVERLYAAEQKLVEKYIVDGSGTGGGGGEYPLQDGFGWTNGVTLRLLDAYGRGQ

SEQ ID NO: 11692 - DNA, 1713 bp, Salmonella typhi
  CDS (514)..(1713)
atgatacccccagagattcgccgttctgttctactacagaaagccataaaactggcgctggcagggacgctgctgacgtttgcatcgttttcggcgactgccgcagacccgtcttccgacactgaaactccgcagccgccggatattttgcttggcccgctctttaatgatgtccagaatgcaaaactcttccccgatcagaaaacctttgctgacgccatacctaatagcgatccgctcatgattcttgcggattatcgtatgcagcggaactagtccggcttcgatttgcgtcattttgttgatgttaacttcaccctgccgaaagcgggtgaaaaatatgtcccgcctgccgggcaatcattgcgtgaacatattgatggcctgtggccggtgctgacccgttcaactaaaaacgtcgaaaagtgggactcgctcttgccgttgcctgaatcctatgtcgtaccgggtgggcgattcagggagatttactactgggacagctactttacgatgctggggctggcggaaagcgggcactgggataaggtggcggatatggtagcgaactttggttacgaaattgacgcctgggggtatattcctaacggcaaccgtacctactacctgagtcgttcacagccgcctttctttgcgtttatggttgaattactggtgcaacatgaaggtgacgatgcgctgaaagaatacctgccgcaactgcaaaaagagtacgcctactggatggagggcgttgagacattgcagccagggcaacaaaaccaacgcgtcgtcaaactggaggacggcagcgttctcaaccgctactgggacgatcgggatacgccccgccctgaatcctgggttgaagatatcgctaccgccaaaagcaaccccagccgcccggcaacggagatctatcgagacctccgatctgctgccgcctccggctgggatttcagctcccgctggatggataatccgcagcagctcagtaccattcgtaccaccacgattgtccctgtcgatcttaacgctctgctgtatcagctggagaaaaccctcgcccgcgccagcgctgcggcgggcgatcgggccaaagcctcgcaatatgacgcgctggccaacgcgcggcaaaaagccattgaaatgcatctgtggaataacaaagagggttggtatgccgactacgatctgcagaacaataaaatccgtgaccaactcaccgctgccgcgctgttcccgctctatgtaaacgccgccgcgaaagatcgcgccgcgaaagtggcagcggcggcccaggcgcatctgctacagcctggcgggctggctaccacctcggttaaaagcggacagcagtgggatgcgccaaatggctgggcgccgttacaatgggtcgctgccgaaggattgcaaaattatgggcaggatgacgtggcaatggaagtcacctggcgctttttaaccaatgtgcagcacacctacgatcgcgagaaaaaactggtcgaaaaatatgacgtcagcagtaccggaaccggcggtggcggcggcgaatatccccttcaggacggctttggctggagcaacggcgtgacgctgaaaatgctcgatctgatttgtccgcaggaaaaaccgtgcgatagcgtaccgtctactcgtccggcatcgttaagcgcaacgccgacaaaaacgccgtctgcagcgacgcagtaa

SEQ ID NO: 11693 - protein, 399 aa, Salmonella typhi
MLGLAESGHWDKVADMVANFGYEIDAWGYIPNGNRTYYLSRSQPPFFAFMVELLVQHEGDDALKEYLPQLQKEYAYWMEGVETLQPGQQNQRVVKLEDGSVLNRYWDDRDTPRPESWVEDIATAKSNPSRPATEIYRDLRSAAASGWDFSSRWMDNPQQLSTIRTTTIVPVDLNALLYQLEKTLARASAAAGDRAKASQYDALANARQKAIEMHLWNNKEGWYADYDLQNNKIRDQLTAAALFPLYVNAAAKDRAAKVAAAAQAHLLQPGGLATTSVKSGQQWDAPNGWAPLQWVAAEGLQNYGQDDVAMEVTWRFLTNVQHTYDREKKLVEKYDVSSTGTGGGGGEYPLQDGFGWSNGVTLKMLDLICPQEKPCDSVPSTRPASLSATPTKTPSAATQ

SEQ ID NO: 11694 - DNA, 1698 bp, Shigella flexneri
  CDS (1)..(1698)
atgaaatcccccgcaccttctcgcccgcaaaaaatggcgttaattccagcctgtatctttttgtgtttcgctgcgctatcggtgcaggcagaagaaacaccggtaacaccacagccgcctgatattttattagggccgctgtttaatgatgtgcaaaacgtcaaactttttccggaccaaaaaacctttgccgatgccgtgcctaacagcgatccgctgatgatccttgctgattatcggatgcagcaaaaccagagcggatttgatctgcgccatttcgttaacgtcaatttcaccctgccgaaagaaggcgagaaatatgttccgccagaggggcagtcactgcgcgaacatattgacggactttggccggtattaacgcgttctaccgaaaacaccgaaaaatgggattctctgttaccgctgccggaaccttatgtcgtgccgggcggacgttttcgcgaggtatattactgggacaattacttcaccatgttaggacttgccgaaagtggtcactgggataaagtcgcggatatggtggccaattttgctcatgaaataaacacttacggtcatattcccaacggcaaccgcagttactatttaagccgctcgcaaccgcccttctttgccctgatggtagagttactggcgcagcatgaaggcgatgccgcgttgaagcaatacctgccgcaaatgcaaaaagaatatgcttactggatggacggtgttgaaaacctgcaagccggacaacaggaaaaacgcgttgtaaaacttcaggatagtacccttctcaaccgctactgggacgatcgcgatacgccacgaccagagtcatgggtggaagatattgccaccgccaaaagcaatccgaatcgacctgccactgaaatttaccgcgacctgcgctctgccgctgcgtctggctgggatttcagctcgcgctggatggacaacccgcagcagttaaataccttacgcaccaccagcatcgtaccggtcgatctgaacagcctgatgtttaaaatggaaaaaatcctcgcccgcgccagcaaagctgcaggagataacgcgatggcaaaccagtacgaaacgctggcgaatgcccgtcaaaaagggatcgaaaaatacctgtggaacgatcaacaaggctggtatgccgattacgacctgaaaagtcataaagtgcgcaatcagttaaccgcggccgccctgttcccgctgtacgtcaatgcggcagcgaaagatcgcgccaacaaaatggcgacggcgacgaaaacacatctgctgcaacccggcggcctgaacaccacgtcggtgaaaagtgggcaacaatgggatgcgccaaatggctgggcaccgttacagtgggtcgcgacagaaggattacaaaactacgggcaaaaagaggtggcgatggacattagctggcacttcctgaccaatgttcagcacacctatgaccgggagaaaaagctggtggaaaaatatgatgtcagcaccaccggaacggggggcggcggtggcgaatatccattacaggatggctttggctggaccaatggcgtgacgctgaaaatgctggatttgatctgcccgaaagagcaaccgtgtgacaatgttccggcgacgcatccgaccgttaagtcagcaacgacgcaaccctcaaccaaagaggcacaacccacaccttaa

SEQ ID NO: 11695 - protein, 565 aa, Shigella flexneri
MKSPAPSRPQKMALIPACIFLCFAALSVQAEETPVTPQPPDILLGPLFNDVQNVKLFPDQKTFADAVPNSDPLMILADYRMQQNQSGFDLRHFVNVNFTLPKEGEKYVPPEGQSLREHIDGLWPVLTRSTENTEKWDSLLPLPEPYVVPGGRFREVYYWDNYFTMLGLAESGHWDKVADMVANFAHEINTYGHIPNGNRSYYLSRSQPPFFALMVELLAQHEGDAALKQYLPQMQKEYAYWMDGVENLQAGQQEKRVVKLQDSTLLNRYWDDRDTPRPESWVEDIATAKSNPNRPATEIYRDLRSAAASGWDFSSRWMDNPQQLNTLRTTSIVPVDLNSLMFKMEKILARASKAAGDNAMANQYETLANARQKGIEKYLWNDQQGWYADYDLKSHKVRNQLTAAALFPLYVNAAAKDRANKMATATKTHLLQPGGLNTTSVKSGQQWDAPNGWAPLQWVATEGLQNYGQKEVAMDISWHFLTNVQHTYDREKKLVEKYDVSTTGTGGGGGEYPLQDGFGWTNGVTLKMLDLICPKEQPCDNVPATHPTVKSATTQPSTKEAQPTP

SEQ ID NO: 11696 - DNA, 1707 bp, Xanthomonas axonopodis
  CDS (1)..(1707)
atgccctacgccactgcccgttctggagatgtcatgagttctgccgcgcccccgtgctgcacgtcgctgcttggcctgtcgctgagcatgtttgttgcgccgggcacgctgaccgccgcgccgctggacgctccggtcgtcaatgcgccggcgcccacgccgcccacgcccgacctggcctacccggaactgtttcaggccgtgcagcgcggtgagttgttcgatgaccagaagcactttgtcgacttcctgccgctgcgcgacccggcgctgatcaacgccgactatctggcccagcacgatcaccccggcttcgatctgcgcaagttcgtggacgccaatttcgaagaatcgccgccggtgcagaccgatgcgatccgccaggacaccgcgctgcgcgagcacatcgacctgctgtggcccaagctggtgcgcagccagaaccacgtgccgccgcacagcagcctgctggcgctgccgcatccgtatgtggtgccgggcggacgcttccgcgaggtgtattactgggattcctacttcaccatgctgggcctggtgaagagcggcgaaaccacgctcagccgccagatgctggacaactttgcctacctgatcgacacctacgggcatattcccaacggcaaccgcacctactacctcagccgctcgcagccgccgttcttctcctacatggtggagctgcaggccggcgtggaaggcgaggcggtatatcagcgctacctgccgcagctgcaaaaggaatatgcctactggatgcagggcagcgatgacctgcagcccggccaggccgcgcgccacgtggtgcgtctggccgatggcagcgtgctcaaccgctattgggacgagcgcgacaccccgcgcccggaagcctggctgcacgacacccgcaccgccgcagaagtgaccgaccgcccggccgccgaggtctaccgcgacctgcgtgccggcgccgaaagtggctgggactacaccagccgctggctggccgacggccagaacctgcgcaccatccgtaccactgccatcctcccgatcgacctcaacagcctgctctaccacctggagcgcacgctggcgctggcctgcgcgcaacctggcgcggagtgcacccgcgattacgccgcacttgcacagcagcgcaagcaggccatcgacgcgcatctgtggaataccgccggctactacgccgactacgactggcagacgcgtacgctgagcaaccaggtcaccgccgctgcgctatacccgctgtttgccggcctggcctcggacgatcacgccaagcgcaccgccagcaccgtgcgtaaaacgctactgcgtccgggcggactggccaccaccgcagtgaagaccggtcagcagtgggatgagcccaacggctgggcgccgctgcaatgggtggctgtggatggcctgcggcgctacggcgaagacgcgctggcacgcaccattggcgaacgttttctggctcaagtgcaggcgctgttcgcacgcgagcacaagctggtcgaaaagtacggcctggaaaccgatgcggccggcggcggcggtggcgagtacgcgctgcaggacggcttcggctggaccaacggcgtcaccttgatgctgctgaacctgtatccgggcaaggacaccaaagccgcacccgccaagcgggtgcgcaagcccgaggcggccgcgcgctga

SEQ ID NO: 11697 - protein, 568 aa, Xanthomonas axonopodis
MPYATARSGDVMSSAAPPCCTSLLGLSLSMFVAPGTLTAAPLDAPVVNAPAPTPPTPDLAYPELFQAVQRGELFDDQKHFVDFLPLRDPALINADYLAQHDHPGFDLRKFVDANFEESPPVQTDAIRQDTALREHIDLLWPKLVRSQNHVPPHSSLLALPHPYVVPGGRFREVYYWDSYFTMLGLVKSGETTLSRQMLDNFAYLIDTYGHIPNGNRTYYLSRSQPPFFSYMVELQAGVEGEAVYQRYLPQLQKEYAYWMQGSDDLQPGQAARHVVRLADGSVLNRYWDERDTPRPEAWLHDTRTAAEVTDRPAAEVYRDLRAGAESGWDYTSRWLADGQNLRTIRTTAILPIDLNSLLYHLERTLALACAQPGAECTRDYAALAQQRKQAIDAHLWNTAGYYADYDWQTRTLSNQVTAAALYPLFAGLASDDHAKRTASTVRKTLLRPGGLATTAVKTGQQWDEPNGWAPLQWVAVDGLRRYGEDALARTIGERFLAQVQALFAREHKLVEKYGLETDAAGGGGGEYALQDGFGWTNGVTLMLLNLYPGKDTKAAPAKRVRKPEAAAR

SEQ ID NO: 11698 - DNA, 1707 bp, Xanthomonas campestris
  CDS (1)..(1707)
atgccgcacgcccccgcccgttctggagatgccatgagcgctgctgcgcccccgtgctgcacctcgttgcttggtctgtcgctgagcatgttcgttgcgccctgcgccctggcggccacgccgctggaaggtgcggtggtcagcgcgcccgcgcccacgccgcccacgcccgacctggcgtatccggagctgttccaggccgtgcagcgcggggagctgttcgacgaccagaagcatttcgtcgactttctgccgctgcgcgacccagccctgatcaacgccgactatctggcgcagcacgagcatgccggctttgacctgcgcaagttcgtggatgccaacttcgaggaatcgccgccggtacagaccgatgcgatccgccaggacaccgcgctgcgcgagcacatcgacgcgctgtggcccaagctggtacgcagccagaccaacgtgcccgcacacagcagcctgctggcgttgccgcacccgtacgtggtgccgggcggacgcttccgcgaggtgtattactgggattcgtacttcaccatgctggggctggtgaaaagtggcgaaaccacgctgagccggcagatgctggacaacttcgcctacctgatcgacacctacgggcacatccccaacggcaaccgcacctactacctgagccgctcgcagccgccgttattctcctacatggtggaactgcaggccggcgtggaaggcgaggcggtgtaccagcgctacctgccgcagctgcagaaggaatacgcgtactggatgcagggcggcgacgatctgcaacccggccaggccgcacgccatgtggtgcgcctggccgatggcagcgtgctcaatcgctattgggacgagcgcgataccccgcgcccggaagcctggctgcacgacacccgcaccgctgccgaggcgcatgaccgcccggccgccgatgtctaccgcgacctgcgcgccggcgccgaaagtggctgggactacaccagccgctggctggccgacggcaagacgctgagcaccatccgcaccaccgcgattgtgccgatcgatctcaacagcctgctgtatcacctggaacgcaccctggcgcaggcctgcgcgcacaccggcaccgcctgcagccaggactacgctgcgctcgcacagcagcgcaagcaggccatcgacgcgcacctgtggaatgcagccggctactacgccgactacgactggcagacccgcacgctgagcaaccaggtcaccgcggcggcgctgtacccgctgttcgccggcctggcttcggatgaccacgccaagcgcactgccaccagcgtgcgcgcccgcctgctgcgtcccggcggcctggccaccaccgcgttgaagaccggccagcagtgggacgaacccaacggctgggcgccattgcaatgggtggccgtggacggcctgcgtcgctacggcgaagacggcctggcccgcaccatcggcgagcgcttcctcacccaggtgcaggcgctattcgcgcgcgagcacaagctggtcgaaaaatacggcctggacgccgatgcagccggcggcggcggtggcgaatatgcattgcaggacggctttggctggaccaatggcgtcacgttgatgctgttgaacctgtacccctcacagggcgccacccaggctccggccaagaccaagcgcaagcccgagcccgccgctccctga

SEQ ID NO: 11699 - protein, 568 aa, Xanthomonas campestris
MPHAPARSGDAMSAAAPPCCTSLLGLSLSMFVAPCALAATPLEGAVVSAPAPTPPTPDLAYPELFQAVQRGELFDDQKHFVDFLPLRDPALINADYLAQHEHAGFDLRKFVDANFEESPPVQTDAIRQDTALREHIDALWPKLVRSQTNVPAHSSLLALPHPYVVPGGRFREVYYWDSYFTMLGLVKSGETTLSRQMLDNFAYLIDTYGHIPNGNRTYYLSRSQPPLFSYMVELQAGVEGEAVYQRYLPQLQKEYAYWMQGGDDLQPGQAARHVVRLADGSVLNRYWDERDTPRPEAWLHDTRTAAEAHDRPAADVYRDLRAGAESGWDYTSRWLADGKTLSTIRTTAIVPIDLNSLLYHLERTLAQACAHTGTACSQDYAALAQQRKQAIDAHLWNAAGYYADYDWQTRTLSNQVTAAALYPLFAGLASDDHAKRTATSVRARLLRPGGLATTALKTGQQWDEPNGWAPLQWVAVDGLRRYGEDGLARTIGERFLTQVQALFAREHKLVEKYGLDADAAGGGGGEYALQDGFGWTNGVTLMLLNLYPSQGATQAPAKTKRKPEPAAP

SEQ ID NO: 11700 - DNA, 2217 bp, Ashbya gossypii
  CDS (1)..(2217)
atgttgcaaggaatgcccaagcggagtgggtcaatcagcgagctgcacgacccattctcgagccctgatgtatactacggccccgcgacggacccgcggcggcagaagcagcccaataagtactcgcggacgcggacgatgagcatcatcgaaaacgtttcgaccttcaagagcgcggggaagcagtacaatatcaggcgccgaggctctgaggacgactctatgttggccagctcgggacaccgcaagttctacatcaaggacgttgacaagacgttggaggagctcttggagagcgaggacacagacggcaactaccagataacgattgaggaccgcggtccgaaaacattgcgggtcggcaccgccaactccaacgggttccggcacgtgcagatcagaggcacgtacatgctctccaacttgttgcaggagttgaccatcgcaaaaaattttgggcggaagcaagtgattctcgatgaggcccgcttgaacgaagatccggttaatcgtctcacgcgattgatcacgcatcagttctgggactccttgacccggagaattgactacaacagtattgccgccatcgcggcagatactaaggtcgacacccctggcgcgaaggtgccgcggatttacgtgccccatggctgccccgagcagtacgagtatttcattgagtgctcccagttgaacccctcattgaacctcgaggtaaagtacttgccggatgtgatcacgccggagcacgtgcaatcattgaacgaaagcccggggttgcttgctttggcgatggagagtcacagggacccaattaccggtgagagtacattggttggttttccctacgttgttccgggcggtcgttttaatgaactttacggctgggactcatacctaatggctttgggtcttctagactgtaacaaagtggacatagcacgtgggatggttgagcatttcatctttgagatagagcattacggtaaaatattgaacgccaataggagctactacctctgtcggtcacaacccccgttcctaaccgacatggctttgaaggtcttcgaaaagttcggtggtgaccaaaatcctaccgctgtggatttcttgaaaagagcattcatcgcagccattaaggaatacaagagtgtatggatggcagaaccgcggtacgacaaaaccacgggtctttcatgttatcatccagatggtatcggtttcccaccagaaaccgagcctgaccactttgacgcaatttgccggaaatttgcggaaaagcacaatgtaacgattccggagttcaggtgcatgtacgatgccggcgaagtacacgagcccgaactagatgagttctttttgcatgatcgtgctgtacgtgagagtggacatgacacctcttaccgtctagagaacgtctgtgcttacttagcgacgattgatttgaattcgttactatacaagtacgaaaaagatattgcatatgtggtttccaagtacttcgatgatagtattactgattatgctggtgaaaccaccacttcttctcattgggaggcacttgcagacattcgtaagcaaagaatcacgaaatatttgtgggacgaggaaacaggctttttctatgactacaatgtccatattggaaagagaacatcttacgattctgcaacaacattttgggccatgtgggcaggcttggcaacccaggaacaagccaacgctatggtcgagaaggcattgccaaggcttgaaatgctaggaggcctggttgcctgtactgaggagtctcggggtgagataacaatgaatagaccaagcaggcaatgggattacccttatggttgggcccctcatcaaatgcttgcttggaccgggttagataattacggatttacaggagttgcaagaaggttggcctataggtggttatttttaatgaccaaggcatttgtcgactacaatggtatcgtagtagagaaatacgacgttaccagaggcacagatcctcatagagttgatgccgaatatggtaaccaaggtgcagactttaaaggtgttgctactgaaggatttggctgggtcaattccagttatatcttaggtttgaaatttatgaatacttatgctaagagagctttagctaactgcaccgtccctgatattttctttaagcatatgaagccagaagagaaagctcggtatgccttgatctga

SEQ ID NO: 11701 - protein, 738 aa, Ashbya gossypii
MLQGMPKRSGSISELHDPFSSPDVYYGPATDPRRQKQPNKYSRTRTMSIIENVSTFKSAGKQYNIRRRGSEDDSMLASSGHRKFYIKDVDKTLEELLESEDTDGNYQITIEDRGPKTLRVGTANSNGFRHVQIRGTYMLSNLLQELTIAKNFGRKQVILDEARLNEDPVNRLTRLITHQFWDSLTRRIDYNSIAAIAADTKVDTPGAKVPRIYVPHGCPEQYEYFIECSQLNPSLNLEVKYLPDVITPEHVQSLNESPGLLALAMESHRDPITGESTLVGFPYVVPGGRFNELYGWDSYLMALGLLDCNKVDIARGMVEHFIFEIEHYGKILNANRSYYLCRSQPPFLTDMALKVFEKFGGDQNPTAVDFLKRAFIAAIKEYKSVWMAEPRYDKTTGLSCYHPDGIGFPPETEPDHFDAICRKFAEKHNVTIPEFRCMYDAGEVHEPELDEFFLHDRAVRESGHDTSYRLENVCAYLATIDLNSLLYKYEKDIAYVVSKYFDDSITDYAGETTTSSHWEALADIRKQRITKYLWDEETGFFYDYNVHIGKRTSYDSATTFWAMWAGLATQEQANAMVEKALPRLEMLGGLVACTEESRGEITMNRPSRQWDYPYGWAPHQMLAWTGLDNYGFTGVARRLAYRWLFLMTKAFVDYNGIVVEKYDVTRGTDPHRVDAEYGNQGADFKGVATEGFGWVNSSYILGLKFMNTYAKRALANCTVPDIFFKHMKPEEKARYALI

SEQ ID NO: 11702 - DNA, 2247 bp, Emericella nidulans
  CDS (1)..(2247)
atggacgactcggcactaccttcaaacacctcgaacgggattaacggtcgcaccgcccatcgacggtccagttccggtggtgatccttttcaacacccagatatctactatggaaaccccgagtctgttgaacggatcaagaaccgccgacgtgcgttctcttcgagcttgaaatcgttcaaccggcaagacttccatgaaatgctgggtgaccgtaatacgagacgtggtagcatggacccaacgtctggcaaccccaggaaattccttatcgatgtcgacgctactcttcatagtctgcttgagagagaggattcggacaggaacatgcagatcaccatcgaggatgttggccctaaggtgcggacagctgcatcccatggttacaacaggttcgacgtgcgaggcacatatatgctgtcgaacctcctccaagaattaacaattgctaaagattatgggcgtaaacagattgtccttgatgaggaacgtctttccgagaatcctgtctctcggctttcccgacttatcaagaactctttctggaactctctaactagaagaattgacgggcgtaatatcgaggtggctggaagggatcccaaggattggactgacgatcctcggccgcgtatttatgttccacccggtgctcccgaacagttggagtactacaggagaatcgcggaagagaagcctgaactgcgtcttgatgttcaggaattggctgcggaaatcacaccggaatatgtgcgagacttgaatgagaagcccgggctgctcgcattggccatggaggagaaatacgatgaaaagaccgggaagaccgacttcgctggagttcccttcgtggtcccaggagggcgattcaacgagctttacgggtgggatagctacatggaatcgctggggcttctggctagcaacagggtcgaccttgccaaagccatggtgataaatttctgcttctgcattaagcattatggaaagattctcaacgccaaccggtcgtactatctgacacgatcccaaccacctttcctaactgatatggctttacgtgtgtacgaccgcatccagaatgaaccaggcgccatggatttccttcgccacgcaattctagcagccatcaaggagtactacagtgtttggatggctgagccgcgtctagaccctgtgtcgggcctgtcaagataccgctcaccgggtattggagtacctcctgagacggaggcctctcacttcctccatcttctcaccccgtatgccgagaaacatggtatggaattcaaagagtttgtccaggcctacaactacggcaaagtcaaggagccggaactggacgaatacttcatgcacgacagagctgttagagaatctggacacgacaccagttaccgtttggagagagtctgcggcaatcttgccactgttgacctgaactctctcttatacaagtatgaggtcgatattgcgcgagtaatacgcgtctacttcaaggacaagctcgagattccggtcgagttccgaacaccagccaccaaggatatccaaagcgaatcatcatctgtgtgggaccgccgggcgcgcagaagaaagatgaggatggacacctacctctgggatgaagaaaagggaatgtactttgattacgacacggtcaaacaagaacggaccaactatgagagcgccacgactctctgggcaatgtgggctgggcttgtcacgccacgccaggcttctgcaatgatcaccaaggcacttccccgcttcgaggagtttggtggaattgtctcgggcactgaagagtctcgtggtgctgttggactaaaccgacctactcggcagtgggattacccatacggatgggcgccgcagcagatgctcgcgtggaccgggttcgcccgttacggatatcaggaagaggccgagcgacttgcatacaagtggctctacatgatcactaaggcgttcgttgacttcaacggcgtcgtcgtcgagaaatacgatgtgacccgacccattgaccctcaccgcgttgatgccgagtatggcaaccagggcgtcgacttcaagggcgcccctcgcgaagggttcggttgggtcaatgcaagctacgtttacggcctggaaatgctcaacgcccatcagcgacgtgctcttggtgcggtcactccatgggagacgtacagcaaggctgtttctgcgcagggtagtgacaccgttcttgaaaacagatctgagtga

SEQ ID NO: 11703 - protein, 748 aa, Emericella nidulans
MDDSALPSNTSNGINGRTAHRRSSSGGDPFQHPDIYYGNPESVERIKNRRRAFSSSLKSFNRQDFHEMLGDRNTRRGSMDPTSGNPRKFLIDVDATLHSLLEREDSDRNMQITIEDVGPKVRTAASHGYNRFDVRGTYMLSNLLQELTIAKDYGRKQIVLDEERLSENPVSRLSRLIKNSFWNSLTRRIDGRNIEVAGRDPKDWTDDPRPRIYVPPGAPEQLEYYRRIAEEKPELRLDVQELAAEITPEYVRDLNEKPGLLALAMEEKYDEKTGKTDFAGVPFVVPGGRFNELYGWDSYMESLGLLASNRVDLAKAMVINFCFCIKHYGKILNANRSYYLTRSQPPFLTDMALRVYDRIQNEPGAMDFLRHAILAAIKEYYSVWMAEPRLDPVSGLSRYRSPGIGVPPETEASHFLHLLTPYAEKHGMEFKEFVQAYNYGKVKEPELDEYFMHDRAVRESGHDTSYRLERVCGNLATVDLNSLLYKYEVDIARVIRVYFKDKLEIPVEFRTPATKDIQSESSSVWDRRARRRKMRMDTYLWDEEKGMYFDYDTVKQERTNYESATTLWAMWAGLVTPRQASAMITKALPRFEEFGGIVSGTEESRGAVGLNRPTRQWDYPYGWAPQQMLAWTGFARYGYQEEAERLAYKWLYMITKAFVDFNGVVVEKYDVTRPIDPHRVDAEYGNQGVDFKGAPREGFGWVNASYVYGLEMLNAHQRRALGAVTPWETYSKAVSAQGSDTVLENRSE

SEQ ID NO: 11704 - DNA, 2825 bp, Neurospora crassa
  CDS (173)..(2359)
cggcacgagattccatcgagcacctgtacaacaaacggcgactttgtccgactcacaaagccttatctctttccctctcgctccaaacaaagacatcttcaacatcgaacccgctcgtcttgactgttctccgcatctcgaaacaaacaaacattttcgggagacaaacaagatgacttcccagccttcttcaggcaaaggccggggtcgcaacctgtcgatcgacgagtacaatgtctatgacgacgcgaagacatactataccaccgaggaccgccatcacaaccaccgcgctggagccagaacccgcacctactctcagaacagcttgttcaagcagtttgaacgtctaggccttcagaaggagccctaccgcagaggcagccatgacgagtcaacgatcccgcaatcccgccgattccttatccaggtcgagcccacgctgcagagtctgcaatcgcaggaggacacggatggcaacatgcagatcaccatcgaggacaacgggccaaaggtcctgtccctcagaaccgctgcatccaatggctacaaccgattcgacatccgtggcacttacatgctctccaaccttcttcaggagctttacctcgccaaggaatacggtcgcaagcagattatcctcgatgaggctagactcaacgagaaccccgtgaaccgactttcgcgactgatcaaagaccacttctgggagggtctaacacgccgcattgatgcttccagcattgaaatcgctgcgcgggatcccaaggactggactgacgatccccgaccccgcatttacatccccagaggagcaccggaacaacacgagtattataccaaggtggccttggacaggcctgagcttcgcctggatgttcaatatcttcccgagaagatcacccccgagattgttcgggacatgaatgccaagcctggcctgctggcggtagatatggaagaagtggttgatcccaagaccggtgaaaagactctacgcggccgccctttcgtggtgcccggaggtcgcttcaacgagctgtacggatgggacagctacatggagtctctcggtttgctggtcaacgatcgggttgatctggccaagtccatggtgcaaaacttttgtttctgcatcaagcactacggcaagatcctcaacgctactcgttcctactacctttgccgatcgcagccccccttcctaacggatatgactctgcgcgtctatgacaagatcaagcacgaaccgggtgcgcttgaattccttcgccaatctctgttggccgccatcaaggaatactatagcgtctggacagctgagcctcgccttgaccctgtgactggtctctccaggtaccgccctgaaggccttggcgtccctcccgagaccgaggctggccacttcatccatattcttgagccctatgccaagaagcacaacatgagctttgacgagtttgtgtacgcttacaaccacggtgagatcaaggagcccacgctcgacgactacttcatgcacgacagagctgttcgtgagtccggccacgataccacataccgcttcgaaggtatctgcgctgatctggccaccatcgatctcaattcgctcctgttcaagtatgagaccgacattgcgcgtacaattcgcaacgtcttccacgacaagtttgaggtgccggatgactggctcgctaccaacaaccccgctgctagcaagctcgagacatcggcaatgtgggatcgccgtgccaagcgcagaaagctggccattgacaagtacctgtggaacgaagaggcgggcatgtacttcgactacaacacggccacgcgcaagcagtgcaactatgaaagtgccaccactttctgggccctgtgggcgggtgtcagcaaccccaagcaggcagctgccatggtgaccaaggccttgcccaagttggaggcttttggtggtctgctttctggaacaaaggagtctcgtggtgagattggtctagagcgccctaaccgtcaatgggattacccttacggctgggcgccgcagcaaattcttgcttggacaggtctctaccggtacggctttaacgaggaagcggagcgcctggcctacaagtggctgtttatgattaccaaggcgtttgtggacttcaacggcgtcgtggtggagaagtatgatgtgacgaggcccattgacccacacagagtcgatgccgagtacggcaaccaagggttggatttcaagggagttgccaaagaaggtttcggatgggtcaacgccagttatgtctacggcctgcagatcgttaacgcgcatatgcgccgtgcgctcggcactctgactccctacgaaactttatgaaggccgtcgaggagaatcggaacaaggcgctctctgagctcgtttgatctggtttcggctaccctattttcaacgacacggttatctttccatcgaagcgtctgttagcctgcagccttttggctttcgcaatttccattattcggcgtttaggtttcgtattgactgctggcgcggctttttccatcagattacatagtcagatcggttcttgacaaggggggcgacgaacaggagctagattagagaagtcacatcaggaaagagaaggtactatgatggtatatgcataccactgcgtgttgctgagagagaagactgaaaagcacgcgagttgtgttgctcatgttttgctttaagggctgcaaacattccaagagacggacctcgacctgaacggtcagttagtagtagtagtatagataggcaaatcactacctgatgaaagaaaaaaaaaaaaaaaaaa

SEQ ID NO: 11705 - protein, 728 aa, Neurospora crassa
MTSQPSSGKGRGRNLSIDEYNVYDDAKTYYTTEDRHHNHRAGARTRTYSQNSLFKQFERLGLQKEPYRRGSHDESTIPQSRRFLIQVEPTLQSLQSQEDTDGNMQITIEDNGPKVLSLRTAASNGYNRFDIRGTYMLSNLLQELYLAKEYGRKQIILDEARLNENPVNRLSRLIKDHFWEGLTRRIDASSIEIAARDPKDWTDDPRPRIYIPRGAPEQHEYYTKVALDRPELRLDVQYLPEKITPEIVRDMNAKPGLLAVDMEEVVDPKTGEKTLRGRPFVVPGGRFNELYGWDSYMESLGLLVNDRVDLAKSMVQNFCFCIKHYGKILNATRSYYLCRSQPPFLTDMTLRVYDKIKHEPGALEFLRQSLLAAIKEYYSVWTAEPRLDPVTGLSRYRPEGLGVPPETEAGHFIHILEPYAKKHNMSFDEFVYAYNHGEIKEPTLDDYFMHDRAVRESGHDTTYRFEGICADLATIDLNSLLFKYETDIARTIRNVFHDKFEVPDDWLATNNPAASKLETSAMWDRRAKRRKLAIDKYLWNEEAGMYFDYNTATRKQCNYESATTFWALWAGVSNPKQAAAMVTKALPKLEAFGGLLSGTKESRGEIGLERPNRQWDYPYGWAPQQILAWTGLYRYGFNEEAERLAYKWLFMITKAFVDFNGVVVEKYDVTRPIDPHRVDAEYGNQGLDFKGVAKEGFGWVNASYVYGLQIVNAHMRRALGTLTPYETL

SEQ ID NO: 11706 - DNA, 1650 bp, Salmonella typhimurium
  CDS (1)..(1650)
atgctcaaccagaaattaaaccccacgccttctgaagatctgactattgatgtcgatctgctttatgaaacagacccgtgcgagttaaagctggatgaaatgatcgaggcggaaccggagccggagatgatcgaggggcttcccgcctctgacgccctgacccctgccgatcggtatctcgaactgttcgagcatgtacagtcaacaaaactgtttccagacagtaaaacgttcccggactgcgcgccgaagatggacccgcttgatatcctgatccgctaccgtaaggtcagacgccaccgtgattttgacttacgccgcttcgtcgagaaccatttctggctaccggaaaccttatccagcgagtatgtctctaatcccgaaaactcgctcaaagaacatattgaccagctttggccgatactgacgcgcgaaccgcaggatcatattccgtggtcttcgctgctggcgctgccgcaatcctatatcgtgccgggaggccgttttagcgaaacctattattgggactcttattttaccatgctgggtctggcggaaagcgggcgcgaagacttacttaaatgtatggcggataatttcgcctggatgattgaaaactatggccatattcccaacggcaaccggacctattatctgagccgttcgcagccgccggtttttgccctgatggttgaactgttcgaagaagatggcgtgcgcggcgcgcggcgttatctcgaccatctcaaaatggaatacgccttctggatggacggcgccgaatcgctggcgctcaaccaggcttatcgccacgttgtgcggatgccggacggttccctgctgaaccgctactgggacgatcgcgacacgccgcgcgacgagtcgtggctggaagatgtcgaaactgcaaaacactccggtcgtccgcccaatgaagtctaccgggatttgcgcgccggggcggcgtccggctgggactattcttcacgctggctacgcgatgcgggccggcttgccagcatacgtacgacccagtttatccctatcgatttgaacgcttttctgtataaactggagagcgctatcgccaatatttcagcactgaaaggcgaacgtgacaccgaggcgctatttcgccagaaagccagcgatcgacgcgccgccgtgaaccattatctgtgggatgatgaaaacggctgttatcgggactatgactggcgacgcgaagaaatggcgctcttttccgccgccagtatcgtgccgctgtatgtcggtatggcgaaccacgagcaggccgaccgtctggcaaatgtggtacgcagccgtctgttaacgcccggcgggattatggcgaccgaatacgaaaccggcgaacagtgggataaaccgaacggctgggcaccgctgcaatggatggcgattcagggcttcaaacggtatggcgacgatatgctgggcgatgaaatcgcccataactggttaaaaacagtgaaccatttttatcaggagcaccataaactgatcgagaaataccatatttccggcggtacgccccgcgaaggcggcgggggcgagtatccgctacaggacgggttcggctggaccaatggcgtggtgcgccgcctgattggcctttacggagagccttaa

SEQ ID NO: 11707 - protein, 549 aa, Salmonella typhimurium
MLNQKLNPTPSEDLTIDVDLLYETDPCELKLDEMIEAEPEPEMIEGLPASDALTPADRYLELFEHVQSTKLFPDSKTFPDCAPKMDPLDILIRYRKVRRHRDFDLRRFVENHFWLPETLSSEYVSNPENSLKEHIDQLWPILTREPQDHIPWSSLLALPQSYIVPGGRFSETYYWDSYFTMLGLAESGREDLLKCMADNFAWMIENYGHIPNGNRTYYLSRSQPPVFALMVELFEEDGVRGARRYLDHLKMEYAFWMDGAESLALNQAYRHVVRMPDGSLLNRYWDDRDTPRDESWLEDVETAKHSGRPPNEVYRDLRAGAASGWDYSSRWLRDAGRLASIRTTQFIPIDLNAFLYKLESAIANISALKGERDTEALFRQKASDRRAAVNHYLWDDENGCYRDYDWRREEMALFSAASIVPLYVGMANHEQADRLANVVRSRLLTPGGIMATEYETGEQWDKPNGWAPLQWMAIQGFKRYGDDMLGDEIAHNWLKTVNHFYQEHHKLIEKYHISGGTPREGGGGEYPLQDGFGWTNGVVRRLIGLYGEP

SEQ ID NO: 11708 - DNA, 1650 bp, Shigella flexneri
  CDS (1)..(1650)
atgctcaatcagaaaattcaaaaccctaatccagacgaactgatgatcgaggtcgatctctgctatgaactggacccgtatgaattaaaactggatgagatgatcgaggcagaaccggaacccgagatgattgaagggctgcccgcctctgatgcgctgacgcctgccgatcgctatctcgaactgttcgagcatgttcagtcggcgaaaattttccccgacagtaaaacctttcccgactgcgcacccaaaatggacccgctggatattttaatccgctaccgtaaagtgcgccgtcatcgtgattttgacttgcgcaagtttgttgaaaatcacttctggctgccggaggtctactccagcgagtatgtatcggacccgcaaaattccctgaaagagcatatcgaccagctgtggccggtgctaacccgcgaaccacaggatcacattccgtggtcttctctgctggcgctaccgcagtcatatattgtcccgggcggccgttttagcgaaacctactattgggattcctatttcaccatgctgggactggcggaaagtggtcgggaagatttgctgaaatgcatggccgataacttcgcctggatgatcgaaaactacggtcacatccccaacggcaaccgcacctattatttgagccgctcgcaaccaccggtttttgcgctgatggtggagttgtttgaagaagatggtgtacgcggtgcgcgccgctatctcgaccaccttaaaatggaatatgccttctggatggacggtgcagaatcgttgatccctaatcaggcctatcgccatgttgtgcggatgccggacggatcgctgctcaaccgttactgggacgatcgcgacacgccgcgtgacgaatcctggcttgaggacgttgaaaccgcgaaacattctggtcgcccgcccaacgaggtgtaccgcgatttacgcgcgggagcggcctccggttgggattactcttcccgttggctgcgtgatactggtcgtctggcgagcattcgtaccacccagttcatccccatcgatctgaatgccttcctgtttaaactggagagcgccatcgccaacatctcggcgctgaaaggcgagaaagagacagaagcgctgttccgccagaaggccagtgcccgtcgcgatgcggtaaaccgttacctctgggatgatgaaaacggcatctaccgcgattacgactggcgacgcgaacaactggcgctgttttccgctgccgccattgtgccgctctatgtcggcatggcgaaccatgaacaggccgatcgtctggcaaacgccgtacgcagccggttactgacacctggcgggattttggcaagcgagtacgaaaccggtgaacagtgggataaacccaacggctgggcaccgttacaatggatggcaattcagggatttaaaatgtatggcgatgaccttctgggtgatgaaatcgcgcgcagctggctgaaaacggtgaatcagttctatctggaacagcacaaaatgatcgagaaataccatattgccgatggtgttccccgcgaaggcggcggtggcgagtatccgttgcaggatgggtttggctggactaacggtgtggtacgccgtttaattggtttgtacggcgaaccataa

SEQ ID NO: 11709 - protein, 549 aa, Shigella flexneri
MLNQKIQNPNPDELMIEVDLCYELDPYELKLDEMIEAEPEPEMIEGLPASDALTPADRYLELFEHVQSAKIFPDSKTFPDCAPKMDPLDILIRYRKVRRHRDFDLRKFVENHFWLPEVYSSEYVSDPQNSLKEHIDQLWPVLTREPQDHIPWSSLLALPQSYIVPGGRFSETYYWDSYFTMLGLAESGREDLLKCMADNFAWMIENYGHIPNGNRTYYLSRSQPPVFALMVELFEEDGVRGARRYLDHLKMEYAFWMDGAESLIPNQAYRHVVRMPDGSLLNRYWDDRDTPRDESWLEDVETAKHSGRPPNEVYRDLRAGAASGWDYSSRWLRDTGRLASIRTTQFIPIDLNAFLFKLESAIANISALKGEKETEALFRQKASARRDAVNRYLWDDENGIYRDYDWRREQLALFSAAAIVPLYVGMANHEQADRLANAVRSRLLTPGGILASEYETGEQWDKPNGWAPLQWMAIQGFKMYGDDLLGDEIARSWLKTVNQFYLEQHKMIEKYHIADGVPREGGGGEYPLQDGFGWTNGVVRRLIGLYGEP

SEQ ID NO: 11710 - DNA, 27 bp, Artificial sequence
  Primer sequence
atggtagattttttaccaaaagtaacg

SEQ ID NO: 11711 - DNA, 28 bp, Artificial sequence
  Primer sequence
ttataggtaatacaattttttctcagag

SEQ ID NO: 11712 - DNA, 2772 bp, Saccharomyces cerevisiae; identical to SEQ ID NO: 2477
  CDS (1)..(2772)

SEQ ID NO: 11713 - protein, 923 aa, Saccharomyces cerevisiae; identical to SEQ ID NO: 2478

SEQ ID NO: 11714 - DNA, 2296 bp, Rattus norvegicus (Norway rat); identical to SEQ ID NO: 2479
  CDS (63)..(2039)

SEQ ID NO: 11715 - protein, 658 aa, Rattus norvegicus (Norway rat); identical to SEQ ID NO: 2480

SEQ ID NO: 11716 - DNA, 2255 bp, Homo sapiens (man); identical to SEQ ID NO: 2481
  CDS (102)..(2078)

SEQ ID NO: 11717 - protein, 658 aa, Homo sapiens (man); identical to SEQ ID NO: 2482

SEQ ID NO: 11718 - DNA, 4377 bp, Rattus norvegicus (Norway rat); identical to SEQ ID NO: 2483
  CDS (103)..(2424)

SEQ ID NO: 11719 - protein, 773 aa, Rattus norvegicus (Norway rat); identical to SEQ ID NO: 2484

SEQ ID NO: 11720 - DNA, 2300 bp, Mus musculus (house mouse); identical to SEQ ID NO: 2485
  CDS (69)..(2045)

SEQ ID NO: 11721 - protein, 658 aa, Mus musculus (house mouse); identical to SEQ ID NO: 2486

SEQ ID NO: 11722 - DNA, 2013 bp, Saccharomyces cerevisiae; identical to SEQ ID NO: 2487
  CDS (1)..(2013)

SEQ ID NO: 11723 - protein, 670 aa, Saccharomyces cerevisiae; identical to SEQ ID NO: 2488

SEQ ID NO: 11724 - DNA, 2064 bp, Saccharomyces cerevisiae; identical to SEQ ID NO: 2489
  CDS (1)..(2064)

SEQ ID NO: 11725 - protein, 687 aa, Saccharomyces cerevisiae; identical to SEQ ID NO: 2490

SEQ ID NO: 11726 - DNA, 1941 bp, Caenorhabditis elegans; identical to SEQ ID NO: 2491
  CDS (1)..(1941)

SEQ ID NO: 11727 - protein, 646 aa, Caenorhabditis elegans; identical to SEQ ID NO: 2492

SEQ ID NO: 11728 - DNA, 2415 bp, Emericella nidulans; identical to SEQ ID NO: 2493
  CDS (1)..(2415)

SEQ ID NO: 11729 - protein, 804 aa, Emericella nidulans; identical to SEQ ID NO: 2494

SEQ ID NO: 11730 - DNA, 2601 bp, Debaryomyces hansenii; identical to SEQ ID NO: 2495
  CDS (1)..(2601)

SEQ ID NO: 11731 - protein, 866 aa, Debaryomyces hansenii; identical to SEQ ID NO: 2496

SEQ ID NO: 11732 - DNA, 1899 bp, Debaryomyces hansenii; identical to SEQ ID NO: 2497
  CDS (1)..(1899)

SEQ ID NO: 11733 - protein, 632 aa, Debaryomyces hansenii; identical to SEQ ID NO: 2498

SEQ ID NO: 11734 - DNA, 2259 bp, Debaryomyces hansenii; identical to SEQ ID NO: 2499
  CDS (1)..(2259)

SEQ ID NO: 11735 - protein, 752 aa, Debaryomyces hansenii; identical to SEQ ID NO: 2500

SEQ ID NO: 11736 - DNA, 2244 bp, Yarrowia lipolytica; identical to SEQ ID NO: 2501
  CDS (1)..(2244)

SEQ ID NO: 11737 - protein, 747 aa, Yarrowia lipolytica; identical to SEQ ID NO: 2502

SEQ ID NO: 11738 - DNA, 2598 bp, Kluyveromyces lactis; identical to SEQ ID NO: 2503
  CDS (1)..(2598)

SEQ ID NO: 11739 - protein, 865 aa, Kluyveromyces lactis; identical to SEQ ID NO: 2504

SEQ ID NO: 11740 - DNA, 2079 bp, Kluyveromyces lactis; identical to SEQ ID NO: 2505
  CDS (1)..(2079)

SEQ ID NO: 11741 - protein, 692 aa, Kluyveromyces lactis; identical to SEQ ID NO: 2506

SEQ ID NO: 11742 - DNA, 2034 bp, Kluyveromyces lactis; identical to SEQ ID NO: 2507
  CDS (1)..(2034)

SEQ ID NO: 11743 - protein, 677 aa, Kluyveromyces lactis; identical to SEQ ID NO: 2508

SEQ ID NO: 11744 - DNA, 1989 bp, Candida glabrata; identical to SEQ ID NO: 2509
  CDS (1)..(1989)

SEQ ID NO: 11745 - protein, 662 aa, Candida glabrata; identical to SEQ ID NO: 2510

SEQ ID NO: 11746 - DNA, 2856 bp, Candida glabrata; identical to SEQ ID NO: 2511
  CDS (1)..(2856)

SEQ ID NO: 11747 - protein, 951 aa, Candida glabrata; identical to SEQ ID NO: 2512

SEQ ID NO: 11748 - DNA, 2052 bp, Ashbya gossypii; identical to SEQ ID NO: 2513
  CDS (1)..(2052)

SEQ ID NO: 11749 - protein, 683 aa, Ashbya gossypii; identical to SEQ ID NO: 2514

SEQ ID NO: 11750 - DNA, 2535 bp, Ashbya gossypii; identical to SEQ ID NO: 2515
  CDS (1)..(2535)

SEQ ID NO: 11751 - protein, 844 aa, Ashbya gossypii; identical to SEQ ID NO: 2516

SEQ ID NO: 11752 - DNA, 1830 bp, Neurospora crassa; identical to SEQ ID NO: 2517
  CDS (1)..(1830)

SEQ ID NO: 11753 - protein, 609 aa, Neurospora crassa; identical to SEQ ID NO: 2518

SEQ ID NO: 11754 - DNA, 2388 bp, Candida albicans; identical to SEQ ID NO: 2519
  CDS (1)..(2388)

SEQ ID NO: 11755 - protein, 795 aa, Candida albicans; identical to SEQ ID NO: 2520

SEQ ID NO: 11756 - DNA, 2418 bp, Aspergillus fumigatus; identical to SEQ ID NO: 2521
  CDS (1)..(2418)

SEQ ID NO: 11757 - protein, 805 aa, Aspergillus fumigatus; identical to SEQ ID NO: 2522

SEQ ID NO: 11758 - DNA, 2757 bp, Neurospora crassa; identical to SEQ ID NO: 2523
  CDS (1)..(2757)

SEQ ID NO: 11759 - protein, 918 aa, Neurospora crassa; identical to SEQ ID NO: 2524

SEQ ID NO: 11760 - DNA, 2239 bp, Drosophila melanogaster; identical to SEQ ID NO: 2525
  CDS (76)..(2079)

SEQ ID NO: 11761 - protein, 667 aa, Drosophila melanogaster; identical to SEQ ID NO: 2526

SEQ ID NO: 11762 - DNA, 3100 bp, Saccharomyces cerevisiae; identical to SEQ ID NO: 2527
  CDS (821)..(2887)

SEQ ID NO: 11763 - protein, 688 aa, Saccharomyces cerevisiae; identical to SEQ ID NO: 2528

SEQ ID NO: 11764 - DNA, 2266 bp, Xenopus tropicalis; identical to SEQ ID NO: 2529
  CDS (36)..(2012)

SEQ ID NO: 11765 - protein, 658 aa, Xenopus tropicalis; identical to SEQ ID NO: 2530

SEQ ID NO: 11766 - DNA, 25 bp, Artificial sequence
  Primer sequence
atgtcaagcggcagtactattgttt

SEQ ID NO: 11767 - DNA, 25 bp, Artificial sequence
  Primer sequence
ttattgatctaaggtcgccaccttt

SEQ ID NO: 11768 - DNA, 1479 bp, Saccharomyces cerevisiae
  CDS (1)..(1479)
atgtcaaaggcagtaggtgatttaggcttagttggtttagccgtgatgggtcaaaatttgatcttaaacgcagcggatcacggatttaccgtggttgcttataataggacgcaatcaaaggtagataggtttctagctaatgaggcaaaaggaaaatcaataattggtgcaacttcaattgaggacttggttgcgaaactaaagaaacctagaaagattatgcttttaatcaaagccggtgctccggtcgacactttaataaaggaacttgtaccacatcttgataaaggcgacattattatcgacggtggtaactcacatttcccggacactaacagacgctacgaagagctaacaaagcaaggaattctttttgtgggctctggtgtctcaggcggtgaagatggtgcacgttttggtccatctttaatgcctggtgggtcagcagaagcatggccgcacatcaagaacatctttcaatctattgccgccaaatcaaacggtgagccatgctgcgaatgggtggggcctgccggttctggtcactatgtgaagatggtacacaacggtatcgagtacggtgatatgcagttgatttgcgaggcttacgatatcatgaaacgaattggccggtttacggataaagagatcagtgaagtatttgacaagtggaacactggagttttggattctttcttgattgaaatcacgagggacattttaaaattcgatgacgtcgacggtaagccattggtggaaaaaattatggatactgccggtcaaaagggtactggtaaatggactgcaatcaacgccttggatttaggaatgccagtcactttaattggggaggctgttttcgctcgttgtttgtcagccataaaggacgaacgtaaaagagcttcgaaacttctggcaggaccaacagtaccaaaggatgcaatacatgatagagaacaatttgtgtatgatttggaacaagcattatacgcttcaaagattatttcatatgctcaaggtttcatgctgatccgcgaagctgccagatcatacggctggaaattaaacaacccagctattgctctaatgtggagaggtggctgtataatcagatctgtgttcttagctgagattacgaaggcttatagggacgatccagatttggaaaatttattattcaacgagttcttcgcttctgcagttactaaggcccaatccggttggagaagaactattgcccttgctgctacttacggtattccaactccagctttctctactgctttagcgttttacgacggctatagatctgagaggctaccagcaaacttgttacaagcgcaacgtgattattttggcgctcatacatttagaattttacctgaatgtgcttctgcccatttgccagtagacaaggatattcatatcaattggactgggcacggaggtaatatatcttcctcaacctaccaagcttaa

SEQ ID NO: 11769 - protein, 492 aa, Saccharomyces cerevisiae
MSKAVGDLGLVGLAVMGQNLILNAADHGFTVVAYNRTQSKVDRFLANEAKGKSIIGATSIEDLVAKLKKPRKIMLLIKAGAPVDTLIKELVPHLDKGDIIIDGGNSHFPDTNRRYEELTKQGILFVGSGVSGGEDGARFGPSLMPGGSAEAWPHIKNIFQSIAAKSNGEPCCEWVGPAGSGHYVKMVHNGIEYGDMQLICEAYDIMKRIGRFTDKEISEVFDKWNTGVLDSFLIEITRDILKFDDVDGKPLVEKIMDTAGQKGTGKWTAINALDLGMPVTLIGEAVFARCLSAIKDERKRASKLLAGPTVPKDAIHDREQFVYDLEQALYASKIISYAQGFMLIREAARSYGWKLNNPAIALMWRGGCIIRSVFLAEITKAYRDDPDLENLLFNEFFASAVTKAQSGWRRTIALAATYGIPTPAFSTALAFYDGYRSERLPANLLQAQRDYFGAHTFRILPECASAHLPVDKDIHINWTGHGGNISSSTYQA

SEQ ID NO: 11770 - DNA, 1467 bp, Treponema pallidum subsp. pallidum (syphilis spirochete)
  CDS (1)..(1467)
atgggcgcagacattgggttcattggacttgctgtcatgggagagaatctggttctcaacattgagcgcaacggtttttccgtcgcagttttcaatcgcaccaccacggtggtcgaccgatttcttgcagggcgcgctcatggcaagcgaatcaccggcgcccactccattgcagaacttgtttcacttttggcacgtccacgcaaaatcatgctcatggtcaaagcaggcagcgcagtcgatgcggtcattgaccagatactgccccttctagaaaagggggacctcgttatcgacggtggcaactctcattaccaggataccatccggcgcatgcatgcgctagaggccgcaggtattcatttcattggcacaggagtttcggggggagaagagggggccctccgtggaccgtccctcatgcctggaggctctgctcaggcttggccgttggtttctcccattttctgtgccattgccgccaaagccgacgatggcaccccgtgctgcgactgggtcggcagtgatggcgccgggcactacgtgaaaatgattcacaacggcattgagtacggcgacatgcagataatcgccgagggctactggtttatgaagcatgcgctgggcatgagctatgagcacatgcaccatacgtttacccgctggaacacgggccgcttacactcgtacctgattgagattaccgcggctattctggcacatcaggacacagacggcacaccacttttagagaaaattctagatgccgctggacagaaggggacgggcaggtggacgtgtgttgcagcgctcgaagaaggcagcccgcttacactgatcacagagtcagtgatggcgcgtagtctttctgcgcaaaagcaagcgcgctgcaaggcacatcgcgtttttggttctcccgtgaaagtctccaaagcagaaacgctaagtgcacagcagcgcgaagaactggtgtctgcactggaagacgcgctgtattgcgcgaaaatagtctcgtatgcgcagggttttgagctgttatcgcatacggcaaagcgccgaggatggacactggatttttcccggattgcatcgctgtggcgtggcgggtgtattattcgttcaggattcctgtccaagatcagtgcggcgtttgctcagcagcacgatctagagaatttggtacttgctccctttttcgcagaggaattaaagcgtgcgtgtccaggctggcgcaccatagtggcagaatcggtacggcaggcgttgccagttccggccctctctgctgcgttagcctggtttgatgggttcaccggtgctgctttgccggccaacctccttcaggcacagcgagattattttggtgcgcacacctacgagcgcacagatgcgccgagaggagagttttttcacacaaactggacaggcaccggcggtgataccattgcaggaacctactcaatatag

SEQ ID NO: 11771 - protein, 488 aa, Treponema pallidum subsp. pallidum (syphilis spirochete)
MGADIGFIGLAVMGENLVLNIERNGFSVAVFNRTTTVVDRFLAGRAHGKRITGAHSIAELVSLLARPRKIMLMVKAGSAVDAVIDQILPLLEKGDLVIDGGNSHYQDTIRRMHALEAAGIHFIGTGVSGGEEGALRGPSLMPGGSAQAWPLVSPIFCAIAAKADDGTPCCDWVGSDGAGHYVKMIHNGIEYGDMQIIAEGYWFMKHALGMSYEHMHHTFTRWNTGRLHSYLIEITAAILAHQDTDGTPLLEKILDAAGQKGTGRWTCVAALEEGSPLTLITESVMARSLSAQKQARCKAHRVFGSPVKVSKAETLSAQQREELVSALEDALYCAKIVSYAQGFELLSHTAKRRGWTLDFSRIASLWRGGCIIRSGFLSKISAAFAQQHDLENLVLAPFFAEELKRACPGWRTIVAESVRQALPVPALSAALAWFDGFTGAALPANLLQAQRDYFGAHTYERTDAPRGEFFHTNWTGTGGDTIAGTYSI

SEQ ID NO: 11772 - DNA, 1443 bp, Chlamydia trachomatis
  CDS (1)..(1443)
atggctccaaatacagatattgggttgattggtttggccgtgatgggcaaaaaccttgtattgaacatggtggatcatggtttttctgtttctgtctataaccgaagtccggcgaaaacagaagagttcttgaaagatcatggagagagtggagctctgcaaggatttactacgattcaagagtttgttcaatctttgaagcgtcctcgtaagatcatgatcatgattaaagcgggagctcctgttgatgaaatgattgcctccctgcttcctttcttggaagagggagatattctcatcgatggggggaatagctattatttagattctgagcaacgctatgtcgacctgaaaaaagaaggaattctatttgttgggatgggagtctctggaggggaagagggggctagaaaagggccttccattatgcccggagggaatatagatgcttggcctgcaatcgctcctatctttcaatccatagctgctcaggtggatggacgaccctgttgctcttggattggcacaggaggtgcagggcattttgttaaggctgttcacaatgggatcgaatacggggatatccagttaatttgtgaaacatatgagattcttaagactcgtcttaatctctctttagagcagatagggaatatcttttttgaatggaatcaaaccgatctgaatagctacctcattggagcagcagcggccgttttaatagcaaaagatgagaatggcaatgcgattgcttctacgattcttgatgttgctggacagaaggggactgggcgttgggtcgcagaggacgctattaaggcaggcgttcctatgtccctaattattgaatcggtcttagctcgatacctttcgacttggaaagaagtgcgcacaaaggcagctcaagagtttccagggattcctcttctctgtcaacctccacaagaagcttctgccttcattgaggatgtgcgagaggctttgtatgcagctaagattatcagttacgctcaaggatttatgctgctgaagcaggtctctcaagataaaggatgggatctgaatttaggtgagttagctttgatatggcgtgggggttgcattatacaaagtgcctttttagataaaattcatcaaggttttgaaaatagtccagaagcacactctttgatattacaagattattttaaaaaggttctgtttgattcagaaacaggtttccggcgagctgttttgcatgctatcggatctggtgtagctattccttgcttatcttctgcactatctttttatgatggatatcgtacggtggattcatctttattcttagtgcaaggattaagagattactttggagctcatggttatgagcgtcgagactgtcctcgaggggagttttatcatacggattggctagaaaccaagaaaacttttagagtataa

SEQ ID NO: 11773 - protein, 480 aa, Chlamydia trachomatis
MAPNTDIGLIGLAVMGKNLVLNMVDHGFSVSVYNRSPAKTEEFLKDHGESGALQGFTTIQEFVQSLKRPRKIMIMIKAGAPVDEMIASLLPFLEEGDILIDGGNSYYLDSEQRYVDLKKEGILFVGMGVSGGEEGARKGPSIMPGGNIDAWPAIAPIFQSIAAQVDGRPCCSWIGTGGAGHFVKAVHNGIEYGDIQLICETYEILKTRLNLSLEQIGNIFFEWNQTDLNSYLIGAAAAVLIAKDENGNAIASTILDVAGQKGTGRWVAEDAIKAGVPMSLIIESVLARYLSTWKEVRTKAAQEFPGIPLLCQPPQEASAFIEDVREALYAAKIISYAQGFMLLKQVSQDKGWDLNLGELALIWRGGCIIQSAFLDKIHQGFENSPEAHSLILQDYFKKVLFDSETGFRRAVLHAIGSGVAIPCLSSALSFYDGYRTVDSSLFLVQGLRDYFGAHGYERRDCPRGEFYHTDWLETKKTFRV

SEQ ID NO: 11774 - DNA, 1410 bp, Thermotoga maritima
  CDS (1)..(1410)
atgaaatctcatattggtctcatcggtcttgctgtgatgggtcagaatcttgcactgaacattgcgaggaaaggctacaaagtttcggtttacaacagaacagcacagagaacggaggaatttgtgaaaaatcgtgtaacgaatgaagagatagaacctcattacgatatcgaaagcttcgtgaagtctctcgaaagaccaagaaagataatcttaatggtaaaggcaggaaaacccgtggatgatacgatttctcagcttcttcctcacctcgaaccaggtgatttgataatagacggtggtaattcccattacatggataccgaaagacgcttcaaggaactctctgaaaagggaatacttttcctcggtatgggagtttctggtggtgagtacggggctcttcacgggccttctctcatgcctgggggaagtagagaagcgtacaacctggttgaggagattcttttggaaatagcagcgaaaacagaggatggaccatgctgtacatacgttggtgaaagatcagcgggccactttgtgaagatggttcacaacggcatagaatacgccatcatgcaggcgatagcggaagtttatcacattatgagagatgttttgagcctatcatctgaagaaatgtccagtatctttgaagagtggaacagaggagaactcagctcgttcctggtggagatcacctacaagattttgagaaagaaagatgaagaaacaggaaaaccgatggtcgatgtgattctggacaaggcggaacaaaagggaactggaaagtggacatcccaagcagcccttgacctcggaatacctaccccttccataaacctggcggtggttgaaagggtgatttcccatttcaaagacataagaacaaggctttcgaaactgtataataagagaagaagcgctactcagggtagcgaggaatttttgagagatctccgaaactctctcttctttgccatgttcatggccttttctcagggcatgtggttgatcgcagaagcatcgaaagagttcggctatggggtgagcctctcggaggtgctcagaatatggaagggtggatgtatcataagggcgaagttgatagacacactcagaaggtacatatctaacgagaacgcgtatttgctggagaacgaagaagtgatgaatctattgaaaggcaaaatcgattctctaaagaacatattgaaggcgtccatagagaacgaaatccccgttcctgttttgagttcctcttacaactacttcatgagtcttaccgaagagagactgccggcgaatctcatacaggctcaaagagacttcttcggagcacacacttttgagagagtagacagagaaggtgtgttccacatcaactgggaggaaggagagataggatga

SEQ ID NO: 11775 - protein, 469 aa, Thermotoga maritima
MKSHIGLIGLAVMGQNLALNIARKGYKVSVYNRTAQRTEEFVKNRVTNEEIEPHYDIESFVKSLERPRKIILMVKAGKPVDDTISQLLPHLEPGDLIIDGGNSHYMDTERRFKELSEKGILFLGMGVSGGEYGALHGPSLMPGGSREAYNLVEEILLEIAAKTEDGPCCTYVGERSAGHFVKMVHNGIEYAIMQAIAEVYHIMRDVLSLSSEEMSSIFEEWNRGELSSFLVEITYKILRKKDEETGKPMVDVILDKAEQKGTGKWTSQAALDLGIPTPSINLAVVERVISHFKDIRTRLSKLYNKRRSATQGSEEFLRDLRNSLFFAMFMAFSQGMWLIAEASKEFGYGVSLSEVLRIWKGGCIIRAKLIDTLRRYISNENAYLLENEEVMNLLKGKIDSLKNILKASIENEIPVPVLSSSYNYFMSLTEERLPANLIQAQRDFFGAHTFERVDREGVFHINWEEGEIG

SEQ ID NO: 11776 - DNA, 1107 bp, Deinococcus radiodurans
  CDS (1)..(1107)
atggttatgaaaatcggcatgatcgggctgggcaagatgggcggcaatatggtgattcgcctcaagaacggcgggcaggacgtggtcggttttgaccgcagccaggaagcgattgaccacctcgtgtcgcagggggtcgcggcggacgcgctgacgagtgacatggaccgttttatcgagctgctcggcgaacccggtcagcgagcggtgtgggtgatggtcccggcgggccagattacccagtcggtcatcgacgacctcgcgggccgcctcagcgcgggcgacgtgattatcgacggcggcaactccaactttcacgacacccagcgccggggcgaggctctggcggccaagggcctgcacttcgtggacgtgggcacttccggcggggtgtggggcatcaccgagggctatggcatgatggtgggcggccccgacgagggtgtggagcgcatccgcccggcgctggaagctctggcgcccgcgcccgaccggggctggggccacatggggccgaccggcagcgggcactacgtcaagatggttcacaacggtatcgagtacggcatgatgcaggcctacgccgagggcttcgagctgatgaaggcgcaccagaccttcaacctcgacatggctcagattgccgaagtgtggcgtcacggcacggtgattcgctcgtggctgctcgacctgaccgccgaggccctgaaaaacagcgccgacttcgaccagctctccgactacgtggccgattcgggcgagggccgctggacgattatcgactccatcgaactcggcgtgccgaccccggtgattacgctcgccacccagatgcgcttccgcagccagcaggacgtgagctaccagggccagatgctctcggccatgcgccgcgcgttcggcgggcacgcggttaagacgctggaagcaaccaagcaggaaagcgtggtgccagcggtcaaacccggcgaaagccccaaggccgccgcgcccgagaacatccccaccgccgccgcgcagcccagcatcagcggacgcagcgaagcgcaggaactcggtgaaaccgggcagcagcgcaccaccggcgaccagaaggcgggcgaatga

SEQ ID NO: 11777 - protein, 368 aa, Deinococcus radiodurans
MVMKIGMIGLGKMGGNMVIRLKNGGQDVVGFDRSQEAIDHLVSQGVAADALTSDMDRFIELLGEPGQRAVWVMVPAGQITQSVIDDLAGRLSAGDVIIDGGNSNFHDTQRRGEALAAKGLHFVDVGTSGGVWGITEGYGMMVGGPDEGVERIRPALEALAPAPDRGWGHMGPTGSGHYVKMVHNGIEYGMMQAYAEGFELMKAHQTFNLDMAQIAEVWRHGTVIRSWLLDLTAEALKNSADFDQLSDYVADSGEGRWTIIDSIELGVPTPVITLATQMRFRSQQDVSYQGQMLSAMRRAFGGHAVKTLEATKQESVVPAVKPGESPKAAAPENIPTAAAQPSISGRSEAQELGETGQQRTTGDQKAGE

SEQ ID NO: 11778 - DNA, 1440 bp, Chlamydia muridarum, Chlamydia trachomatis MoPn
  CDS (1)..(1440)
atggctccagcagatattgggttgattggtttggccgtaatgggcaaaaaccttgtgttgaatatgattgatcacggttttgctgtctctgtctataaccgcagtccagagaaaacggaagagttcttgaaggagcatggagagaatatatctcttcaagggtttactgccatcgaagagttcgttcaatctttgaaacgtcctcggaagattatgattatgattaaggcgggagctcctgttgatgaaatgatttcctcgctacttccctttttagaagagggggatattctcattgatggggggaatagctattatctggattctgagcgtcgctacattgatctcaaaaagaaagggattttatttgtcggcatgggggtctctggaggagaagaaggggctcgtaaaggaccttctattatgcccggagggaatattgaagcttggcctgttatcgctcctatttttcaatcaatagctgctcaggttgatggacagccttgttgctcttggattggtacaggaggagcgggtcattttgttaaagccgttcataatggtatagaatatggggatattcagttaatctgtgaaacctatgagattcttaaatctcggcttgatttgtctcttgaacagataggaaacatcttctttgagtggaatcaaacggatttaaatagctatcttatgggagcttcagcagctgttttaacagcaaaagatgagaatggagttgctgtggcttcgactattttggatgtagctgggcagaaaggtactgggcgttgggttgcggaagatgcgattaaggcaggtgttcctatgtcgcttatcatagagtctgttttagctcgttatctctcggcttggaaggaggtgcgtagacaagctgctcgagaattccctgtagcttctcttctttatcaaccttcgcaagaggcctcggtcttgatcgaagatgcaagagaagctctttacgcagcaaagattattagttatgcccaaggcttcatgctattaaagcagatctctgaagaaaggaattgggatcttaatttaggagagcttgctttgatatggcgcggcggatgtattatccaaagtgctttcttggataaaattcaccaagggtttgagagttgcccggatgcacactctttgatgttacaagattatttcaaaaacgttttgttgaactcagaaactggttttcgccgagctattttacatgctgttggagctggtgtagcaattccttgtttagcttctgccttagctttttacgatgggtatcggacggaaaactctccattattcttagttcaaggattaagagattattttggggctcatggttatgagcggcaagatcgtcctcgcggggagttttatcatacggattggttaggaagcaaaaacgcttcccggatgtaa

SEQ ID NO: 11779 - protein, 479 aa, Chlamydia muridarum, Chlamydia trachomatis MoPn
MAPADIGLIGLAVMGKNLVLNMIDHGFAVSVYNRSPEKTEEFLKEHGENISLQGFTAIEEFVQSLKRPRKIMIMIKAGAPVDEMISSLLPFLEEGDILIDGGNSYYLDSERRYIDLKKKGILFVGMGVSGGEEGARKGPSIMPGGNIEAWPVIAPIFQSIAAQVDGQPCCSWIGTGGAGHFVKAVHNGIEYGDIQLICETYEILKSRLDLSLEQIGNIFFEWNQTDLNSYLMGASAAVLTAKDENGVAVASTILDVAGQKGTGRWVAEDAIKAGVPMSLIIESVLARYLSAWKEVRRQAAREFPVASLLYQPSQEASVLIEDAREALYAAKIISYAQGFMLLKQISEERNWDLNLGELALIWRGGCIIQSAFLDKIHQGFESCPDAHSLMLQDYFKNVLLNSETGFRRAILHAVGAGVAIPCLASALAFYDGYRTENSPLFLVQGLRDYFGAHGYERQDRPRGEFYHTDWLGSKNASRM

SEQ ID NO: 11780 - DNA, 909 bp, Lactococcus lactis subsp. lactis
  CDS (1)..(909)
atgatgaaatttggtatgattggtttagggaaaatgggaatgaatcttgtgaaaaatgccgttgaccatgagattgaagttgttgcttacgatctaaatacaaaagcggtagaggaagctaaggattactcagacaaaattaccgctgtcagcacaattgaaaatttactgacagaattgccagcaagcaaaattgtttggttgatgcttccggcaggaactcctacaaattcaacgattgaaatgctttctgaaaagttgtcagctggagatattctgatagacggtggaaattctaattacaaagataatttagaacaaaataaattactgacagaaaaaggaattaaattttttgatgttggaacctctggtggaatggctggagctcgtcaaggcgggaattttatgattggtggagatgatgaaaaatcttggacaatcatagaaccaatcttcaaagcaatctcaatggaagagggctacctctatacagggaaacttggcagtggtcattacttgaaaatgattcataatggaattgaatatgggatgatgcaagcgatcgctgaaggatttgaaattttggaagagtcaccatttgattatgactatgaagccgttgcaaaattatggaatcacggctcagtaatccgaagctggttgatggagcttgctcaagaacaattttcaaaagaccctaaactagaccaaattatcggtcatgttcaatcttcaggagaaggaaaatggaccgttgaagaaagcttggacttaggtgttcctgccccagttattgccttgtcactaatgatgcgtcaacgctcattacaagaagataccatgaccggaaaagtagttgccgctttgcgcaatggctttggcggacatgacgtagaacaaaaataa

SEQ ID NO: 11781 - protein, 302 aa, Lactococcus lactis subsp. lactis
MMKFGMIGLGKMGMNLVKNAVDHEIEVVAYDLNTKAVEEAKDYSDKITAVSTIENLLTELPASKIVWLMLPAGTPTNSTIEMLSEKLSAGDILIDGGNSNYKDNLEQNKLLTEKGIKFFDVGTSGGMAGARQGGNFMIGGDDEKSWTIIEPIFKAISMEEGYLYTGKLGSGHYLKMIHNGIEYGMMQAIAEGFEILEESPFDYDYEAVAKLWNHGSVIRSWLMELAQEQFSKDPKLDQIIGHVQSSGEGKWTVEESLDLGVPAPVIALSLMMRQRSLQEDTMTGKVVAALRNGFGGHDVEQK

SEQ ID NO: 11782 - DNA, 1431 bp, Nostoc sp. PCC 7120
  CDS (1)..(1431)
atgacactacaaagctttggtgtgattggtttagccgttatgggcgagaatatcgctctaaacgtggagcgtaatggcttcccaattgcagtttataaccgttccagagaaaaaaccgatgctttcatggcacagcgtgctggtggacgcaacgttaaagctgcttttaccctggaagagtttgtcgccgcactagaacgtccccgcaagattctggtgatggtgcaagctggtaaaccagtggatgcagtaattcagcagctcaaacctctactagatgaaggcgatatcatcatcgacggtggcaactcttggtttgaagatacccaaagacggactcaagaactagaaccagcaggcttacgcttcctggggatgggtgtcagtggtggtgaagaaggcgcacttaatggcccttcactgatgcccggtggtacacaaagttcttacgagtatctgtccccaattttcaacaaaattgctgctcaagttgatgatggcccttgtgtaacttatgttggccctggtggttccggtcactacgtcaaaatggtacacaacggtattgagtatggcgatatgcagttgattgcagaagcctacgacttgctgaaaaatgctggtgggctgaatgctaaacagctacatgaagtattcacagaatggaatactaccgacgaactcaattctttcttgattgagattacagccaacatcttcccctacatcgacccagagaccaagttacctttggtggatttgattgttgatgcagccggtcaaaagggaactggacgctggactgtacaaactgctttggaattgggtgtttctatccctaccattacagcagccgtgaatgctcggattatctcttccattcgagatgaacggattgctgcatctaagcagttgacaggccccagtggcaaatatgatggcgataccaaagagtttatcaacaaagtccgggatgcactttactgctccaagatttgttcttatgctcaagggatggcgctgttatctacagcctcagccacatttaattggaatttgaatctgagtgaaatggcgcggatttggaaaggtggttgtattattcgcgctggcttcttgaataagattaagaaggcatttaacgaaaatcccgcattacccaacttgctactcgctcctgaatttaaacaaacaattctcgacagacaagcagcttggcgggaagtaatcatcactgcggcaaaactcggaatcccagtacccgcatttagcgcatccttggattattttgacagctatcgccgcgatcgcctaccccaaaacctcacccaggcacaacgcgactacttcggcgcacacacctacttgcgtaccgataaagctggcgctttccacactgaatgggttcctatcgctgaagcgaagaaataa

SEQ ID NO: 11783 - protein, 476 aa, Nostoc sp. PCC 7120
MTLQSFGVIGLAVMGENIALNVERNGFPIAVYNRSREKTDAFMAQRAGGRNVKAAFTLEEFVAALERPRKILVMVQAGKPVDAVIQQLKPLLDEGDIIIDGGNSWFEDTQRRTQELEPAGLRFLGMGVSGGEEGALNGPSLMPGGTQSSYEYLSPIFNKIAAQVDDGPCVTYVGPGGSGHYVKMVHNGIEYGDMQLIAEAYDLLKNAGGLNAKQLHEVFTEWNTTDELNSFLIEITANIFPYIDPETKLPLVDLIVDAAGQKGTGRWTVQTALELGVSIPTITAAVNARIISSIRDERIAASKQLTGPSGKYDGDTKEFINKVRDALYCSKICSYAQGMALLSTASATFNWNLNLSEMARIWKGGCIIRAGFLNKIKKAFNENPALPNLLLAPEFKQTILDRQAAWREVIITAAKLGIPVPAFSASLDYFDSYRRDRLPQNLTQAQRDYFGAHTYLRTDKAGAFHTEWVPIAEAKK

SEQ ID NO: 11784 - DNA, 1410 bp, Brucella melitensis
  CDS (1)..(1410)
atggaaaaagcagatatcggaatggtcggccttggcgtcatgggctccaacctggcgctgaacatagccgagaagggctacaccgtggccgtctatgaccgtgatgagcctgtgctgaaagctttcatcgaaaaggctggccggctgcgcgacaagatcattccctgcccgacctttgaggaactggccgcgaatatccgcaagccccgtccgatcatctttctcatcaaggccggtgcgccagtcgataccgagaccacccgccttaaggcattccttgagaagggcgatatcatgatcgatgcaggcaattccgattatcgcgatacggtgcgccgcctgaaggctcttggccccaatgatccgacctttgtcggcatgggcgtttcgggtggggcggaaggcgcgcgccatggtccgtcgatgatggtcggcggcacggagcaggcctatgagcgcatcgcgccgatcctgcttgctgtcgccgccaaatatcagggcgagccctgctgtgcgctggtcggcccggatggcgcgggtcatttcgtcaaaaccatccataacggtattgaatatgccgatatgcagatgatcgccgaaatttacggcattctgcgcgatggccttggcctttcagctccggccatcggcgatgtgttcgagaagtggaacgaaggtccgctcaattcctatctgattgaaatcaccgccaaggttctcaagtccaccgacccggaaaccggcaaggcgatggtcgatatgatccttgatgaagccggccagaagggtacaggccgctgggctgccattgaggcgcagatactgggcgttcctgccacgggcatcgaagccgcggttgccgcccgttcgctgtcctccatgaagggcgagcgggaagaggccgacaaggcgtataaatccggtgcacgcacacttgatattgccaaccagacccgcttcctttccgatctggaacagggcttgctggcgggcaagatcgccgcttatgcgcaaggctttgcagtgatggaagccgcctcaagggagcatggctggaacattccgcttgccaccacggcgcgcatctggcgcgcgggctgcatcatccgctcgcagcttctggatgatattgcgcaggcttttgaaggcaatgaaagccgcaacctgctcatggccccggccttcgtgccgcgcatggaaacatctgtgaaaagccttcgccagattgtcgcgcaggccgcccttgccagcctgccgctgcccgcgctcggctctgcgctcagctatttcgacagctatacgcaggcgcttggtacggccaatctcattcagggccagcgcgatttcttcggctcgcacggcttcaagcgcattgacaaggagggggatttccacggcccctggggctga

SEQ ID NO: 11785 - protein, 469 aa, Brucella melitensis
MEKADIGMVGLGVMGSNLALNIAEKGYTVAVYDRDEPVLKAFIEKAGRLRDKIIPCPTFEELAANIRKPRPIIFLIKAGAPVDTETTRLKAFLEKGDIMIDAGNSDYRDTVRRLKALGPNDPTFVGMGVSGGAEGARHGPSMMVGGTEQAYERIAPILLAVAAKYQGEPCCALVGPDGAGHFVKTIHNGIEYADMQMIAEIYGILRDGLGLSAPAIGDVFEKWNEGPLNSYLIEITAKVLKSTDPETGKAMVDMILDEAGQKGTGRWAAIEAQILGVPATGIEAAVAARSLSSMKGEREEADKAYKSGARTLDIANQTRFLSDLEQGLLAGKIAAYAQGFAVMEAASREHGWNIPLATTARIWRAGCIIRSQLLDDIAQAFEGNESRNLLMAPAFVPRMETSVKSLRQIVAQAALASLPLPALGSALSYFDSYTQALGTANLIQGQRDFFGSHGFKRIDKEGDFHGPWG

SEQ ID NO: 11786 - DNA, 1407 bp, Salmonella enterica subsp. enterica serovar Typhi
  CDS (1)..(1407)
atgtccaagcaacagatcggcgtcgtcggtatggcagtgatggggcgcaacctcgcgctcaacatcgaaagccgtggttataccgtctccgttttcaaccgctcccgtgaaaagaccgaagaagtgattgccgagaatcccggcaaaaagctggtgccttattacacggtgaaagagtttgttgaatccctcgaaacgcctcgtcgtatcctgttaatggtgaaagcgggtgcaggtactgatgcagctatcgattcgctgaaaccgtatctggaaaaaggcgatatcattattgatggcggtaacaccttcttccaggacacaatccgtcgcaatcgcgagctgtctgcggaaggttttaactttatcggtaccggtgtttccggtggtgaagagggcgcgctgaaagggccatctatcatgcctggcggtcagaaagatgcctatgaactggtggcgccgatcctgacgaagattgctgctgtggcagaagatggcgaaccgtgcgtgacctatatcggcgccgatggcgcgggtcactacgttaagatggtccacaatggtattgaatatggcgatatgcagcttatcgctgaagcttactccttgctgaaaggcggcctgaatctcagcaatgaagagttggcgaacacttttactgagtggaataacggcgagctgagcagttatctgatcgacatcactaaagacatcttcactaaaaaagatgaagacggtaattacttgatagatgttattcttgatgaagccgccaacaaagggaccggtaaatggaccagccagagcgcgctggatctgggcgaaccgctgtcgctgattaccgaatccgtctttgcgcgttacatctcttcgctgaaagcgcaacgtgttgccgcatctaaagtgctctccgggccgaaagcgcagccggcgggcgacaaagcggaatttatcgagaaagtgcgtcgcgcgctgtatcttggcaagatcgtctcctatgcgcagggcttctcgcagctacgcgccgcgtctgatgaatatcactgggagcttaactacggcgagattgctaagattttccgtgcgggctgtatcattcgcgctcagttcctgcagaagatcaccgatgcttacgcagaaaacgccggtatcgctaacttgctgttagcgccttacttcaagaaaattgctgatgagtaccagcaggcgctgcgtgatgttgtggcttacgcggtgcagaatggcattccggtgccgacattctctgcggcagtggcctactatgacagctatcgcgccgcagtactgccagctaacttaattcaggcgcagcgtgactactttggtgcgcacacctataaacgtactgataaagaaggcattttccataccgagtggttggaataa

SEQ ID NO: 11787 - protein, 468 aa, Salmonella enterica subsp. enterica serovar Typhi
MSKQQIGVVGMAVMGRNLALNIESRGYTVSVFNRSREKTEEVIAENPGKKLVPYYTVKEFVESLETPRRILLMVKAGAGTDAAIDSLKPYLEKGDIIIDGGNTFFQDTIRRNRELSAEGFNFIGTGVSGGEEGALKGPSIMPGGQKDAYELVAPILTKIAAVAEDGEPCVTYIGADGAGHYVKMVHNGIEYGDMQLIAEAYSLLKGGLNLSNEELANTFTEWNNGELSSYLIDITKDIFTKKDEDGNYLIDVILDEAANKGTGKWTSQSALDLGEPLSLITESVFARYISSLKAQRVAASKVLSGPKAQPAGDKAEFIEKVRRALYLGKIVSYAQGFSQLRAASDEYHWELNYGEIAKIFRAGCIIRAQFLQKITDAYAENAGIANLLLAPYFKKIADEYQQALRDVVAYAVQNGIPVPTFSAAVAYYDSYRAAVLPANLIQAQRDYFGAHTYKRTDKEGIFHTEWLE

SEQ ID NO: 11788 - DNA, 1431 bp, Agrobacterium tumefaciens
  CDS (1)..(1431)
atggaacaggcagaaatcggtttgatcggtctcggcgtcatgggctcgaacctggcgttgaacatcgcagaaaagggcaacaagattgccgtattcaaccgaaccccggaagttacacgaaaattctacgctgatgcgggcgaactgcagggtcagatcattccctgcgaaaccatcgaggaattcgtcgccgccattcgtcctccgcgcccgatcatcatcatgatcaaggcaggcgatccggtcgaccagcagatggaaatcctgaaaccgcatctggccaacggcgacatcatgatcgatgccggcaatgccaacttccgcgatacgatccgccgtttcgataacctcaaggatagcggcctgacctttatcggcatgggcgtttccggcggtgaagaaggtgcgcgccatggaccgtcgatcatggttggcggcaccgaggatagctggaagcgcgtcgaaaaggttctgacctccatttccgccaagtataatgacgatccgtgcgtggcatggctcggcaatgacggtgctggtcatttcgtcaagaccatccataacggcatcgaatatgccgacatgcagatgattgccgaaatctacggcatcctgcgtgatggcctgaaaatgagcgccgtcgagatcgccgacgtgtttgccgaatggaacaagggccgcctgaattcctacctgatcgaaatcaccgagaaggttctgcgcgctgccgatccgatcaccggcaagccgatggtcgatctgatcctcgacaaggccggccagaagggcacaggcaagtggtcggtcatcgaagcccagaacatgggcgtcgctgcaaccgccatcgaggcggccgtggctgcccgtatcctgtcgtcgcagaaggatgagcgtgaagctgccgagaagatcttcggcctgccgaccctcgcagcggcccccgccgacaaaaaggccttcatcgccgatctggaaagcgcgcttctggccgccaaggtcggtgcttacgcccagggcttcgccatcatgtcggctgcttcgaaggagttcaactggaacctgccgatgccgacgattgcccgcatctggcgcgccggctgcatcatccgctcggaattccttgatgagatcacctcggcctttaccaaggatccgcatgtggccaacctcatcgtgacgccggccttctccgccatcgtcaaggataccgacgcgccgctgcgccgtgtggtgtcttacgccgtgctctccggtctgccggtttcggcgcttgcttcggcgctcggttatttcgacgcctatcgccgtggtcgcggcagcgccaacctcattcaggcacagcgcgatttcttcggtgcacatggttttgaacgcaccgatggtgtggacaagccgcacggcccatggggtagcggcgccgatattttttga

SEQ ID NO: 11789 - protein, 476 aa, Agrobacterium tumefaciens
MEQAEIGLIGLGVMGSNLALNIAEKGNKIAVFNRTPEVTRKFYADAGELQGQIIPCETIEEFVAAIRPPRPIIIMIKAGDPVDQQMEILKPHLANGDIMIDAGNANFRDTIRRFDNLKDSGLTFIGMGVSGGEEGARHGPSIMVGGTEDSWKRVEKVLTSISAKYNDDPCVAWLGNDGAGHFVKTIHNGIEYADMQMIAEIYGILRDGLKMSAVEIADVFAEWNKGRLNSYLIEITEKVLRAADPITGKPMVDLILDKAGQKGTGKWSVIEAQNMGVAATAIEAAVAARILSSQKDEREAAEKIFGLPTLAAAPADKKAFIADLESALLAAKVGAYAQGFAIMSAASKEFNWNLPMPTIARIWRAGCIIRSEFLDEITSAFTKDPHVANLIVTPAFSAIVKDTDAPLRRVVSYAVLSGLPVSALASALGYFDAYRRGRGSANLIQAQRDFFGAHGFERTDGVDKPHGPWGSGADIF

SEQ ID NO: 11790 - DNA, 1005 bp, Agrobacterium tumefaciens
  CDS (1)..(1005)
atgcagatcggaatggttgggcttggaagaatgggcgcaaacatggtgcgacggcttttgaaacagggtcatgattgcgtggttttcgacgtcaatcccgacaacgttgcgccattggtgaaggaaggcgctaccggtgccacctcgccggacgatcttgttgcgaagctgtctccgccgcgcgccgtctggctgatgctgccggcggccatcacgccgaaaattgcccgagattttgccgccagacttcaggccggcgatgccatcatcgatggcggaaattcgaactatcgcgacgcgatcgatctcgccgccgaatttgcgcctcgcggcattgatttcatcgataccggcacatccggtggcatctgggggctggagcgcggttattcgttgatgatcggcggcccggtggctgcggtccagcgtctcgacccgatcttcgcctcccttgcgcccggcgcaggtctgggcatcgccgccgacccggtcaccggaacggcaccgatgggatatctgcattgcggtccatcgggagccgggcatttcgtcaagatggtccacaatggcatcgaatatggtgtcatggcagcctatgccgaaggtctcaacatcttgaaagccgccaatgcgggcacgcaacaccgcgaggcggacgccgaaacagcccctctcgcccatccgcaatattaccagttcgacattgatcttcccgccgtcacggaggtctggcggcacggctccgtcatcggctcgtggctgcttgacctcacggcgcaggccctgaaacaggacccgaacctcgatcaatatggtgggcgcgtgtcggattccggtgaaggacgctggaccctgcaggcggccgtcgaaaccggcgtgccggcccccgttttggcatcggcccttttcgagcgtttttcctcacgcggcgaggccgaatttgccggcaaggtgctgtcggccatgcgcaatgcctttggtggccatctggagaaagccaaatga

SEQ ID NO: 11791 - protein, 334 aa, Agrobacterium tumefaciens
MQIGMVGLGRMGANMVRRLLKQGHDCVVFDVNPDNVAPLVKEGATGATSPDDLVAKLSPPRAVWLMLPAAITPKIARDFAARLQAGDAIIDGGNSNYRDAIDLAAEFAPRGIDFIDTGTSGGIWGLERGYSLMIGGPVAAVQRLDPIFASLAPGAGLGIAADPVTGTAPMGYLHCGPSGAGHFVKMVHNGIEYGVMAAYAEGLNILKAANAGTQHREADAETAPLAHPQYYQFDIDLPAVTEVWRHGSVIGSWLLDLTAQALKQDPNLDQYGGRVSDSGEGRWTLQAAVETGVPAPVLASALFERFSSRGEAEFAGKVLSAMRNAFGGHLEKAK

SEQ ID NO: 11792 - DNA, 1419 bp, Listeria monocytogenes
  CDS (1)..(1419)
atggcaaaacaagaaattggcgttataggaatgggcgttatgggtcgtaacttggctctaaacattgaaagccgcggtcatacagtatctatctttaaccgctcgactgaaaaaacgaaagcagttatggaagagaatgcggacaaaaaattagtaccaacttatagtttagaggaatttgtcgaatctcttgaagtgcctcgccgtatccttattatggtaaaagctggcgatgctacagatatgatgattgaagcagttaaacctttcttaaacgaaggcgatattttaattgatggcggtaatgctttcttcaaagatacgattcgtcgtaataaagaactaagtgaagaaggatttaatttcatcggaactggtgtatcaggcggagaagagggcgcgctgaaaggtccttctatcatgccaggtggtcaacgcaaggcatatgaccttgtagcccctattttacgtgaaattgctgcagtagcagacggagagccatgtgtgacttacattggtccagacggtgccggacattacgttaaaatggtgcataatggtatcgaatacggcgatatgcaattaatcgcagaagcttacactattttgaaagaaatcggcggattaagccatgatgaacttgctgacgtatttgaagaatggaataacggggaacttgatagctatttaatcgagatcactaaaaacatcctaaaagtaaaagacgaagaaacaggcaaaccaattgtcgatgttattctggataaagctggtcaaaaaggaactggtaaatggactagccaaagcgcacttgacttaggtgttccgctttccttaattacagaatctgtatttgctcgttacatttctgcactcaaagaagaacgcgtttatgcaagtactgttttaactgggccatcgaattatcgttttgaaggcgacaaaaaagcatttgttgaatctgttcgtcgcgcactttactttagcaaaatcgcatcttatgcacaaggttttgctcaaatgagagctgctagcgaagagtacaattgggatttacaatacggcgaaatcgcgaaaattttccgcgctggctgtattatccgtgctcgtttcctacaaaaaattacagatgcttataaccaagataaaaatcttaaaaacttactacttgatccatatttcaaagatattgcacataactaccaaggcgaccttcgtacagttgttgcagaagcagtaaaagctggaattccagtaccaacattcactgcggcaattagctactacgatagctatcgttcagaagtattatctgcaaatctaatccaagcacaacgcgactactttggcgctcatacgtatgaaagagtcgacaaacctggtgtattccatacagaatggccacaagtagaagattga

SEQ ID NO: 11793 - protein, 472 aa, Listeria monocytogenes
MAKQEIGVIGMGVMGRNLALNIESRGHTVSIFNRSTEKTKAVMEENADKKLVPTYSLEEFVESLEVPRRILIMVKAGDATDMMIEAVKPFLNEGDILIDGGNAFFKDTIRRNKELSEEGFNFIGTGVSGGEEGALKGPSIMPGGQRKAYDLVAPILREIAAVADGEPCVTYIGPDGAGHYVKMVHNGIEYGDMQLIAEAYTILKEIGGLSHDELADVFEEWNNGELDSYLIEITKNILKVKDEETGKPIVDVILDKAGQKGTGKWTSQSALDLGVPLSLITESVFARYISALKEERVYASTVLTGPSNYRFEGDKKAFVESVRRALYFSKIASYAQGFAQMRAASEEYNWDLQYGEIAKIFRAGCIIRARFLQKITDAYNQDKNLKNLLLDPYFKDIAHNYQGDLRTVVAEAVKAGIPVPTFTAAISYYDSYRSEVLSANLIQAQRDYFGAHTYERVDKPGVFHTEWPQVED

SEQ ID NO: 11794 - DNA, 897 bp, Bacillus halodurans
  CDS (1)..(897)
atggagattggattaatcggtttaggacgaatggggtacaatttgggcctcaatatccttgatcacgaacatcagcttgtcgcttatgatgtgaatcgtgaagcggtaaaagaaattggcttagctggtgcaaaagaagctgattcgctagaagagctcgtaagcaaactatcagcaccacgcaagatttgggtcatggttccagccggggatataacagaaaatgtcgtttcacagctaagctctcttttggacgaaggggatgttgtgattgatggcgggaatgcgaattataaggatacgttacgccgtgcaaagcaatatgaggcgaaggggcttcattttgtggatgcaggaacaagcggtggcattgacggggcacgtgaaggtgcttgtttaatggtgggaggaacgaaagaggttgttgaatctttagcccccctattaaaagaaatcgcagtagaagatggatatttatatacaggccctgtcggtagtggacattttttaaagatgattcataacggaatagagtacggtatgatgcaagcgattgcagaagggtttgacctgttagaaaacagtccgtttgactatgattacgaagcggtagcaaaagtgtggaacaacggttcggtcatccgatcatggctaatggaactaaccgaatcagccttttcaaaggatgcgaacttagaaaagattcgcggtgtgatgcattcgtccggtgagggaaaatggacggtggaaaccgcgctagatttacaaatcgaagcgcctgtaatcgctttgtctttaatgatgcgctatcgttccttacgtgatgatacgttttcagggaaagtggttgccgctttaagaaatgaatttggtgggcacgcagttgtaaaaagttga

SEQ ID NO: 11795 - protein, 298 aa, Bacillus halodurans
MEIGLIGLGRMGYNLGLNILDHEHQLVAYDVNREAVKEIGLAGAKEADSLEELVSKLSAPRKIWVMVPAGDITENVVSQLSSLLDEGDVVIDGGNANYKDTLRRAKQYEAKGLHFVDAGTSGGIDGAREGACLMVGGTKEVVESLAPLLKEIAVEDGYLYTGPVGSGHFLKMIHNGIEYGMMQAIAEGFDLLENSPFDYDYEAVAKVWNNGSVIRSWLMELTESAFSKDANLEKIRGVMHSSGEGKWTVETALDLQIEAPVIALSLMMRYRSLRDDTFSGKVVAALRNEFGGHAVVKS

SEQ ID NO: 11796 - DNA, 918 bp, Halobacterium sp. NRC-1
  CDS (1)..(918)
atggaactcggagtcgtcggcctcggccgcatggggcgcatcgtcgtcgaccgctgtctcgacgccggccacgacgtggtcgcgttcgacatcgacgcgaccgcgcgcgaggacgcggccgacgcgggcgcgacgcccgccgacacgctggacgcactcgccgcggagctcggtgccgagaagcgcatctggctgatggtgccggcgggcgaccccgttgacgccgccctcgacgaactcgcgccgcacctcgattccgacgacgtcgtcgtggacggcgggaacagccacttcgaggactcgacgcgccgcgccgaggaacacgacttcgcgtacctcgactgtggtacttcgggcggccccgccggcgcggaactcgggttctccctgatggtcggcggccccgagtgggcgtacgacgacctcgtgcccgtcttcgacgccgtcgctaccggcccagacggccacgaccgcatgggaccggcaggcgccggccactacgtcaaaatggtgcacaacggcgtcgagtacgcgctcatgcagacctacggcgaggggttcgagttgctccacgaggggcgctacgatctcgacctggaggccgtcgcgcgaacctggaacaacggcgccgtgatccggtcgtggctgctggagctctgcgaggaagcgttccgcgaggagggcagcgatctcggcaccgtcgccgaccacgtggccggcggctccacgggcacctggaccgtccaggaagccctcgaacaggaggtcccggtgcccctcgtctcccaggcgctctccgagcggttcggctcccgcagtaccggcggcgacaccggccggttcgcgcgccgcctggccaaccggctgcgctacgggttcggccgccacgaggtcgcccgcaccggcgacgacgcctag

SEQ ID NO: 11797 - protein, 305 aa, Halobacterium sp. NRC-1
MELGVVGLGRMGRIVVDRCLDAGHDVVAFDIDATAREDAADAGATPADTLDALAAELGAEKRIWLMVPAGDPVDAALDELAPHLDSDDVVVDGGNSHFEDSTRRAEEHDFAYLDCGTSGGPAGAELGFSLMVGGPEWAYDDLVPVFDAVATGPDGHDRMGPAGAGHYVKMVHNGVEYALMQTYGEGFELLHEGRYDLDLEAVARTWNNGAVIRSWLLELCEEAFREEGSDLGTVADHVAGGSTGTWTVQEALEQEVPVPLVSQALSERFGSRSTGGDTGRFARRLANRLRYGFGRHEVARTGDDA

SEQ ID NO: 11798 - DNA, 1407 bp, Buchnera sp
  CDS (1)..(1407)
atgtcacggcaacaaataggtgttgtcggaatggcagtcatgggacgaaatttagcattaaatattgaaagcaaaaattacagcgtatctatattcaatagaactagatcagtaacagaagaagtatttaatcagaataagaaaaaaaatattgtcccatatttttctattaaagattttattgattcacttctcaagcctagatgcatcttattaatggttcaatctggaaaagctactgatgaaactatcaagatgattctgccctatttagaaaaagaagatatattaattgatgcaggtaatacattttacaaagacactattcggagaaatgaaaaattatctaaatatgagattaattttattggaatgggggtgtctggaggtgaattaggagcattaaacggtccctctattatgccgggcggacaaaaagaagcatacaaacttgttttacctatgttagaaaaaatatcagcaaagtttaaaggtgagccatgtgtaagctatattggtcctaatggtgcaggtcattatgtaaaaatggtacacaatggtattgaatatggtgatatgcagttaatatcagagtcatattttttattaaaatatttattaaatatgagtaatgaagaattatcatctacattttctaaatggaataaaggtgaattaaatagttatttaattgaaataacaaaaaatatttttattgaaaaagatgaaaagggaaaatatttgatagatcgtattttagatgtagcagaagataaaggtactggtaagtggattagcaaaagtgctttagatcttcgagaaccgctttcattaattactgaatccgtttttgctcgttatttatcttctctaaaaagacaacgcataattgcatcaaaaatattacagggtccaaagataaaaacgtttattaaagataaaaatagttttattgaagaagttcgacgagctttatatttaggtaagataatttcttatgctcaaggtttttctcaattaaaaagagcgtcagaaaaatatcattggaatttaaaatatggtgaaattgctaagatttttagagcagggtgtattatacgagcaaattttttacaaaaaataacagacgaatatactcaaaataaaaatgtagttaatttattattaacaccttatttttccaaaatagctaatgaatatgaaaattcattacgcaatattgttatgtatgcgataaaatatggaatttctactccaactttttctgcggcaatatcatattatgatagttatagagcattatatttaccggctaacttaattcaggctcaaagagattattttggttcacatacttatcaaagaacagatcagactggttactttcatacaaactggtctcaataa

SEQ ID NO: 11799 - protein, 468 aa, Buchnera sp
MSRQQIGVVGMAVMGRNLALNIESKNYSVSIFNRTRSVTEEVFNQNKKKNIVPYFSIKDFIDSLLKPRCILLMVQSGKATDETIKMILPYLEKEDILIDAGNTFYKDTIRRNEKLSKYEINFIGMGVSGGELGALNGPSIMPGGQKEAYKLVLPMLEKISAKFKGEPCVSYIGPNGAGHYVKMVHNGIEYGDMQLISESYFLLKYLLNMSNEELSSTFSKWNKGELNSYLIEITKNIFIEKDEKGKYLIDRILDVAEDKGTGKWISKSALDLREPLSLITESVFARYLSSLKRQRIIASKILQGPKIKTFIKDKNSFIEEVRRALYLGKIISYAQGFSQLKRASEKYHWNLKYGEIAKIFRAGCIIRANFLQKITDEYTQNKNVVNLLLTPYFSKIANEYENSLRNIVMYAIKYGISTPTFSAAISYYDSYRALYLPANLIQAQRDYFGSHTYQRTDQTGYFHTNWSQ

SEQ ID NO: 11800 - DNA, 1455 bp, Haemophilus influenzae
  CDS (1)..(1455)
atgtcagtaaaaggcgacatcggtgttatcggcttagccgtaatggggcaaaacctcattttaaatatgaacgaccacgggtttaaagtcgtggcatataaccgtaccacttcaaaagtggatgagtttttacaaggtgcggcaaaaggcaccaatattatcggcgcatactctttagaagatttagctgctaaattagaaaaaccacgtaaagtgatgttaatggtgcgcgctggtgatgtggtggatcaattcattgaagcattattaccacatttagaagagggcgacatcattattgatggcggtaactcaaactatccagatacgaaccgtcgagtgaaagccttggcggagaaaggtattcgctttatcggttcgggtgtgtctggtggcgaagaaggggcgcgtcacgggccttcaattatgccgggcggtaatcaagaagcgtggcagtatgtgaaacctatcttccaagcaatttcagctaaaacagaacaaggcgaaccttgttgtgactgggtcggcggcgaaggtgctggtcattttgtgaaaatggttcacaatggtattgaatatggcgatatgcagttaatttgcgaagcataccaattcttaaaagaaggtttaggcttaagctatgaagaaatgcaagccatcttcgcagaatggaaaaatactgaacttgatagctatttaatcgatatcaccactgacattcttggttataaagatgcaagtggagaacctttagtcgaaaaaatcttggatactgcgggtcaaaaagggacaggtaaatggacaggtatcaatgcgttagattttggtattccattaactttaatcactgaatccgtttttgcacgctgcgtgtcttcctttaaagatcaacgtgttgcggctaatcaattattcggcaaaactattacaccagttgaaggcgacaaaaaagtatggattgaagcggtacgtaaagcattattagcgtcaaaaattatttcttacgcacaaggctttatgctgattcgtgaagcctctgaacaatttggttgggatattaactatggtgcaacggcgttgttatggcgtgaaggttgtatcattcgtagccgtttcttaggtaatattcgcgatgcttatgaagcaaatccaaatcttgttttcttaggttcagatagctacttcaaaggcattttagaaaacgcattaagtgactggcgtaaagtggtggcaaaatctatcgaagtgggtatcccaatgccttgtatggcgtctgcgattactttcttagatggctatacttcagcacgtttaccagcaaacttattgcaagcacaacgcgactacttcggtgctcatacttatgaacgcacagataaacctcgtggcgagtttttccacactaactggactggtcgtggcggtaatacagcatcaactacttatgatgtgtag

SEQ ID NO: 11801 - protein, 484 aa, Haemophilus influenzae
MSVKGDIGVIGLAVMGQNLILNMNDHGFKVVAYNRTTSKVDEFLQGAAKGTNIIGAYSLEDLAAKLEKPRKVMLMVRAGDVVDQFIEALLPHLEEGDIIIDGGNSNYPDTNRRVKALAEKGIRFIGSGVSGGEEGARHGPSIMPGGNQEAWQYVKPIFQAISAKTEQGEPCCDWVGGEGAGHFVKMVHNGIEYGDMQLICEAYQFLKEGLGLSYEEMQAIFAEWKNTELDSYLIDITTDILGYKDASGEPLVEKILDTAGQKGTGKWTGINALDFGIPLTLITESVFARCVSSFKDQRVAANQLFGKTITPVEGDKKVWIEAVRKALLASKIISYAQGFMLIREASEQFGWDINYGATALLWREGCIIRSRFLGNIRDAYEANPNLVFLGSDSYFKGILENALSDWRKVVAKSIEVGIPMPCMASAITFLDGYTSARLPANLLQAQRDYFGAHTYERTDKPRGEFFHTNWTGRGGNTASTTYDV

SEQ ID NO: 11802 - DNA, 1023 bp, Mycobacterium tuberculosis
  CDS (1)..(1023)
atgcaactaggaatgatcggtctgggccggatgggtgcgaatatcgtccgccgcttggccaaaggtggacacgactgcgtggtctacgaccacgaccccgacgcggtcaaggcgatggccggggaggaccggaccaccggggtggcctcgttgcgtgagttgtctcagcggctctccgccccgcgagttgtctgggtgatggtgcccgcggggaacatcaccaccgcggtgatcgaagagctggccaacacgctcgaggccggcgacattgtgatcgacggtggcaacacctattatcgcgacgatctgcggcacgaaaagctgttgttcaagaagggaattcacctactcgactgtggcaccagcggcggtgtgtggggtcgggaacgtggctactgcctgatgatcggcggggatggcgacgcgttcgcgcgcgcggagccgatcttcgccaccgtcgcgccgggggtggcggccgccccgcgcaccccgggccgagacggtgaggtcgcgccatcggaacaaggctatttgcattgtgggccttgcggttcgggtcacttcgtgaagatggtccacaacggcatcgaatacgggatgatggcctccttggcggagggattgaacatcctgcgcaatgccgacgtcggcacccgcgtgcaacacggtgacgccgaaaccgcgccgctgccgaatcccgagtgctaccagtacgacttcgacatcccggaggtcgccgaggtatggcggcggggcagcgtgatcggctcctggctgctggatttgaccgcgatcgcgctgcgcgaatcacctgacctagcggaattctccggacgggtctccgactctggcgagggccggtggaccgccatcgcggcgatcgacgagggcgtgcccgcgccggtgctgaccaccgcgctgcagtcccgcttcgcctcgcgtgacctcgacgacttcgccaacaaggcgctgtcggcgatgcgcaagcagttcggcggacacgccgagaaaccggctaactaa

SEQ ID NO: 11803 - protein, 340 aa, Mycobacterium tuberculosis
MQLGMIGLGRMGANIVRRLAKGGHDCVVYDHDPDAVKAMAGEDRTTGVASLRELSQRLSAPRVVWVMVPAGNITTAVIEELANTLEAGDIVIDGGNTYYRDDLRHEKLLFKKGIHLLDCGTSGGVWGRERGYCLMIGGDGDAFARAEPIFATVAPGVAAAPRTPGRDGEVAPSEQGYLHCGPCGSGHFVKMVHNGIEYGMMASLAEGLNILRNADVGTRVQHGDAETAPLPNPECYQYDFDIPEVAEVWRRGSVIGSWLLDLTAIALRESPDLAEFSGRVSDSGEGRWTAIAAIDEGVPAPVLTTALQSRFASRDLDDFANKALSAMRKQFGGHAEKPAN

SEQ ID NO: 11804 - DNA, 1449 bp, Vibrio cholerae
  CDS (1)..(1449)
atgaaaggtgatatcggtgtaatcggccttgcagtaatgggccagaacctgatcctcaacatgaacgaccacggcttcaaagtggtggcacacaaccgtaccgcggctaaagtggacgagtttctagaaggcccagcaaaaggcactaacattgttggcgcttacactctgcaagagctggtcgataaactggcgacgccacgcaaagtgatgctgatggttcgtgcaggtcaagtggttgatgacttcatcgagcaactggttccactgctcgacaaaggtgacatcatcattgatggtggtaacaccaacttccctgatactaaccgccgtgtcaaagcgctgcgtgaaaaaggcattcacttcatcggtacgggtgtttctggtggtgaagaaggtgcacgtttcggaccttcgatcatgccgggtggcgcacctgaagcatgggaagcggtaaaaccgattttccaaggcatttctgcaaaaactgacgctggtgagccttgctgtgactgggtgggcaacgatggtgccggtcacttcgtgaaaatggttcacaacggtatcgaatacggcgacatgcagcttatcactgaagcttaccagttcatgaaagatggtctgggaatgtcggccgatgaaatgcaagccgtatttgctgactggaacaaaactgagctagacagctacttggttgagatcaccgctgacatccttggctacaaagatgaagatggtgaagcgttggttgagaagatcctcgatactgctggccaaaaaggcacaggtaaatggacgggtatcaacgcgctggacatgggcatcccactgactctgatcaccgaatccgtgttctctcgctgcctatccgcactgaaagatcaacgtgttgaagctgaaaaactgtttggtaaaaccaaaactcaagtcgaaggtgacaaacaagtttgggttgatgcgctgcgtcaagcgctgctggcttcaaaaatcatctcttacgcacaaggctttatgctgatgcgtgaagcatcgaacgagaatggttggaacctgaactacggtaacgtggctctgatgtggcgtggtggttgtatcatccgctctgcgttcctaggcaacatccgtgatgcgtttgaaaagaacccagaactggcgttcttaggttctgatgcgtacttcaaaggtattctggacaactgtctggctgcatggcgtaaagtggcagcgaagtcgctggaagtcggcattccaatgccatgtacgacttcagcactgaccttccttgatggttacactacggctcgcctgccagcgaacctgctgcaagcacagcgtgattactttggtgcgcacacttatgagcgtatcgatcgtccgcgtggtgagttcttccacactaactggacgggtacaggcggtaatactgcgtctactacttacgacgtgtaa

SEQ ID NO: 11805 - protein, 482 aa, Vibrio cholerae
MKGDIGVIGLAVMGQNLILNMNDHGFKVVAHNRTAAKVDEFLEGPAKGTNIVGAYTLQELVDKLATPRKVMLMVRAGQVVDDFIEQLVPLLDKGDIIIDGGNTNFPDTNRRVKALREKGIHFIGTGVSGGEEGARFGPSIMPGGAPEAWEAVKPIFQGISAKTDAGEPCCDWVGNDGAGHFVKMVHNGIEYGDMQLITEAYQFMKDGLGMSADEMQAVFADWNKTELDSYLVEITADILGYKDEDGEALVEKILDTAGQKGTGKWTGINALDMGIPLTLITESVFSRCLSALKDQRVEAEKLFGKTKTQVEGDKQVWVDALRQALLASKIISYAQGFMLMREASNENGWNLNYGNVALMWRGGCIIRSAFLGNIRDAFEKNPELAFLGSDAYFKGILDNCLAAWRKVAAKSLEVGIPMPCTTSALTFLDGYTTARLPANLLQAQRDYFGAHTYERIDRPRGEFFHTNWTGTGGNTASTTYDV

SEQ ID NO: 11806 - DNA, 1407 bp, Bacillus subtilis
  CDS (1)..(1407)
atgttcaattcgattggtgtcataggcttaggcgtaatgggaagcaacatcgccttaaacatggcaaataaaggcgaaaacgtcgctgtctataattacaccagagatttaacggaccagcttatccaaaagctggatggacaatctctcagcccgtattacgagcttgaggactttgttcaatcgttagaaaaaccaagaaaaatctttttgatggtcacagcgggaaaacccgtagattccgtcatccaatcattaaagcctttgcttgaagaaggcgacgtcatcatggacggaggaaactcccactatgaagacacagaaagaagatatgacgagctgaaggaaaaagggatcggctacctgggagtcggcatttccggcggtgaagtcggtgcgttaacagggccttccatcatgccgggcggagatcgcgacgtctatgagaaagccgctcctatcctgacgaaaatcgcagcccaagtcggagatgacccttgctgtgtctatatcggaccaaaaggggcagggcactttacaaaaatggtgcacaacggcattgaatatgccgacatgcagctgattgcagaagcttatacgtttctaagagaaacgcttcgtctgccgctagatgaaattgcatctatttttgaaacatggaatcaaggtgagctgaaaagctatttaatagagattacagctgagattttacgcaaaaaagacgaaaaaacaggacagcctctgatcgatgtcatccttgataaaaccggccaaaaaggcaccggaaaatggacgagcatgcaggcgattgataacggcatcccgtccacgatcatcacagagtccttgttcgcccgctacttgtcatctttaaaagaagaacggatggcagctcaagatgtattagcaggcccggaagccgaagaaaaacacttggataaagacacttggattgaatacgtcagacaggctctttacatggggaaagtatgcgcctatgcacaaggctttgcccaatataagatgtcatctgagctttacggctggaatctgccgctcaaagacatcgccttgattttccgaggcggctgcatcatccgcgctgatttcctaaacgtgatcagcgaagcattcagtgagcagccaaatctggctaacctgctgatcgcgccttatttcacagataagctccatgcctatcaaacaggcctgcgaaaagtcgtttgcgagggtatcagcaccggaatctctttcccatgcttaactaccgcgctctcttattacgacggctaccgcacagggcgttccaatgcgaacctcttgcaggcacagcgcgattactttggcgctcacacgtacgaacggactgatatggacggcgtcttccatacgaattggtctgaataa

SEQ ID NO: 11807 - protein, 468 aa, Bacillus subtilis
MFNSIGVIGLGVMGSNIALNMANKGENVAVYNYTRDLTDQLIQKLDGQSLSPYYELEDFVQSLEKPRKIFLMVTAGKPVDSVIQSLKPLLEEGDVIMDGGNSHYEDTERRYDELKEKGIGYLGVGISGGEVGALTGPSIMPGGDRDVYEKAAPILTKIAAQVGDDPCCVYIGPKGAGHFTKMVHNGIEYADMQLIAEAYTFLRETLRLPLDEIASIFETWNQGELKSYLIEITAEILRKKDEKTGQPLIDVILDKTGQKGTGKWTSMQAIDNGIPSTIITESLFARYLSSLKEERMAAQDVLAGPEAEEKHLDKDTWIEYVRQALYMGKVCAYAQGFAQYKMSSELYGWNLPLKDIALIFRGGCIIRADFLNVISEAFSEQPNLANLLIAPYFTDKLHAYQTGLRKVVCEGISTGISFPCLTTALSYYDGYRTGRSNANLLQAQRDYFGAHTYERTDMDGVFHTNWSE

SEQ ID NO: 11808 - DNA, 1407 bp, Klebsiella pneumoniae
  CDS (1)..(1407)
atgtccaagcaacagatcggggttgtcggtatggctgtgatggggcgtaaccttgcgctgaacatcgaaagccgtggttataccgtctccgttttcaaccgctcccgtgaaaagaccgaagaagttattgccgaaaacacaggcaagaaactggtcccttactacacagtacaagagtttgttgaatccctcgagacaccacgtcgtatcctgttgatggtgaaggccggggctggcaccgacagcgccattgattccctgaagccttaccttgataaaggcgacatcatcattgatggcggcaacaccttcttccaggacaccatccgtcgtaaccgtgaactctctgccgaaggttttaactttatcggtaccggtgtttccggcggcgaagagggcgctctgaaagggccttccatcatgcctggtggccagaaagaagcctatgaactggtagcaccaattctgaagcagattgcggcggtggctgaagacggcgagccgtgtgtgacctatatcggtgctgacggtgcgggccattatgtgaagatggtgcataacggcattgagtatggtgacatgcagctgattgccgaagcctatgcgctgctgaaaggcggtctggcgctctctaacgaagagctggcgcaaacctttaccgaatggaacgaaggtgaactgagcagctacctgatcgacattaccaaagatatcttcaccaagaaggatgaagagggtaaatacctcgttgatgttattcttgatgaagcggcaaacaaaggtaccggcaagtggaccagccagagctcactggatctcggcgaacctctttctctgatcacggagtccgtatttgctcgttacatctcttcgcttaaagaccagcgtgtcgccgcgtcgaaagtgctgagtggtccgcaggctcaaccggtcggtgataaagcgggatttatcgaaaaagttcgtcgcgcgttgtacctcggtaaaatcgtttcctatgctcagggcttctcccagctgcgtgctgcttctgatgaatacaactgggatctgaactacggcgagatcgctaagattttccgcgcgggctgtatcattcgtgcgcagttcctgcagaagatcaccgatgcttatgcgcaaaacgctggcattgctaacctcctgctggcaccgtacttcaaacagatcgctgatgactatcagcaggcgctgcgtgatgtcgtggcgtatgccgtacagaatggtattccggtaccgacggtctcagcggcaattgcctactacgacagctaccgttccgcagttctgccagctaacctgatccaggctcagcgcgattattttggtgcgcacacctataagcgtactgataaagaaggtgtattccataccgagtggttggaataa

SEQ ID NO: 11809 - protein, 468 aa, Klebsiella pneumoniae
MSKQQIGVVGMAVMGRNLALNIESRGYTVSVFNRSREKTEEVIAENTGKKLVPYYTVQEFVESLETPRRILLMVKAGAGTDSAIDSLKPYLDKGDIIIDGGNTFFQDTIRRNRELSAEGFNFIGTGVSGGEEGALKGPSIMPGGQKEAYELVAPILKQIAAVAEDGEPCVTYIGADGAGHYVKMVHNGIEYGDMQLIAEAYALLKGGLALSNEELAQTFTEWNEGELSSYLIDITKDIFTKKDEEGKYLVDVILDEAANKGTGKWTSQSSLDLGEPLSLITESVFARYISSLKDQRVAASKVLSGPQAQPVGDKAGFIEKVRRALYLGKIVSYAQGFSQLRAASDEYNWDLNYGEIAKIFRAGCIIRAQFLQKITDAYAQNAGIANLLLAPYFKQIADDYQQALRDVVAYAVQNGIPVPTVSAAIAYYDSYRSAVLPANLIQAQRDYFGAHTYKRTDKEGVFHTEWLE

SEQ ID NO: 11810 - DNA, 1458 bp, Mycobacterium tuberculosis
  CDS (1)..(1458)
atgagttcgtcggaatcgccagccggcatcgcgcagatcggcgtcactggcctggccgtgatgggttccaacatcgcccgaaacttcgcccggcacggctacaccgtggcagtgcacaatcggtcggtcgccaagaccgacgcgctgcttaaggagcacagctcagacggcaagttcgtgcgcagtgaaacgatccccgaatttcttgccgcactggaaaaaccgcgtcgggtgctgatcatggtcaaggccggagaggccactgacgctgacgctgtcatcaacgaacttgctgacgccatggaacccggcgacatcatcatcgacggcggcaatgcgttgtacaccgacaccatgcgccgcgagaaagcgatgcgtgagcggggcttgcacttcgtcggggccgggatctccggcggcgaagagggcgcgttgaacgggccgtcgatcatgcccggcggacccgccgagtcataccaatcgctgggtccgctgctcgaggagatctccgcgcatgtcgacggcgtgccgtgctgcacccacattggcccggacggctccgggcacttcgtcaagatggtccacaacggcatcgagtactccgacatgcagctcatcggtgaggcctaccagctgatgcgcgacgggctaggtctgaccgcgccggcgatcgccgatgtgttcaccgagtggaacaatggcgatctggacagctacctggtcgagatcaccgccgaggtgctgcggcagaccgatgccaagaccggcaaaccgctcgtcgacgtcatcgtggaccgggccgagcagaaaggcaccggccgttggaccgtcaagtccgcgctggacctgggtgtgccggtgaccggcatcgccgaagcggtgtttgcccgcgctctctcgggatccgtggggcaacgctcggccgccagcggtctggcttcgggcaagctcggcgagcagcccgccgaccccgccacgttcaccgaagacgtccgccaggcgttgtacgcctccaagatcgtggcctacgctcagggcttcaaccagatccaggccggcagcgccgaattcggctgggacatcacgccgggcgacctggccaccatctggcgtggcggctgcatcatccgggcgaagttcctcaaccacatcaaggaagcctttgacgccagcccgaacctggccagtctgattgtggccccgtatttccgcggcgccgtcgaatcggcgatcgacagttggcggcgtgtggtgtcgacggcggcccaactgggtatcccgaccccgggattctcgtcggccctgtcgtattacgacgcgctgcgcaccgcgcggctgcccgctgcactcacccaggcccagcgcgacttcttcggcgcacacacctacggccggatcgacgaaccaggcaagttccacacactatggagttcagaccgcaccgaagtaccggtgtag

SEQ ID NO: 11811 - protein, 485 aa, Mycobacterium tuberculosis
MSSSESPAGIAQIGVTGLAVMGSNIARNFARHGYTVAVHNRSVAKTDALLKEHSSDGKFVRSETIPEFLAALEKPRRVLIMVKAGEATDADAVINELADAMEPGDIIIDGGNALYTDTMRREKAMRERGLHFVGAGISGGEEGALNGPSIMPGGPAESYQSLGPLLEEISAHVDGVPCCTHIGPDGSGHFVKMVHNGIEYSDMQLIGEAYQLMRDGLGLTAPAIADVFTEWNNGDLDSYLVEITAEVLRQTDAKTGKPLVDVIVDRAEQKGTGRWTVKSALDLGVPVTGIAEAVFARALSGSVGQRSAASGLASGKLGEQPADPATFTEDVRQALYASKIVAYAQGFNQIQAGSAEFGWDITPGDLATIWRGGCIIRAKFLNHIKEAFDASPNLASLIVAPYFRGAVESAIDSWRRVVSTAAQLGIPTPGFSSALSYYDALRTARLPAALTQAQRDFFGAHTYGRIDEPGKFHTLWSSDRTEVPV

SEQ ID NO: 11812 - DNA, 1452 bp, Mycobacterium leprae
  CDS (1)..(1452)
atgagtgcgccggaatcgaagacggccattgcgcagatcggcgtcaccgggctagccgtgatgggttcgaacatcgcccggaatttcgcccgacacggctataccgtggcgttgcacaatcggtcaatcgccaagaccgacacactgctcaaagagcacggatccgaagggaatttcgtgcgaaccgaaacgatccccgagttccttgccgcactacagactccgcgacgggtgctgatcatggtaaaagccggtgacgccaccgatgccgtcatcaatgaactcgccgatgttatggaacccagcgacatcatcatcgacggcggcaattcgctgttcaccgacaccattcgccgcgaaaaagcaatgcgtgagcgtggcctgcacttcgtcggcgccgggatctccggcggcgaggagggtgcactgaacggaccgtcgatcatgcccggcgggcccgccgaatcgtatacctcgctgggcccgctgcttgaggagatttccgcgcacgtcgacggggtgtcgtgttgcacccacatcgggccaggcgggtcgggccacttcgtcaaaatggtccacaacggcatcgagtactccgacatgcagctcattggcgaggcctaccagctgctgcgcgacggattgggcatgagtgcaccgcaaatcgctgacgtgtttaccgaatggaacaggggcgatctgaacagctacttggtagagatcaccgctgaagtgttgcgccagaccgatatcaagaccggcaggccgctggtcgatgtcatcctcgataaggccgagcaaaagggtaccggccggtggaccgtacagtccgccctggacttgggcgtgccgataactggaatagccgaggcggtgttcgcgcgcgcgctgtcgggttcggtgctgcaacgcaaggccgccatcgggctggcctccggcaagttgggcaacaaacccacagatcgcgagacattcatcgaagacgtacgccaggccctgtatgcctccaagattgtggcctacgcgcaggggttcaatcacatccaaaccggtagtaccgagttcggttggaacatcacaccgggtgacttggcgaccatctggcgcggcggctgcatcatccgggcgaagtttctcaaccgcatcaaggaagctttcgacgccgcccccgacctggccagcctgatcgttgcgccgtatttccgcagtgctgtcgaatcggcgattgacagttggcggcgtgtggtgtccacagctacccagctaggtatcccaaatcccggcttctcgtccgcgttgtcgtactacgatgcgctgcgcaccgagcgacttccggccgcactgacccaggctcaacgtgactttttcggcgcgcacagctacggacgcgtcgacgcgcggggcaaattccacacactatggagtgaagaccgtagcgaagttacggtctag

SEQ ID NO: 11813 - protein, 483 aa, Mycobacterium leprae
MSAPESKTAIAQIGVTGLAVMGSNIARNFARHGYTVALHNRSIAKTDTLLKEHGSEGNFVRTETIPEFLAALQTPRRVLIMVKAGDATDAVINELADVMEPSDIIIDGGNSLFTDTIRREKAMRERGLHFVGAGISGGEEGALNGPSIMPGGPAESYTSLGPLLEEISAHVDGVSCCTHIGPGGSGHFVKMVHNGIEYSDMQLIGEAYQLLRDGLGMSAPQIADVFTEWNRGDLNSYLVEITAEVLRQTDIKTGRPLVDVILDKAEQKGTGRWTVQSALDLGVPITGIAEAVFARALSGSVLQRKAAIGLASGKLGNKPTDRETFIEDVRQALYASKIVAYAQGFNHIQTGSTEFGWNITPGDLATIWRGGCIIRAKFLNRIKEAFDAAPDLASLIVAPYFRSAVESAIDSWRRVVSTATQLGIPNPGFSSALSYYDALRTERLPAALTQAQRDFFGAHSYGRVDARGKFHTLWSEDRSEVTV

SEQ ID NO: 11814 - DNA, 1953 bp, Ovis orientalis aries, Ovis ammon aries (domestic sheep)
  CDS (71)..(1522)
ctcgccgtgcgctccctgtgcttcgggtctgcttgctccagcctgctttgccgccgccgccatcgccgccatggcccaagctgacattgccctgattggactggctgtcatgggccagaacttaattttaaacatgaatgaccatggctttgtggtctgtgcttttaataggacagtctccaaagttgatgacttcttggctaatgaggcgaagggcaccaaggtgcttggcgctcactccttggaggaaatggtgtccaagctgaagaagccacggcggatcatcctgcttgtgaaggccggtcaggccgtcgataatttcattgagaaactggtacctttgctagacattggtgatatcatcattgatggaggaaattctgaatacagggataccatgagacggtgccgagacctcaaggataagggcatcttattcgtggggagcggagttagtggtggagaggatggggcccgctatggcccgtcgcttatgccgggagggaacaaggaggcctggccccacatcaaggccatctttcaaggcatcgccgccaaagtggggacaggagaaccctgctgtgactgggtgggggacgacggtgcaggacactttgtgaagatggtgcacaacggcatagagtacggggacatgcagctcatctgtgaggcctaccacctgatgaaggacgtcctgggcctggggcacaaggagatggccaaggcctttgaggaatggaataaaacagagctggactcattcctgattgaaatcacagccagtattctcaagttccaagatgctgatggcaaacacctgctgccaaagatccgggacagcgcagggcagaagggcaccgggaagtggaccgccatctctgccctggagtacggcgtgcccgtcaccctcatcggagaagctgtcttcgcgagatgcttatcatctctgaaggacgagaggatccaagccagcaaaaagctgaaggggcctcaaaatatcccatttgaaggagataagaaatcattcctggaggacattcgaaaggccctctatgcttccaagatcatctcttacgctcagggcttcatgctgttaagacaggcagcaactgaatttggctggaccctcaactatggcggcatcgccctgatgtggaggggcggctgcatcatcaggagtgtattcctgggaaagataaaagatgcatttgatcgaaacccaggacttcagaatctattgctggatgacttttttaagtcagctgtggaaaactgccaggactcctggcggcgggccatcagtactggtgtccaggcaggcattcccatgccctgctttaccactgctctctctttctacgatgggtacagacacgcgatgctgccggccaacctcatccaggctcagcgcgactactttggggcgcacacctacgaactcttggccaagccgggccagttcatccacaccaactggacgggccacgggggcagcgtgtcctcgtcgtcgtacaacgcctgatgggcttctgttccaagccacaactctacagaccaggacattccatctgccacacagcactgcttgcatggccctctgccctactttctgctcagatcttttaaaataccatgtgtcgtaagagactcctttgaagagttggcccgagtctctgagtgtcaagtagttctgagagaaccagcacgccctctgccctcgcctcttgggacggagcaggagtggagtgtgtgcgaggcagctgcccgaggcagcgttccctgcaggtcccctgtgggtgagggaggcagcggctctcatcaaggtggggaagggttttgtagaatttgatcaaactggaacctttgtatcacacacctgaactccctttccttttacttaataaaagaaaaaaaacataaaaaaaaaaaaaaaaaaaaaaaaaaaaaaaaaaa

SEQ ID NO: 11815 - protein, 483 aa, Ovis orientalis aries, Ovis ammon aries (domestic sheep)
MAQADIALIGLAVMGQNLILNMNDHGFVVCAFNRTVSKVDDFLANEAKGTKVLGAHSLEEMVSKLKKPRRIILLVKAGQAVDNFIEKLVPLLDIGDIIIDGGNSEYRDTMRRCRDLKDKGILFVGSGVSGGEDGARYGPSLMPGGNKEAWPHIKAIFQGIAAKVGTGEPCCDWVGDDGAGHFVKMVHNGIEYGDMQLICEAYHLMKDVLGLGHKEMAKAFEEWNKTELDSFLIEITASILKFQDADGKHLLPKIRDSAGQKGTGKWTAISALEYGVPVTLIGEAVFARCLSSLKDERIQASKKLKGPQNIPFEGDKKSFLEDIRKALYASKIISYAQGFMLLRQAATEFGWTLNYGGIALMWRGGCIIRSVFLGKIKDAFDRNPGLQNLLLDDFFKSAVENCQDSWRRAISTGVQAGIPMPCFTTALSFYDGYRHAMLPANLIQAQRDYFGAHTYELLAKPGQFIHTNWTGHGGSVSSSSYNA

SEQ ID NO: 11816 - DNA, 1449 bp, Neisseria meningitidis
  CDS (1)..(1449)
atgaacggcgatattggtgtaatcggtttggcggttatggggcaaaacctgattttgaatatgaacgattgcggatttaaggtggttgcctacaaccgcacgactgccaaggtggacgaatttttaaacggcgcggcaaaaggaactaatattatcggcgcgtattctttgcaagatttggtcgataagctggaaaaaccgcgaaaaattatgatgatggttcgtgccggttcggtggttgacgaatttatcgaacaactgcttccgctgttggaagaaggcgacatccttatcgacggcggcaatgccaattaccccgacacgacacggcggacacattaccttgctgaaaaagggattttgtttgtcggcgcgggcgtgtccggcggggaagaaggggcgcggcgcgggccgtccattatgccgggcggggataagcgcgcttgggatgcggtcaagccgatttttcaggcgattgccgccaaaacgtcgcagggcgaaccgtgttgcgactgggtcggcaaagacggtgcggggcattttgtcaaaatggtgcataacggcatcgaatatggcgatatgcagttgatttgcgaagcgtaccagttcatgaaagacggcttggggctgtcttacgacgaaatgtaccgcgtgtttgccgagtggaacaaaaccgagctggattcttatctgattgaaatcacagcggcaattttgggctataaggacgaaggcggcgaaccgctggtcgagaaaatcctcgatacggcagggcaaaaaggtacaggcaaatggacgggcatcaatgctttggatttgggtattccgctgacgctgatttccgaagccgtattcgcccgctgcgtttcgtcgttcaaagaacagcgcgtgcagaccggcaaactgttcgcccgaaccgttacgcccgtcgaaggcggcaaacaagaatgggtcgaggcgttgagacaggccctgcttgcatctaaaatcatttcctacgcacaaggctttatgctgatccgcgaagcgggcgaaagctacggctgggatttggactacggcaacactgcgctgctgtggcgcgaggggtgcatcattcgcagcgcattcttaagcaatatccgcgacgcgtatgaaaacaatcccgatttggtgttcttgggtgcggatccgtatttcaaaaatattttggaaaactgcctgccggcgtggcgcaaggtggttgccaaggcggtcgaatgcggcatccctatgccctgcatggcttcggcgattacgttcttggacggctacacgaccgaacgtctgcctgccaacctcttgcaggcacagcgcgactacttcggcgcgcacacttacgagcgcaccgacaaaccgcgcggtgagtttttccataccaactggacgggcaagggcggagataccgcttcgacaacctacgatatttga

SEQ ID NO: 11817 - protein, 482 aa, Neisseria meningitidis
MNGDIGVIGLAVMGQNLILNMNDCGFKVVAYNRTTAKVDEFLNGAAKGTNIIGAYSLQDLVDKLEKPRKIMMMVRAGSVVDEFIEQLLPLLEEGDILIDGGNANYPDTTRRTHYLAEKGILFVGAGVSGGEEGARRGPSIMPGGDKRAWDAVKPIFQAIAAKTSQGEPCCDWVGKDGAGHFVKMVHNGIEYGDMQLICEAYQFMKDGLGLSYDEMYRVFAEWNKTELDSYLIEITAAILGYKDEGGEPLVEKILDTAGQKGTGKWTGINALDLGIPLTLISEAVFARCVSSFKEQRVQTGKLFARTVTPVEGGKQEWVEALRQALLASKIISYAQGFMLIREAGESYGWDLDYGNTALLWREGCIIRSAFLSNIRDAYENNPDLVFLGADPYFKNILENCLPAWRKVVAKAVECGIPMPCMASAITFLDGYTTERLPANLLQAQRDYFGAHTYERTDKPRGEFFHTNWTGKGGDTASTTYDI

SEQ ID NO: 11818 - DNA, 1425 bp, Streptococcus pneumoniae
  CDS (1)..(1425)
atgacaaaagctaactttggtgtcgtaggtatggccgtaatgggtcgtaaccttgcccttaatattgaatctcgtggttacacagttgctatctacaaccgtagtaaagaaaaaacggaagatgtgattgcttgccatcctgaaaagaactttgtaccaagctatgacgttgaaagttttgtaaactcaatcgaaaaacctcgtcgtatcatgctgatggttcaagctggacctggtacagatgctactatccaagcccttcttccacaccttgacaagggtgatatcttgattgacggaggaaatactttctacaaagataccatccgtcgtaatgaagaattggcaaactctggtatcaactttatcggtactggggtttctggtggtgaaaaaggtgcccttgaaggtccttctatcatgcctggtggacaaaaagaagcctacgaattggttgcggatgttcttgaagaaatctcagctaaagcaccagaagatggcaaaccatgtgtgacttacatcggtcctgatggagctggtcactatgtgaaaatggttcacaatggtattgagtacggtgatatgcaattgatcgcagaaagctatgacttgatgcaacacttgctaggcctttctgcagaagatatggctgaaatctttactgagtggaacaagggtgaattagacagctacttgattgaaatcacagctgatatcttgagccgtaaagacgatgaaggccaagatggaccaatcgtagactacatccttgatgctgcaggtaacaagggaactggtaaatggactagccaatcatctcttgaccttggtgtaccattgtcactgattactgagtcagtgtttgcacgctacatttcaacttacaaagaagaacgtgtacatgctagcaaggtgcttccaaaaccagctgccttcaactttgaaggagacaaggctgaattgattgaaaagatccgtcaagccctttacttctcaaaaatcatttcatacgcacaaggatttgctcaattgcgtgtagcctctaaagaaaacaactggaacttgccatttgcagatatcgcatctatctggcgtgatggctgtatcatccgttctcgtttcttgcaaaagattacagatgcttacaaccgcgatgcagatcttgccaaccttcttttggacgagtacttcttggatgttactgctaagtaccaacaagcagtacgtgatatcgtagctcttgcggttcaagcaggtgtgccagtgccaactttctcagcagctattacttactttgatagctaccgttcagctgaccttccagctaacttgatccaagcacaacgtgactactttggtgctcacacttaccaacgtaaagacaaagaaggaaccttccactactcttggtatgacgaaaaataa

SEQ ID NO: 11819 - protein, 474 aa, Streptococcus pneumoniae
MTKANFGVVGMAVMGRNLALNIESRGYTVAIYNRSKEKTEDVIACHPEKNFVPSYDVESFVNSIEKPRRIMLMVQAGPGTDATIQALLPHLDKGDILIDGGNTFYKDTIRRNEELANSGINFIGTGVSGGEKGALEGPSIMPGGQKEAYELVADVLEEISAKAPEDGKPCVTYIGPDGAGHYVKMVHNGIEYGDMQLIAESYDLMQHLLGLSAEDMAEIFTEWNKGELDSYLIEITADILSRKDDEGQDGPIVDYILDAAGNKGTGKWTSQSSLDLGVPLSLITESVFARYISTYKEERVHASKVLPKPAAFNFEGDKAELIEKIRQALYFSKIISYAQGFAQLRVASKENNWNLPFADIASIWRDGCIIRSRFLQKITDAYNRDADLANLLLDEYFLDVTAKYQQAVRDIVALAVQAGVPVPTFSAAITYFDSYRSADLPANLIQAQRDYFGAHTYQRKDKEGTFHYSWYDEK

SEQ ID NO: 11820 - DNA, 1440 bp, Chlamydophila pneumoniae, Chlamydia pneumoniae
  CDS (1)..(1440)
atgcaaacgaatattggtcttattggcttagctgtcatggggaaaaatcttgtcttaaacatgatagatcatggtttttctgtctctgtctataatcggaccccagagaaaacgcgggacttcttgaaagaataccctaaccaccgagagcttgtagggtttgaatctttagaagattttgtgaattcattggagagaccacgaaagatcatgttgatgattcaagcagggaaacctgtggatcagagcattcatgcgttactgccttttctagaacccggcgatgtgattatcgatggggggaatagctattttaaagattccgaacgacgatgtaaagagttgcaagaaaaggggattctcttcttaggcgtggggatttctggaggagaagaaggtgcacgtcacggcccatcaattatgcctggaggaaatcctgaggcgtggccattagtggctcctatttttcaatcaatagcagcaaaagtacagggccgtccctgctgttcttgggtaggaactggcggtgcaggccactatgtaaaggctgttcacaatggtatagaatacggcgatatccagttgatatgcgaagcttacggtatcttaagagatttcctaaagctctccgcaactgccgttgctacaattttgaaagagtggaatactctagagttggaaagctatctaattcgtattgcttctgaagtcctagcattgaaagatccggaaggaatccctgttattgatacgattttagatgtcgtgggccaaaaaggtacaggaaagtggaccgcaatcgatgctttaaattctggagttcccctttccttaatcataggagctgttcttgctcgtttcctttcttcttggaaagagatacgcgagcaagctgcccgtaattatccaggaacccccttaatatttgaaatgccccatgatccctcggtattcatacaagatgtctttcatgctttatacgcttccaagatcatcagctatgctcagggattcatgcttttaggagaagcttcaaaagaatataattggggattagacctaggagaaattgctttgatgtggcgcgggggatgcattattcaaagtgcatttttagatgttatacataaaggatttgctgccaacccagagaatacctcgctcatcttccaagaatatttccgtggagcattacgccatgcggagatgggatggcgtagaacagtagtgactgcaattggtgcagggctacctattccctgtttagcagcagcaatcacgttttatgatggctatcgtacagcaagctcttcaatgtcgttagctcaaggactgcgagattattttggagctcatacctacgagcgtaacgatcgccctcgaggagagttctatcataccgattgggtgcacacgaaaactacagaaagagtgaagtaa

SEQ ID NO: 11821 - protein, 479 aa, Chlamydophila pneumoniae, Chlamydia pneumoniae
MQTNIGLIGLAVMGKNLVLNMIDHGFSVSVYNRTPEKTRDFLKEYPNHRELVGFESLEDFVNSLERPRKIMLMIQAGKPVDQSIHALLPFLEPGDVIIDGGNSYFKDSERRCKELQEKGILFLGVGISGGEEGARHGPSIMPGGNPEAWPLVAPIFQSIAAKVQGRPCCSWVGTGGAGHYVKAVHNGIEYGDIQLICEAYGILRDFLKLSATAVATILKEWNTLELESYLIRIASEVLALKDPEGIPVIDTILDVVGQKGTGKWTAIDALNSGVPLSLIIGAVLARFLSSWKEIREQAARNYPGTPLIFEMPHDPSVFIQDVFHALYASKIISYAQGFMLLGEASKEYNWGLDLGEIALMWRGGCIIQSAFLDVIHKGFAANPENTSLIFQEYFRGALRHAEMGWRRTVVTAIGAGLPIPCLAAAITFYDGYRTASSSMSLAQGLRDYFGAHTYERNDRPRGEFYHTDWVHTKTTERVK

SEQ ID NO: 11822 - DNA, 1419 bp, Lactococcus lactis subsp. lactis
  CDS (1)..(1419)
atggcacaagcaaactttggtgttgtcggaatggctgtaatggggaaaaaccttgcactcaacgtagagtcacgtggttataccgttgcaatttacaaccgtacgacttcaaaaactgaagaagtttataaagaacatcaagataagaatcttgttctcactaaaacacttgaagaatttgttggaagtcttgaaaaaccacgtcgtatcatgctcatggttcaagcaggagcagcgacagatgcgacaattaaatcacttttaccactcttggataaaggcgatatcttgattgatggtggaaatactcatttcccagacacaatgcgtcgtaatgctgaacttgcagactcaggtattaacttcatcggtacaggagtttctggtggtgaaaaaggtgcgcttttaggcccatcaatgatgcctggtggtcaaaaagaagcctacgatttggttgcaccaatttttgaacaaatcgcagctaaagctcctcaagatggtaaaccatgtgtggcttacatgggagcaaacggtgctggacattacgttaaaatggttcacaacggaattgagtacggcgatatgcaattgattgctgaatcttatgatttgttgaaacgtgttcttggtcttagcaatgcagaaattcaagccatttttgaagaatggaatgaaggcgaacttgatagctacctcattgaaatcactaaagaagtattgaaacgtaaagatgatgaaggcgaaggctacatcgttgataaaattcttgataaagcaggaaacaaaggaactggtaaatggacttcagagtctgcccttgaccttggtgtaccacttccattgattacagaatcagtatttgctcgttacatttcaacttataaagatgaacgtgttaaagcaagcaaagttttatctggaccagcggttaatttctcaggcgataaaaaagaagtcattgaaaaaatccgcaaagcgctatatttctcaaaaattatgagttatgctcaaggatttgctcaacttcgtaaagcttctgaagaatttgattgggacttgccttacggtacaattgcacaaatttggcgtgctggatgtatcattcgtgcagaattcctccaaaatattactgatgctttcgacaaagatagcgaacttgaaaacctcttgcttgatgactactttgtagacatcacaaaacgttatcaagaagctgttcgtgatgtagtttcacttgctgttcaagcaggaattccaattccaacattcacatcagcaattagctactacgatagctatcgttctgaaaatcttccagctaacttgattcaagcccaacgtgattacttcggtgctcacacttatgaacgtacagacaaagctggaatcttccactacgactggtacacagaagattaa

SEQ ID NO: 11823 - protein, 472 aa, Lactococcus lactis subsp. lactis
MAQANFGVVGMAVMGKNLALNVESRGYTVAIYNRTTSKTEEVYKEHQDKNLVLTKTLEEFVGSLEKPRRIMLMVQAGAATDATIKSLLPLLDKGDILIDGGNTHFPDTMRRNAELADSGINFIGTGVSGGEKGALLGPSMMPGGQKEAYDLVAPIFEQIAAKAPQDGKPCVAYMGANGAGHYVKMVHNGIEYGDMQLIAESYDLLKRVLGLSNAEIQAIFEEWNEGELDSYLIEITKEVLKRKDDEGEGYIVDKILDKAGNKGTGKWTSESALDLGVPLPLITESVFARYISTYKDERVKASKVLSGPAVNFSGDKKEVIEKIRKALYFSKIMSYAQGFAQLRKASEEFDWDLPYGTIAQIWRAGCIIRAEFLQNITDAFDKDSELENLLLDDYFVDITKRYQEAVRDVVSLAVQAGIPIPTFTSAISYYDSYRSENLPANLIQAQRDYFGAHTYERTDKAGIFHYDWYTED

SEQ ID NO: 11824 - DNA, 894 bp, Bacillus subtilis
  CDS (1)..(894)
atgaaaatcggattaatcggcttagggaaaatgggcataaacataggaaagcaattcattgaccgcaatcatcaagtggttggatatgatgtaaatcaagcggctgttgatgaactgaaagcatacggggctgaggggacaacaaatcttaaagagttcatttctttattacacccgccgcgcatcctatgggttatggtaccgcatggcattgtcgatgctgttttgcgtgatgtatcacctttattaagtaaaggcgatatgattatcgaagctggaaactctcattataaagaatcaattcgccgctacaatcaaatgaaagaagcgggtatccattatctcgatgccggaacgtcgggcggaatggaaggcgcacggcatggagcctgttttatggtggggggcgatcatgaagcatgggagattgtggaaccgctttttcgtgatactgccgtcgaaaatggttatctatacgctggtgaagcgggaagcggacattttttaaaaatgatccataatggaattgagtatggaatgatggccgcgattggtgaaggattcgaagtgcttgaaaacagccaatttgattttgactacgagaaggttgccagagtgtggaatcatggttctgtcattcgttcttggcttatgggactgactgagcgagctttcgctaaggatgcgaaactggatcagatcaagggcattatgcattcctcaggtgaaggaaaatggacggtggaaaccgcgcttgatctgcagacggcaacgccggtcatcgccatgtcactaatgatgagataccgttctttaacagacgatacgtttacaggaaaggtggttgctgcgcttcgaaatgaatttggaggccatgcgacagaaaaaaagtaa

SEQ ID NO: 11825 - protein, 297 aa, Bacillus subtilis
MKIGLIGLGKMGINIGKQFIDRNHQVVGYDVNQAAVDELKAYGAEGTTNLKEFISLLHPPRILWVMVPHGIVDAVLRDVSPLLSKGDMIIEAGNSHYKESIRRYNQMKEAGIHYLDAGTSGGMEGARHGACFMVGGDHEAWEIVEPLFRDTAVENGYLYAGEAGSGHFLKMIHNGIEYGMMAAIGEGFEVLENSQFDFDYEKVARVWNHGSVIRSWLMGLTERAFAKDAKLDQIKGIMHSSGEGKWTVETALDLQTATPVIAMSLMMRYRSLTDDTFTGKVVAALRNEFGGHATEKK

SEQ ID NO: 11826 - DNA, 1407 bp, Staphylococcus aureus
  CDS (1)..(1407)
atgacacaacaaattggagttattggtttagccgttatgggtaaaaacctagcttggaatattgaatcacgcggatatagtgtatctgtatttaaccgctcaagtgaaaaaactgatttaatggttgaagaatcaaaagggaaaaatattcatccaacgtattcattggaagaatttgttaattctttagaaaaaccacgtaaaattttattaatggttcaagcaggtaaagctacggatgcaacgattgatagtttgttacctttattagatgatggagatattttaattgatggtggtaatacaaactatcaagatactatcagacgtaataaagcattagcacaaagtgcaatcaactttattggtatgggcgtttctggtggtgaaattggagcgttaactggtccgtcattaatgccgggtggacaagaagaagcttataacaaagttgcagatattcttgatgcaattgctgcaaaggcaaaagacggtgcttcatgtgttacttatattggaccaaatggtgctggacactatgtgaaaatggtacacaatggtatcgaatatgctgacatgcaattaattgcagaaagttatgctatgatgaaagaattattaggcatgtctcatgaagacattgctcaaacgttcaaagactggaatgctggtgaattagaaagttatttaattgaaatcactggtgatattttcatgaaattagatgaaaataaagaagcattagttgaaaaaattcttgatactgcaggtcaaaaaggtacaggaaaatggacttcaattaacgcattagaattaggtattccattaacaatcataactgaatctgtatttgcacgttttatctcttcaatcaaagaagagcgcgtaaatgcttctaaagaattaaatggtccaaaagcatcatttgatggtgacaagaaagactttttagaaaaaattcgtaaagcattatatatgagtaaaatttgttcctatgcacaaggtttcgcgcaaatgcgtaaagcaagtgaagataatgaatggaatttaaaacttggtgatttagctatgatttggagagaaggttgcattatccgtgcacaattcttacaaaagatcaaagatgcttacgataataatcctggattacaaaacttattgctagatccttactttaaaaacatcgttactgaatatcaagatgcgttacgtgatgttgtcgcaactggtgttcaaaatggtgtaccaacacctggtttctcatcaagtattaattactatgatagttaccgtgcagctgatttacctgcaaacttaattcaagcacaacgtgactacttcggtgctcacacgtacgaaagaaaagataaagaaggcgtattccatacacaatggattgaagaataa

SEQ ID NO: 11827 - protein, 468 aa, Staphylococcus aureus
MTQQIGVIGLAVMGKNLAWNIESRGYSVSVFNRSSEKTDLMVEESKGKNIHPTYSLEEFVNSLEKPRKILLMVQAGKATDATIDSLLPLLDDGDILIDGGNTNYQDTIRRNKALAQSAINFIGMGVSGGEIGALTGPSLMPGGQEEAYNKVADILDAIAAKAKDGASCVTYIGPNGAGHYVKMVHNGIEYADMQLIAESYAMMKELLGMSHEDIAQTFKDWNAGELESYLIEITGDIFMKLDENKEALVEKILDTAGQKGTGKWTSINALELGIPLTIITESVFARFISSIKEERVNASKELNGPKASFDGDKKDFLEKIRKALYMSKICSYAQGFAQMRKASEDNEWNLKLGDLAMIWREGCIIRAQFLQKIKDAYDNNPGLQNLLLDPYFKNIVTEYQDALRDVVATGVQNGVPTPGFSSSINYYDSYRAADLPANLIQAQRDYFGAHTYERKDKEGVFHTQWIEE

SEQ ID NO: 11828 - DNA, 1395 bp, Borrelia burgdorferi (Lyme disease spirochete)
  CDS (1)..(1395)
atggatgtaggaatttatggacttggtgttatgggtagtaatttagctctaaatattgctgataacggttttaatgtttctgtttacaatagagataatgaaaaaactgaaatttttgttaaacaaaattctcataaaaagataaatggttttaaagatattgaatcttttgttaaaagcttaaaaactccaaaaaaaatcatcttaatggtgacaagctctgctatagaaaaggttattgagcaaattttaccctttatgaataaatcagacataattattgatggtggaaattctcattataagagcacaatgagattggaaaaagaattgtttgctaaagacatttattttgtaggacttggaatttctggaggggagagaggagcaagatttggtcctgcgctaatgtatggaggaagtaaatcagcctatgaaattcttgagcccatgttaaataaaattgcagctaaaactaaaaataatgatatttgttcgacttatattggggagaacggttctgggcactatgttaaaatgatacataatggagtggaatacgctgatatgcagcttatcagcgaggtttattttttcatgaaaaaagctttcaatttagataatttgaaaatttctgaagtttttgaaaaatggaatgaaggcgatctttcagggtatttactagaaataacttctaagattcttaaatataaagaaaataatgaatatttagttgataagattttagatattgcaaatcaaaaaggcactggtgtttggacagctattgatgctcttgaatctggtgtgcctgtaaatttaattgttgaatctgttttttcaagatttatgtcggggttaaaacacgaaaggattattgctagcgatttacttaagatggatacttcttcttttgagtttgagcttagtgattggattttagatctttattatgctcttttagtttcaaaaatagtagcttatgctcaaggttttatgatgcttaagaccgcgtctgtgaattatggttgggatttgaatttaggtaaaatttctttggtttggagagaaggctgtattattcgtagcagttttttagataaaattaaattggcttatgataaaaatcctcatcttattaatttgctttttgatgattattttttagatttactaaaaaataatcacaaatctttaagaagaataatttcaaaggctagtgaaattgggattcctttgccagcattttatgccagcctttcgtttttagattcttattctactaattatctgccttctaatctaattcaagcacaaagagatttttttggtgctcattcttttgaaagattagactcaaaacgaggtgaattttttcatagcgcttggcaataa

SEQ ID NO: 11829 - protein, 464 aa, Borrelia burgdorferi (Lyme disease spirochete)
MDVGIYGLGVMGSNLALNIADNGFNVSVYNRDNEKTEIFVKQNSHKKINGFKDIESFVKSLKTPKKIILMVTSSAIEKVIEQILPFMNKSDIIIDGGNSHYKSTMRLEKELFAKDIYFVGLGISGGERGARFGPALMYGGSKSAYEILEPMLNKIAAKTKNNDICSTYIGENGSGHYVKMIHNGVEYADMQLISEVYFFMKKAFNLDNLKISEVFEKWNEGDLSGYLLEITSKILKYKENNEYLVDKILDIANQKGTGVWTAIDALESGVPVNLIVESVFSRFMSGLKHERIIASDLLKMDTSSFEFELSDWILDLYYALLVSKIVAYAQGFMMLKTASVNYGWDLNLGKISLVWREGCIIRSSFLDKIKLAYDKNPHLINLLFDDYFLDLLKNNHKSLRRIISKASEIGIPLPAFYASLSFLDSYSTNYLPSNLIQAQRDFFGAHSFERLDSKRGEFFHSAWQ

SEQ ID NO: 11830 - DNA, 903 bp, Aquifex aeolicus
  CDS (1)..(903)
atgaaaacacttttcctcataggtctggggcgcatgggctctgccctcgcctacagactcaagaacagaggctgggagatttacggctattctcgcacacaaacaaccagagaaagagccaaaaaggacctagggataaaggttttaaactcttatgaaaatctaaaaaacttcccttctcctaaaactgtgtggctaatggttccacacaccgcagtggacgaggttctccaaaatttaaaaccttttctaaataagggagatacggtaatagacggaggaaattcttactataaagattcccagaggaggtatagggaactaaaggaagtagatgtaaactttctggatgttggagtaagcggagggattctcggaaaggatacgggcttctcctttatgataggcggagatgaagaagtctttaaaaaacacgaaaagctctttaaggatttggcctacgaggaaaaggggtacgcttatcttggaagtagcggtgcggggcactttgcgaaaatggttcacaacggtattgagtacggaattatggaagcgatagcagagggctttgagctcctaaaaaagtctccttttgattacgatttgagagaagttgcgagagtttactcgcagggaagcgtaatacgttcttttttgattgatctccttgttaaagcctttgaagacttcggagaccttgaagacgtggagggttacgttgaggacagcggagagggcaggtggtgcgttaaagaaagcgtagaactcggagcccctattcccgtaatagctcaatccttttacgaaaggttttcatcaagggagaaagatctatttaaaaacaaagttttggcagttttgaggtatgagttcgggagacacagagttaagaaaaaggattga

SEQ ID NO: 11831 - protein, 300 aa, Aquifex aeolicus
MKTLFLIGLGRMGSALAYRLKNRGWEIYGYSRTQTTRERAKKDLGIKVLNSYENLKNFPSPKTVWLMVPHTAVDEVLQNLKPFLNKGDTVIDGGNSYYKDSQRRYRELKEVDVNFLDVGVSGGILGKDTGFSFMIGGDEEVFKKHEKLFKDLAYEEKGYAYLGSSGAGHFAKMVHNGIEYGIMEAIAEGFELLKKSPFDYDLREVARVYSQGSVIRSFLIDLLVKAFEDFGDLEDVEGYVEDSGEGRWCVKESVELGAPIPVIAQSFYERFSSREKDLFKNKVLAVLRYEFGRHRVKKKD

SEQ ID NO: 11832 - DNA, 1687 bp, Escherichia coli
  CDS (137)..(1543)
attttttgaaatgccatttttttacgcataactggattttgtaatatctcagtattaatattggtttaaattttattctgaccatattcaagccgcgtataccttgtgcggcgaccacacctgacaggagtatgtaatgtctaagcaacagatcggcgtcgtcggtatggcagtgatggggcgcaacctggcgctcaacatcgaaagccgaggttataccgtctccatcttcaaccgctcccgcgagaaaactgaagaagttgttgccgagaacccgggtaagaaactggttccttattacacggtgaaagagttcgtcgagtctcttgaaaccccacgtcgtatcctgttaatggtaaaagcaggggcgggaactgatgctgctatcgattccctgaagccgtaccttgataaaggcgacatcattattgatggtggtaacaccttcttccaggacactatccgtcgtaaccgtgagctgtcagcagaaggttttaacttcatcggtaccggcgtgtccggtggtgaagaaggggcgctgaaaggcccatctatcatgcctggtggccagaaagaagcgtatgagctggttgcgcctatcctgaccaagattgccgctgttgccgaagatggtgaaccgtgcgtaacctacatcggcgctgatggcgcaggtcattatgtgaagatggtgcataacggtattgaatacggcgacatgcagctgattgctgaagcctattccttgctgaaaggcggcctgaacctgtctaacgaagagctggctaccaccttcaccgagtggaatgaaggcgagctgagcagctacctgatcgatatcactaaagacatcttcaccaaaaaagatgaagacggtaactacctggttgatgtgatcctggacgaagcggcgaacaaaggcaccggtaaatggaccagccagagctctctggatctgggtgaaccactgtcgctgatcaccgaatccgtattcgcgcgctacatctcttctctgaaagaccagcgcgttgcggcatctaaagtgctgtccggcccacaggctaaactggctggtgataaagcagagtttgttgagaaagttcgtcgcgcgctgtatttgggcaaaatcgtctcttatgcccagggtttctctcaactgcgtgccgcatctgacgaatacaactgggatctgaactacggtgaaatcgcgaagatcttccgcgcgggctgcatcattcgcgcgcagttcctgcagaaaatcaccgacgcctatgccgaaaacaaaggtatcgcgaacctgctgctggctccgtacttcaaaaatatcgctgacgattatcagcaagcgctgcgtgatgtggtggcttatgctgtgcagaacggtattccggtaccgaccttctcagcagcggtagcctactacgacagctaccgcgctgcggtactgcctgctaacctgatccaggcccagcgcgactactttggtgctcatacgtataaacgcaccgataaagaaggtgcgttccacaccgaatggctggattaatctgatttagtctaactgtgaatccaggcccggagtgctcctccgggcttttaattgccaaaaaatgggattcagtcaggtccgatatccggtgttgtacgaatcacgatatactgtcgatcgagagccgatgtgccagttgtt

SEQ ID NO: 11833 - protein, 468 aa, Escherichia coli
MSKQQIGVVGMAVMGRNLALNIESRGYTVSIFNRSREKTEEVVAENPGKKLVPYYTVKEFVESLETPRRILLMVKAGAGTDAAIDSLKPYLDKGDIIIDGGNTFFQDTIRRNRELSAEGFNFIGTGVSGGEEGALKGPSIMPGGQKEAYELVAPILTKIAAVAEDGEPCVTYIGADGAGHYVKMVHNGIEYGDMQLIAEAYSLLKGGLNLSNEELATTFTEWNEGELSSYLIDITKDIFTKKDEDGNYLVDVILDEAANKGTGKWTSQSSLDLGEPLSLITESVFARYISSLKDQRVAASKVLSGPQAKLAGDKAEFVEKVRRALYLGKIVSYAQGFSQLRAASDEYNWDLNYGEIAKIFRAGCIIRAQFLQKITDAYAENKGIANLLLAPYFKNIADDYQQALRDVVAYAVQNGIPVPTFSAAVAYYDSYRAAVLPANLIQAQRDYFGAHTYKRTDKEGAFHTEWLD

SEQ ID NO: 11834 - DNA, 1407 bp, Escherichia coli
  CDS (1)..(1407)
atgtccaagcaacagatcggggttgtcggtatggctgtgatggggcgtaaccttgcgctgaacatcgaaagccgcggttataccgtctccgttttcaaccgctcccgtgaaaagaccgaagaagttattgccgaaaaccctggcaagaagctggttccttactacacagtacaagagtttgtagaatccctcgaaacaccacgtcgtatcctgttgatggtgaaggccgggtctggcaccgacagcgccatcgattccctgaagccttacctcgataaaggcgacatcatcattgatggcggcaacaccttcttccaagacaccatccgtcgtaaccgtgaactgtctgccgaaggttttaactttatcggtaccggtgtttccggtggtgaagagggtgctctgaaagggccttccatcatgcctggtgggcagaaagaagcctatgagctggttgcgccgattctgaagcagattgctgccgttgctgaagacggtgagccatgtgtgacctatatcggtgctgatggtgctggccattatgtgaagatggttcataacggcatcgagtatggtgacatgcagttgattgctgaagcctatgcgctgttgaaaggcggtctgacactttccaacgaagagctggcgcaaaccttcactgaatggaacgaaggcgagctaagcagctacctgtacgacattaccaaagatatcttcaccaagaaggatgaagaaggtaagtacctcgttgatgtcattcttgatgaagcagcaaacaaaggtaccggtaagtggaccagccagagctcactggatctcggcgaacctctgtctctgatcaccgaatccgtatttcctcgttacatctcttcgcttaaagaccagcgtgtagctgcttcgaaagtgctgagtggtccgcaggctcaaccggctggtgataaagctgaatttatcgaaaaagttcgtcgcgcgttgtacctcggtaagatcgtttcctatgctcagggcttctctcagctgcgagctgcttctgatgaatacaactgggagctaaactacgcggagatcgctaagattttccgcgcgggctgcatcattcgtgcccagttcctgcagaagattactgatgcttatgcgcaaaacgctggtattgctaatctcctgctggcaccgtacttcaaacagatcgctgatgactatcagcaggcgctgcgtgatgtcgttgcgtatgccgtgcagaatggtattcgggtaccgacattctctgccgcaattgcttactacgacagctaccgttccgcggttctgcccgctaatctgattcaggctcagcgtgattattttggtgcgcacacctataagcgtactgataaagaaggtgtattccataccgagtggttggaataa

SEQ ID NO: 11835 - protein, 468 aa, Escherichia coli
MSKQQIGVVGMAVMGRNLALNIESRGYTVSVFNRSREKTEEVIAENPGKKLVPYYTVQEFVESLETPRRILLMVKAGSGTDSAIDSLKPYLDKGDIIIDGGNTFFQDTIRRNRELSAEGFNFIGTGVSGGEEGALKGPSIMPGGQKEAYELVAPILKQIAAVAEDGEPCVTYIGADGAGHYVKMVHNGIEYGDMQLIAEAYALLKGGLTLSNEELAQTFTEWNEGELSSYLYDITKDIFTKKDEEGKYLVDVILDEAANKGTGKWTSQSSLDLGEPLSLITESVFPRYISSLKDQRVAASKVLSGPQAQPAGDKAEFIEKVRRALYLGKIVSYAQGFSQLRAASDEYNWELNYAEIAKIFRAGCIIRAQFLQKITDAYAQNAGIANLLLAPYFKQIADDYQQALRDVVAYAVQNGIRVPTFSAAIAYYDSYRSAVLPANLIQAQRDYFGAHTYKRTDKEGVFHTEWLE

SEQ ID NO: 11836 - DNA, 1404 bp, Bacillus licheniformis
  CDS (1)..(1404)
atgcgcaatacaatcggtgtcataggtttgggagtcatggggagcaatatcgccctgaacatggcaagcaaaggcgaacaagtcgccgtctataactacacaagggatttaaccgatcaactcgtccaaaaaacgggaggccaaacagtcaagccgtactatgaacttgaagatttcgtacagtctttagaaaaaccgagaaaaatctttcttatggtcacagcaggcaaaccggttgattctgttatcgactcgctcgttcctctgcttgaagaaggggatgtcatcatggacggcggcaactcccactacgaagatacggaacgaagatatgacagtttgaaagcgaaaggtatcggctacttgggaatcggcatttccggcggcgaagtcggcgctttaaaaggcccatccattatgcccggcggagatcgggacgtctacgaaaaagcagctccgattctcacaaaaatcgccgcccaagtagaaggagatccatgctgtgtctacatcggtccaaaaggcgcggggcattttgttaaaatggtgcacaacggcatcgaatacgcagacatgcagcttatcgctgaagcgtatacatttttaagagaaaagcttcttttgccgatagatgaaatcgctgacattttcgacacgtggaatcaaggagagctgaaaagctatttaatcgaaatcacggcagagatcctgaggaaaaaggatgagcgaacgggcgctccgctcatcgacgtcatcctcgacaaaaccggccaaaaaggcacgggcaaatggacgagcctgcaggccatcgacaacggcattccatcatcaattatcacggaatccctgtttgcccgttacctgtcatcattaaaagacgaacggacagctgccgaaaacgtattggccgggcctgaaacagaagaacggcccctggatcagaacgtgtggatcgaccgcgtcagacaggcgttatacatggggaaagtctgcgcctatgcccaaggcttcgctcaatataaaatgacgtctgatctgaacggatggcacctgccgttaaaggacatcgccctcatcttccgcggcggctgcatcatccgcgcacaatttttaaatctcatcagcgaagtttacgacaaacagccggacctgtccaacctgctggtcgcacctgacttcgctgaaaaactaaaagaataccagtccggcttgcgaaaggtcgtctgcgaaggcatcagctcaggcatctcattcccgtgcctgagcaccgccctctcctattacgacggctaccggacgggccgctcaaacgcaaacctactgcaggcgcaggcgaattatttcggcgctcacacgtatgagcggacggatatggaaggcgtgtttcatacggactggtattaa

SEQ ID NO: 11837 - protein, 467 aa, Bacillus licheniformis
MRNTIGVIGLGVMGSNIALNMASKGEQVAVYNYTRDLTDQLVQKTGGQTVKPYYELEDFVQSLEKPRKIFLMVTAGKPVDSVIDSLVPLLEEGDVIMDGGNSHYEDTERRYDSLKAKGIGYLGIGISGGEVGALKGPSIMPGGDRDVYEKAAPILTKIAAQVEGDPCCVYIGPKGAGHFVKMVHNGIEYADMQLIAEAYTFLREKLLLPIDEIADIFDTWNQGELKSYLIEITAEILRKKDERTGAPLIDVILDKTGQKGTGKWTSLQAIDNGIPSSIITESLFARYLSSLKDERTAAENVLAGPETEERPLDQNVWIDRVRQALYMGKVCAYAQGFAQYKMTSDLNGWHLPLKDIALIFRGGCIIRAQFLNLISEVYDKQPDLSNLLVAPDFAEKLKEYQSGLRKVVCEGISSGISFPCLSTALSYYDGYRTGRSNANLLQAQANYFGAHTYERTDMEGVFHTDWY

SEQ ID NO: 11838 - DNA, 1455 bp, Actinobacillus actinomycetemcomitans
  CDS (1)..(1455)
atgtcagtaaaaggcgacatcggtgttatcggcttagccgtgatggggcagaacctcattttaaatatgaatgaccacgggtttaaagtggtggcgtataaccgtactacttcaaaagtggacgagtttttagaaggcgcggcgaaaggcacgaacattatcggcgcgtattctttggaagatttggcgaacaaattggaaaaaccgcgtaaagtgatgttaatggtgcgtgcgggtgaagtggtggatcactttattgatgcattgcttccgcatttagaagccggcgacatcattatcgacggcggtaactccaattatccagacaccaaccgtcgcgtggcggcattacgtgaaaaaggcattcgtttcatcggcaccggcgtttccggcggtgaagaaggtgcgcgtcacggaccttccatcatgccgggcggtaacgaagaagcatggcaatttgtgaaaccggtattgcaagccatttccgccaaaaccgaacaaggcgaaccttgttgcgactgggtgggtaaagacggcgcaggtcatttcgtgaaaatggtgcataacggcatcgaatacggcgatatgcaactgatttgtgaagcgtaccaattcctaaaagaaggcgtgggcttgtccgacgacgaattgcaagccaccttcaacgaatggcgcaataccgaattagacagctacttaattgacatcaccgctgacattttgggctataaagacgcagacggcagccgtttggtggataaagtcttagataccgcagggcaaaaaggaaccggcaaatggacagggatcaacgcattggatttcggcattccgttgaccttaatcaccgaatccgtgttcgcccgttgcgtgtctgcctttaaagatcaacgcgtcgccgcaagcaaattgttccacaaaaccatcggtaaagtggaaggcgataaaaaagtgtggattgaagcggtgcgcaaagcattgttggcgtctaaaatcatttcttacgcacaaggctttatgttgattcgtgaagcgtccgaacacttcaactggaacatcaactacggcaacacggcattgttatggcgtgaaggttgtattatccgtagccgtttcttgggcaacattcgtgatgcgtacgaagccaatccggatctaattttcttaggctccgacagctacttcaaaggcattttagaaaacgccatgagcgactggcgcaaagtggtggcgaaatccatcgaagtgggtatcccaatgccttgtatggcatctgcgattaccttcttagatggctacacgtcagctcgtttgcctgcaaacttattgcaagcacaacgcgactacttcggcgcccacacctatgagcgtaccgacaaaccacgcggtgaattcttccacaccaactggacgggacgtggcggcaacaccgcttccactacttatgatgtgtag

SEQ ID NO: 11839 - protein, 484 aa, Actinobacillus actinomycetemcomitans
MSVKGDIGVIGLAVMGQNLILNMNDHGFKVVAYNRTTSKVDEFLEGAAKGTNIIGAYSLEDLANKLEKPRKVMLMVRAGEVVDHFIDALLPHLEAGDIIIDGGNSNYPDTNRRVAALREKGIRFIGTGVSGGEEGARHGPSIMPGGNEEAWQFVKPVLQAISAKTEQGEPCCDWVGKDGAGHFVKMVHNGIEYGDMQLICEAYQFLKEGVGLSDDELQATFNEWRNTELDSYLIDITADILGYKDADGSRLVDKVLDTAGQKGTGKWTGINALDFGIPLTLITESVFARCVSAFKDQRVAASKLFHKTIGKVEGDKKVWIEAVRKALLASKIISYAQGFMLIREASEHFNWNINYGNTALLWREGCIIRSRFLGNIRDAYEANPDLIFLGSDSYFKGILENAMSDWRKVVAKSIEVGIPMPCMASAITFLDGYTSARLPANLLQAQRDYFGAHTYERTDKPRGEFFHTNWTGRGGNTASTTYDV

SEQ ID NO: 11840 - DNA, 1915 bp, Drosophila melanogaster
  CDS (272)..(1717)
agtagcagtactcattagagtccactcacaaaattagcaccaaccggcagtaattggtcaaggatcggcgatagcttcaaactccgaagttcaaagtcaaactgccgccctgcgaaagcttcgcgagtggagcttttctgcacttatcgatagctaacattgtggcgcgactatcgatcgacgagctgccgcttaacagtgccatatatagattgtaacattaggagctcaaatcattgttggaacacaaaccacaaagaacacacgaaacatgagcggacaagcggatattgccctcatcggcctggccgtcatgggccaaaacctgatactcaacatggacgagaagggattcgtggtgtgcgcctacaaccgcacggtggccaaggtcaaggagttcctcgccaatgaggctaaggacaccaaagtgattggagccgactcgctcgaggacatggtctccaagctgaagagcccccggaaggtcatgctgctggtcaaggctggaagtgcagtcgacgacttcatccagcagctggtgccgctgctttccgccggcgatgtgatcatcgatggtggcaactcggagtatcaggacacatctcgccgctgcgacgagttagccaaacttggcctgctcttcgtcggatccggcgtgagcggtggcgaggagggcgcccgccacggaccctcgctgatgcccggcggacacgaggccgcgtggccccttatccaacccatcttccaggcgatctgcgccaaggccgacggtgaaccctgctgcgagtgggtgggcgatggaggcgccggtcacttcgtcaagatggtgcacaacggcatcgaatacggtgacatgcagctgatctgcgaggcgtaccacatcatgaagagcctgggactgtcggctgaccagatggcagacgagttcggcaagtggaactcggccgaactggactccttcctcattgaaatcacgcgtgatattcttaagtacaaggacggcaaaggttatctgctggagcggattcgcgataccgccggccagaagggcacgggcaagtggacggcaatcgctgctctgcagtatggagtgcctgtgacgctaattggcgaggcggtcttctcgcgatgcctgtctgccctgaaggacgagcgcgtccaggccagcagcgtgctgaagggaccctcgaccaaggcgcaagtggccaacctcaccaagttcctcgacgacatcaagcacgctctctactgcgccaagatcgtgtcctacgcccagggattcatgctcatgcgagaggcggccagggagaacaagtggagacttaattacggcggcattgcgctgatgtggcgtggcggctgcatcatccgcagcgtctttctgggcaacattaaggacgcgtatacgtcgcagccggagctgtctaatctgctgctggatgacttcttcaagaaggccatcgagcgcggccaggactcgtggcgcgaggtggtggccaatgccttccgctggggcattcccgtgccggccctgtctaccgccctaagcttctacgacggctaccgcacggccaagctgccagccaacttgctgcaggcccagagggattacttcggcgcccacacctatgagctgctgggccaggagggtcagttccaccacacgaactggacaggcaccggcggcaatgtgtccgccagcacttaccaggcgtaggttccacctgctccactttcccgttcacacattccatgtcattggcgccggtgtcttagatgtttcttttttttttctggagtactttagtacttatttataccattaatatatatgtatgtatatagaatttcataattgttgttaaacataacattaaattggtgtttttttgctagcaaaaaaaaaaaaaaaaaa

SEQ ID NO: 11841 - protein, 481 aa, Drosophila melanogaster
MSGQADIALIGLAVMGQNLILNMDEKGFVVCAYNRTVAKVKEFLANEAKDTKVIGADSLEDMVSKLKSPRKVMLLVKAGSAVDDFIQQLVPLLSAGDVIIDGGNSEYQDTSRRCDELAKLGLLFVGSGVSGGEEGARHGPSLMPGGHEAAWPLIQPIFQAICAKADGEPCCEWVGDGGAGHFVKMVHNGIEYGDMQLICEAYHIMKSLGLSADQMADEFGKWNSAELDSFLIEITRDILKYKDGKGYLLERIRDTAGQKGTGKWTAIAALQYGVPVTLIGEAVFSRCLSALKDERVQASSVLKGPSTKAQVANLTKFLDDIKHALYCAKIVSYAQGFMLMREAARENKWRLNYGGIALMWRGGCIIRSVFLGNIKDAYTSQPELSNLLLDDFFKKAIERGQDSWREVVANAFRWGIPVPALSTALSFYDGYRTAKLPANLLQAQRDYFGAHTYELLGQEGQFHHTNWTGTGGNVSASTYQA

SEQ ID NO: 11842 - DNA, 1407 bp, Salmonella typhimurium
  CDS (1)..(1407)
atgtccaagcaacagatcggcgtcgtcggtatggcagtgatggggcgcaacctcgcgctcaacatcgaaagccgtggttataccgtctccgttttcaaccgctcccgtgaaaagaccgaagaagtgattgccgagaatcccggcaaaaagctggtgccttattacacggtgaaagagtttgttgaatccctcgaaacgcctcgtcgtatcctgttaatggtgaaagcgggcgcaggtactgatgcagctatcgattcgctgaaaccgtatctggaaaaaggcgatatcattattgatggcggtaacaccttcttccaggacacaatccgtcgcaatcgcgagctgtctgcggaaggttttaactttatcggtaccggtgtttccggtggtgaagagggcgcgctgaaagggccatctatcatgcctggcggtcagaaagatgcctatgaactggtggcgccgatcctgacgaagattgctgctgtggcagaagatggcgaaccgtgcgtgacctatatcggcgccgatggtgctggtcactacgtcaagatggtccacaatggtattgaatatggcgatatgcagcttatcgctgaagcttactccctgctgaaaggcggcctgaatctcagcaatgaagagttggcgaacacttttactgagtggaataacggcgagctgagcagctatctgatcgacatcactaaagacatcttcactaaaaaagatgaagacggaaactacctggtggatgtcattcttgatgaagccgccaacaaagggaccggtaaatggaccagccagagcgcgctggatctgggtgaaccgctgtcgctgattaccgaatccgtctttgcgcgttacatctcttcgttgaaagcgcaacgtgttgccgcatctaaagtgctctccgggccgaaagcgcagccggcaggcgacaaagctgaatttatcgagaaagtgcgtcgcgcgctgtatcttggcaagatcgtctcctatgcgcagggcttctcgcagctacgcgccgcgtctgatgaatatcactgggatctcaactacggcgagattgctaagattttccgggcgggctgtatcattcgcgctcagttcctgcagaagatcaccgatgcttacgcagaaaacgccgatatcgctaacttgctgttagcgccttacttcaagaaaattgctgatgagtaccagcaggcgctgcgcgatgtcgtggcttacgcggtgcagaacggcattccggtgccgacattctctgcggcagtggcctactatgacagctatcgcgccgcagtactgccagctaacttaattcaggcgcagcgtgactactttggtgcgcacacctataaacgtactgataaagaaggcattttccataccgaatggttggaataa

SEQ ID NO: 11843 - protein, 468 aa, Salmonella typhimurium
MSKQQIGVVGMAVMGRNLALNIESRGYTVSVFNRSREKTEEVIAENPGKKLVPYYTVKEFVESLETPRRILLMVKAGAGTDAAIDSLKPYLEKGDIIIDGGNTFFQDTIRRNRELSAEGFNFIGTGVSGGEEGALKGPSIMPGGQKDAYELVAPILTKIAAVAEDGEPCVTYIGADGAGHYVKMVHNGIEYGDMQLIAEAYSLLKGGLNLSNEELANTFTEWNNGELSSYLIDITKDIFTKKDEDGNYLVDVILDEAANKGTGKWTSQSALDLGEPLSLITESVFARYISSLKAQRVAASKVLSGPKAQPAGDKAEFIEKVRRALYLGKIVSYAQGFSQLRAASDEYHWDLNYGEIAKIFRAGCIIRAQFLQKITDAYAENADIANLLLAPYFKKIADEYQQALRDVVAYAVQNGIPVPTFSAAVAYYDSYRAAVLPANLIQAQRDYFGAHTYKRTDKEGIFHTEWLE

SEQ ID NO: 11844 - DNA, 2263 bp, Synechococcus sp
  CDS (202)..(1614)
aagcttgcccccgtcatcagggcctgaccgatgcgatcgccgtcaagaatccacccccaggcattcaatttttctctgatctgtaaataaatccgcgatcgccgccgtgatccccgcaaagaaagtctaaagaggttgccagagaaccccaaattggcaggctaacctgaggtcattcgttgtcctagcaggaattttcctatggcactgcaacagttcggcctcatcgggctggcagtgatgggtgagaatctcgccctgaacattgagcgcaacggtttttccttgacggtctataaccgcacggccgaaaagactgaagcgttcatggccgatcgcgcccaaggcaagaacattgtgccggcttacagtctggaagactttgttgccagcttggaacgtccgcgccgcattttggtgatggttaaagcgggcggcccggtggatgccgtggtcgagcagctcaaacccctgctagatcccggtgacttgatcatcgatgggggcaactcactgtttaccgacaccgagcgccgcgtcaaagatctagaagcgctaggtctgggtttcatgggcatgggcgtcagtggtggcgaagagggggctttgaatggccccagtttgatgccggggggcacccaagcggcctacgaagccgtggagccgatcgtgcgcacgattgctgcccaagtcgacgatggcccctgcgttacctacatcggtcctggtggctctgggcactacgtcaagatggtgcacaacggcattgaatatggcgatatgcagctgatcgccgaagcctatgacctcctcaaatcggtggcaggcctcaatgccagtgaactgcatgatgtcttcgccgcctggaacaaaacgccggaactcgactcgttcttgattgaaatcacggcggatattttcaccaaagtcgatgacttgggtactggtcagcccttggtcgagctgattttagatgccgctggtcaaaaaggaaccggtcgctggacggtggaaacggcactggaaattggcgttgcgattccaaccatcattgctgctgtcaacgcccgcatcctgtcctcgatcaaagccgagcgtcaggcagcttctgaaattctttcaggaccgattaccgagcccttcagtggcgatcgccaagcctttatcgacagtgtgcgcgatgcgctctactgctcgaaaatttgctcctatgcccaaggcatggcgctgctagccaaagcctcccaggtctacaactacggtctgaatttaggtgaactggcgcggatttggaaaggcggctgcatcattcgggcgggtttcctcaacaagattaagcaggcctatgatgctgacccaacgctggcgaatctgttgctggcacccgaattccggcagacgattctcgatcgccagttgcgttggcggcgcgtgattgcgatccggcagaacgaggaattccggttccgctttcagtgcttccctggattacttcgacagctaccggcgcgatcgctgccccaaaacctcacccaggctcagcgcgactacttcggcgctcatacctacgaacgcaccgatcgctctggctctttccatgcccagtggttctagggcgacaaactccggtcgctgcgctggtcagacggaccaactcctttggcagaatcaggactggcaaggcgatcggagagcgtgatggatgtgttggtggtgcgcggcatcctgctgacggctacacggggttctttgatgccgagcaagaactgggccagtggtttgaggtggacttgcgcgtctgggtcgatcttcagcctgctggggacacgatcacgtcggcgaacaccctcgactacagccaagcggtacaggtcgtgcaaacggggattcgccagagtcgctttcgcacgatcgagcgattggcggctgatctctgcgatcgcctgtttcagcagtttccagccctaccggaattggaactgacgttgcggaaactggcccctcccattcctgactttagtggtgatgtcagcttggttctgcggcgatcgcggaagttaacgggtgcggattgatgctagcaaggggtccgaagatgctcgttctccagagctgacgagactgttttatagacttcaatcttgagataaaagttgactcgcgatcgttagatttgggcatataatcctgagttctaatagctctttttagggttccaaactgtaagtttgaggattcactttggaactaagtcaatccgaat

SEQ ID NO: 11845 - protein, 470 aa, Synechococcus sp
MALQQFGLIGLAVMGENLALNIERNGFSLTVYNRTAEKTEAFMADRAQGKNIVPAYSLEDFVASLERPRRILVMVKAGGPVDAVVEQLKPLLDPGDLIIDGGNSLFTDTERRVKDLEALGLGFMGMGVSGGEEGALNGPSLMPGGTQAAYEAVEPIVRTIAAQVDDGPCVTYIGPGGSGHYVKMVHNGIEYGDMQLIAEAYDLLKSVAGLNASELHDVFAAWNKTPELDSFLIEITADIFTKVDDLGTGQPLVELILDAAGQKGTGRWTVETALEIGVAIPTIIAAVNARILSSIKAERQAASEILSGPITEPFSGDRQAFIDSVRDALYCSKICSYAQGMALLAKASQVYNYGLNLGELARIWKGGCIIRAGFLNKIKQAYDADPTLANLLLAPEFRQTILDRQLRWRRVIAIRQNEEFRFRFQCFPGLLRQLPARSLPQNLTQAQRDYFGAHTYERTDRSGSFHAQWF

SEQ ID NO: 11846 - DNA, 2853 bp, Saccharomyces cerevisiae
  CDS (1074)..(2543)
gaattcaaaggatcgaaaactaccgaaaatacaaactctataatcactgctcatttttttgaaaactcgcacagctatgtcactaatgatctcgtcggactgataaaattatggctgttagagctacccgacagcctaataccttcaaaccactacgatgacttaattaaggccgaaaaatcgctaacatccctatgtgaacagtttccgacgagctccttaaggtttctacaagaactagcaaaccattttcaattgatcaatagcaaatactcacttccgccgcaaacaatacaagatttgtttagagacaacagtgacatagacataccattggcccatcacttcgtaagaagaacaggcttacagaaccctatcgacatcaaaatcttgtcaccaacattatctacatttttcatcaacgaaagaactgtagaaactttgcaaacgttgatcgcaaacaggatcacgacggcaactactgcgacactcactgaaccgccgacgataattataaaggatacaacggcacctatacactctacccctaagccaccgccaaacgacaaggatggccatttcatacctcggccattcaagactagttctactccgacaaccccagagagacctaaacgtaagagtggtttattccttcccatcaacgtcaacgatgtcccttctacataactccatgcatgctacatagtaactacgtaaatcacctgctacctctctgttctttcgtcccgcctcgaggttgtgctgcttttgtacctattgtggctgtcggtgttacattacggtgcctcggtgttacgcggtgcttcgtcctggtggtccacgcggccttgcgctttggccttggtgggcttcgaggctgtattatataaatgggcctgatgttcgttaaaagctgcagtattgttcctgagcttgtttctttttcaaaggtttccttttttcttagtggggtcctttcttacataataaagtaaatagcctgatacatataaacctgtattgttgccattacagaaaaaagccactttctatacaaaaactacaataaaatgtctgctgatttcggtttgattggtttggccgtcatgggtcaaaatttgatcttgaacgctgctgaccacggtttcactgtttgtgcttacaacagaactcaatccaaggtcgaccatttcttggccaatgaagctaagggcaaatctatcatcggtgctacttccattgaagatttcatctccaaattgaagagacctagaaaggtcatgcttttggttaaagctggtgctccagttgacgctttgatcaaccaaatcgtcccacttttggaaaagggtgatattatcatcgatggtggtaactctcacttcccagattctaatagacgttacgaagaattgaagaagaagggtattcttttcgttggttctggtgtctccggtggtgaggaaggtgcccgttacggtccatctttgatgccaggtggttctgaagaagcttggccacatattaagaacatcttccaatccatctctgctaaatccgacggtgaaccatgttgcgaatgggttggcccagccggtgctggtcactacgtcaagatggttcacaacggtattgaatacggtgatatgcaattgatttgtgaagcttatgacatcatgaagagattgggtgggtttaccgataaggaaatcagtgacgtttttgccaaatggaacaatggtgtcttggattccttcttggtcgaaattaccagagatattttgaaattcgacgacgtcgacggtaagccattagttgaaaaaatcatggatactgctggtcaaaagggtactggtaagtggactgccatcaacgccttggatttgggtatgccagttactttgattggtgaagctgtctttgcccgttgtctatctgctttgaagaacgagagaattagagcctccaaggtcttaccaggcccagaagttccaaaagacgccgtcaaggacagagaacaatttgtcgatgatttggaacaagctttgtatgcttccaagattatttcttacgctcaaggtttcatgttgatccgtgaagctgctgctacttatggctggaaactaaacaaccctgccatcgctttgatgtggagaggtggttgtatcattagatctgttttcttgggtcaaatcacaaaggcctacagagaagaaccagatttggaaaacttgttgttcaacaagttcttcgctgatgccgtcaccaaggctcaatctggttggagaaagtcaattgcgttggctaccacctacggtatcccaacaccagccttttccaccgctttgtctttctacgatgggtacagatctgaaagattgccagccaacttactacaagctcaacgtgactactttggtgctcacactttcagagtgttgccagaatgtgcttctgacaacttgccagtagacaaggatatccatatcaactggactggccacggtggtaatgtttcttcctctacataccaagcttaaaggaaatctccaacctggacataaaccaaaaaaatttaatgaaatagattagttatagtaaaagtaatcataataataaatagataaataaatccaaatgcaattataaatagtatatgaagttatgtgttttctaaaatattaaaggtttataaacggggtcccgaaactatctccatttctttttttttttttacgtaaggaaaggcaaacaggcgacacaaaatcatgaagtcagaaaataaaataaaagtgaaaaatttcacaatagtgcctattatcatgatagaagtagagtagaaaagctagc

SEQ ID NO: 11847 - protein, 489 aa, Saccharomyces cerevisiae
MSADFGLIGLAVMGQNLILNAADHGFTVCAYNRTQSKVDHFLANEAKGKSIIGATSIEDFISKLKRPRKVMLLVKAGAPVDALINQIVPLLEKGDIIIDGGNSHFPDSNRRYEELKKKGILFVGSGVSGGEEGARYGPSLMPGGSEEAWPHIKNIFQSISAKSDGEPCCEWVGPAGAGHYVKMVHNGIEYGDMQLICEAYDIMKRLGGFTDKEISDVFAKWNNGVLDSFLVEITRDILKFDDVDGKPLVEKIMDTAGQKGTGKWTAINALDLGMPVTLIGEAVFARCLSALKNERIRASKVLPGPEVPKDAVKDREQFVDDLEQALYASKIISYAQGFMLIREAAATYGWKLNNPAIALMWRGGCIIRSVFLGQITKAYREEPDLENLLFNKFFADAVTKAQSGWRKSIALATTYGIPTPAFSTALSFYDGYRSERLPANLLQAQRDYFGAHTFRVLPECASDNLPVDKDIHINWTGHGGNVSSSTYQA

SEQ ID NO: 11848 - DNA, 1618 bp, Medicago sativa (alfalfa)
  CDS (7)..(1467)
tacattatggctccaccacttacaagaataggccttgccggattggctgttatgggccagaatctcgcactcaatattgccgacaaaggattcccaatttctgtttataatagaacaacatcaaaggttgacgaaactgtggaacgagcaaaacaggagggaaatcttccactctatggcttccatgaccctgaagcctttgttaattccattgaaaaaccaagggtgattataatgcttgttaaggctggtgcacctgttgaacagaccaccaaaaccctatctgcgtaccttgaaaaaggtgattgtataattgatggtgataatgaatggtacgagaacactgagagacgagagaaagaggtagccgaattgggtattctctaccttggaatgggagtttcaggtggtgaggagggtgctcgacgtggtccttctatgatgcctggtggttcgtttgaagcttacaaatacatagaagatattcttctcaaggtggctgctcaagttcctgacagtggcccttgtgtgacatatatcggtaacggtggatctggtaattttgtgaagatgatccataatggaattgaatacggtgacatgcagctgattgctgaggcttacgatgtgttgaagtcagttggaaagttgacaaatgaggagctacaaagtgcatttactgaatggaacaagggagaacttttgagtttcctgattgaaatcactgcagatattttcggaattaaggatgataagggtgatggatatcttgttgacaaggttcttgacaaaactggcatgaagggtaccggtaagtggactgttcagcaagcagctgaattatcagttcctgctcccaccattgaagcttcattggatgctaggttccttagtgggttgatggatgaaagagttgaagctgcaaaggtctttaaatcaggtggttttggcgatatcttgaccgaccaacaagtagacaagaagcagttgattgatgatgttaggaaggctctttatgcagccaagatttgtagttacgcacaagggatgaatctgatccgtgcaaagagtgctgaaaagggttgggatttggcattgggtgaacttgcccgtatttggaaaggaggttgcatcattagagctatattcttggacagaatcaagcaagcgtacgacagaaaccctaatctcgcaaaccttcttgtggatccagagttcgcaaaggaaataattgaacgccaaaccgcatggaggagagttgtttccctttctgtcaattcaggtatcagcctcccaggtatgtctgctagtcttgcatattttgacagttatagaagggaaaggttaccggctaatttggtgcaagctcaacgagactacttcggtgctcatacatatgaaagggttgatattgaggggtcgtaccatactgaatggttcaagcttgccaagcagtcaaggatttagattactgtatttgaactcttcaagattcctaataaatgtaatgttttttactcaagactgtatgctgagttgagcttacatagctgcaatgcggtgaagtttatttataccattctgtactacttaattacttggcttttggttttcccca

SEQ ID NO: 11849 - protein, 486 aa, Medicago sativa (alfalfa)
MAPPLTRIGLAGLAVMGQNLALNIADKGFPISVYNRTTSKVDETVERAKQEGNLPLYGFHDPEAFVNSIEKPRVIIMLVKAGAPVEQTTKTLSAYLEKGDCIIDGDNEWYENTERREKEVAELGILYLGMGVSGGEEGARRGPSMMPGGSFEAYKYIEDILLKVAAQVPDSGPCVTYIGNGGSGNFVKMIHNGIEYGDMQLIAEAYDVLKSVGKLTNEELQSAFTEWNKGELLSFLIEITADIFGIKDDKGDGYLVDKVLDKTGMKGTGKWTVQQAAELSVPAPTIEASLDARFLSGLMDERVEAAKVFKSGGFGDILTDQQVDKKQLIDDVRKALYAAKICSYAQGMNLIRAKSAEKGWDLALGELARIWKGGCIIRAIFLDRIKQAYDRNPNLANLLVDPEFAKEIIERQTAWRRVVSLSVNSGISLPGMSASLAYFDSYRRERLPANLVQAQRDYFGAHTYERVDIEGSYHTEWFKLAKQSRI

SEQ ID NO: 11850 - DNA, 894 bp, Mycobacterium smegmatis
  CDS (1)..(894)
atgcaactcgggttgatcggcctgggcaagatgggcttcaacatgcgcgaacgtctgcgcgaagccggccacgaggtgatcggatacgacccgcggcccgaggtcagcgacgtcgcgaacctcgaggagctcgccggtgcactgtcggcgccgcgtgtcgtgtgggtgatggtcccgtcgggcacgatcacccacagcacgatcgtggaactcgcgggcgtgctcagtcccggtgatctggtgatcgacggcggcaactcgcgctacaccgaagacggtccgcacgcagaattgttgggcgagaagggcatcagcttcatcgacgccggtgtgtccggcggcatctggggtctgaccgagggttacggcctgatggtcggcggcagtgacgacgacgtggctcgagccatgccgatcttcgacgcgctgcgtccgccgggcgacgtcgccgacggtttcgtacatgccggcccggtgggtgctggccactacgccaagatggtccacaacggcatcgagtacggcctgatgcacgcctacgccgagggttacgaactgctggcggccgaggaactcatcaaggatccgcaggcggtgatccaggcgtggagcaacggcaccgtggtgcggtcgtggttgcagtcgctattggccaaggcactcaaggaagaccccggtttcgccgagatcagcggttacaccgaggattccggcgagggacgctggaccgtcgaggaggccatcgcccaccgggtcccgatgccggtgatcgcggcgtcgctgttcgcccggttcgcctcgaggcaggaagactcgccgaccatgaaggccgtctcggcgttgcgcaaccagttcggtggtcatgccgtcaagcggatcagcgagtcgggttag

SEQ ID NO: 11851 - protein, 297 aa, Mycobacterium smegmatis
MQLGLIGLGKMGFNMRERLREAGHEVIGYDPRPEVSDVANLEELAGALSAPRVVWVMVPSGTITHSTIVELAGVLSPGDLVIDGGNSRYTEDGPHAELLGEKGISFIDAGVSGGIWGLTEGYGLMVGGSDDDVARAMPIFDALRPPGDVADGFVHAGPVGAGHYAKMVHNGIEYGLMHAYAEGYELLAAEELIKDPQAVIQAWSNGTVVRSWLQSLLAKALKEDPGFAEISGYTEDSGEGRWTVEEAIAHRVPMPVIAASLFARFASRQEDSPTMKAVSALRNQFGGHAVKRISESG

SEQ ID NO: 11852 - DNA, 1449 bp, Synechocystis sp
  CDS (1)..(1449)
atgcaatttaacgtagctattatgactaagcgaacttttggggtaattggactagcggtaatgggggaaaatcttgccctcaacgtggaaagtcgaggctttcccatcgccgtgtttaaccgttcccccaacaaaactgagaaattcatggccgaacgggctgtgggcaaagatatcaaagccgcctacaccgtagaagaatttgtccaactgttggaacgcccccgtaaaatccttgtaatggtcaaagctgggggacccgtggatgcagtgatcaatgagttgaagcccctgttggaagaaggggacatgatcattgatggtggcaactccctttatgaagatacggaacgtcgcaccaaagatttggaagccaccggcctgggctttgtcggcatgggagtcagtggaggggaagaaggcgcattactgggtcctagtttgatgcccggtggtaccccggccgcctacaaagaattggaacccattctgactaaaattgccgcccaggtggaagaccccgataatcccgcctgtgtgacttttattggcccagggggagcaggacattacgtcaaaatggtccacaacggcattgagtatggcgatatgcaactaatcgctgaagcctacgacatcttgaaaaatggcctcggcttgagcaacgaacaactccacgaagtttttggccaatggaatcaaaccgatgagttaaactccttcctgattgaaatcagcaccgacatttttgctaaaaaggatcccgaaaccggaggccatttaattgactacatccttgatgccgccggccaaaagggcacaggacgctggacggtgatgagtggtttggaattaggagtgcccattcccactatttacgccgccgttaacgccagggtaatgtcttccctcaaagaagaacgggtggccgcttccggtcaactgtcgggtcccagtaaaacctttagtggggacgtagaagcctggattcctaaggtgcgggatgccctctattgctcgaaaatgtgttcctatgcccagggcatggccctaattgccaaagcttcccaggaatttggctacgacgttaacctgccggaaattgcccgcatttggaaagggggttgcattatccgagctggctttttagacaagatcaagaaagcttttaaagacaatccccagttgcccaatttacttctagctccggaattcaagcaaagtattttggatcgccaggggccatggcgagaagtgttgatgctggccaatgaaatgggcattgcagtgccggcctttagttcctcgttggattactttgacagttaccggcgggcggtgcttccccaaaacctgactcaagcgcaacgggattactttggggcccacacctatgaacggactgataagccgaggggagaatttttccacacggaatggcttgattga

SEQ ID NO: 11853 - protein, 482 aa, Synechocystis sp
MQFNVAIMTKRTFGVIGLAVMGENLALNVESRGFPIAVFNRSPNKTEKFMAERAVGKDIKAAYTVEEFVQLLERPRKILVMVKAGGPVDAVINELKPLLEEGDMIIDGGNSLYEDTERRTKDLEATGLGFVGMGVSGGEEGALLGPSLMPGGTPAAYKELEPILTKIAAQVEDPDNPACVTFIGPGGAGHYVKMVHNGIEYGDMQLIAEAYDILKNGLGLSNEQLHEVFGQWNQTDELNSFLIEISTDIFAKKDPETGGHLIDYILDAAGQKGTGRWTVMSGLELGVPIPTIYAAVNARVMSSLKEERVAASGQLSGPSKTFSGDVEAWIPKVRDALYCSKMCSYAQGMALIAKASQEFGYDVNLPEIARIWKGGCIIRAGFLDKIKKAFKDNPQLPNLLLAPEFKQSILDRQGPWREVLMLANEMGIAVPAFSSSLDYFDSYRRAVLPQNLTQAQRDYFGAHTYERTDKPRGEFFHTEWLD

SEQ ID NO: 11854 - DNA, 1818 bp, Zea mays (maize)
  CDS (69)..(1523)
ccacgcgtccgcgcgctgcaggggcgacgcaaggtcgagcgctcctcgatccagatccaaggtaggagatggctctcacgagaattggccttgcgggcctcgcggtcatgggacagaaccttgccctcaacatcgcggagaaagggttccctatctcggtctacaacaggacgacctccaaggttgatgagaccgtgcagcgtgccaaggtcgaaggaaacctccccgtgtttggtttccacgaccccgcgtccttcgtgagctccatccagaagccccgtgtcgtcatcatgctcgtcaaggctggggcgccggtggaccagaccattgccacgctcgcggcgcaccttgatcagggggactgtatcgtcgatggtggcaacgagtggtatgagaacacggagaggagggagaaggcgatggaggagcgcgggctcctttatcttggcatgggcgtctccggaggagaggagggtgcccgcaatggcccgtccttgatgcccgggggctccttcgaggcatacaagtacattgaagatattcttctcaaggtggctgctcaggtacctgacagcggcccgtgcgtcacatatattggcaaaggtggatcaggcaactttgtcaagatggttcacaatggaattgaatatggtgacatgcaacttatcgccgaggcttatgatgttctcaagtcggtcggtaagctcacaaacagcgagctgcatcaggtgttctctgagtggaacaagggtgagctcctcagtttcttgattgagatcacggccgacatctttggtatcaaggatgacaagggtgaaggctacctggtcgacaaggtcctggacaagaccgggatgaagggaaccgggaaatggacagtccagcaggctgctgagctttctgtagctgctcctacaatcgaggcgtccttggactccaggttcctcagcggtctgaaggacgagcgcgttgaggcttccaaaattttccaaggtgactactccactggcctaccggtggacaaggcacagctgatcgaggacgtgaggcaagctctatatgcctccaagatctgcagttacgcgcagggcatgaacatcatcaaggccaagagctcagagaaaggatggggcctcaaccttggtgagctagcgaggatctggaagggagggtgcatcatccgtgccatcttcctcgaccgcatcaagaaggcgtacgataggaaccctaaccttgccaacctcctcgttgaccccgagttcgcccaggagatcatagacaggcaagctgcctggcgcagggttgtctgccttgccatcaacaatggcgttagcaccccaggcatgtctgcaagtctggcctacttcgactcgtaccgcagggataggcttcccgccaacctggtgcaggctcagagagactacttcggcgctcacacgtacgagagggttgacatgcctgttctttccacacccaggctcagagagactacttcggcgctcacacgttacgaaaaggtttgacatgcctggttctttccacaccgagtggttcaagattgcgcgcaactccaagatctgaacatggcctcgtgtttgcatatgccagtatgccaccgtgtcgagtaatcaatcatattactgcttgcagggaggaactgtgtttgatttttattttccatgcgcaatgcttaatttaggtcaggaagtccaaagtctctcccattgtttcctgtaagagctaagcagtaccagatggagaaccttatatttgctggaacatgaataaaagcatttgacgtgcttgtgtttagttctc

SEQ ID NO: 11855 - protein, 484 aa, Zea mays (maize)
MALTRIGLAGLAVMGQNLALNIAEKGFPISVYNRTTSKVDETVQRAKVEGNLPVFGFHDPASFVSSIQKPRVVIMLVKAGAPVDQTIATLAAHLDQGDCIVDGGNEWYENTERREKAMEERGLLYLGMGVSGGEEGARNGPSLMPGGSFEAYKYIEDILLKVAAQVPDSGPCVTYIGKGGSGNFVKMVHNGIEYGDMQLIAEAYDVLKSVGKLTNSELHQVFSEWNKGELLSFLIEITADIFGIKDDKGEGYLVDKVLDKTGMKGTGKWTVQQAAELSVAAPTIEASLDSRFLSGLKDERVEASKIFQGDYSTGLPVDKAQLIEDVRQALYASKICSYAQGMNIIKAKSSEKGWGLNLGELARIWKGGCIIRAIFLDRIKKAYDRNPNLANLLVDPEFAQEIIDRQAAWRRVVCLAINNGVSTPGMSASLAYFDSYRRDRLPANLVQAQRDYFGAHTYERVDMPVLSTPRLRETTSALTRYEKV

SEQ ID NO: 11856 - DNA, 1686 bp, Zea mays (maize)
  CDS (99)..(1547)
ccacgcgtccgggtggccggacggtggtggcatcgccaattcaactccgcatctgaatcggcactcggcagcgcgccagctccatagtgtaggaggagatggcgctcacaagaatcggtcttgctggccttgcggtcatggggcagaaccttgccctcaacattgcagagaaagggttccccatctctgtgtacaacaggacaacctccaaggtggacgagaccgtgcagcgtgccaaggcagaaggaaaccttcccgtctacggcttccatgaccccgcgtcctttgtgaagtccattcagaagccacgggtggtgatcatgctcgtcaaggccggcgcgccagttgaccagaccatcgcgacgctcgcagctcacttggagcagggcgactgcatcatcgatggggggaacgagtggtacgagaacacggagaggagggagaaggccatggaggagcgcggcctcctgtatcttggcatggttgtctctggaggagaggagggtgcccgcaacggcccgtccttgatgcccggaggctcgttcgaggcttacaagtacgtcaaagacattgtcctcaaggtggctgctcaggtccctgacagtggcccgtgtgtcacgtacattggcaaaggtggatcgggcaactttgtcaagatggttcacaacggaatcgagtatggcgatatgcagctgatttccgaggcatacgacgttctcaagttcgtcggtaagctcaccaacagtgagctgcaccaggtgttctccgagtggaacaagggcgagctcctgagcttcttgatcgagatcacggccgacatctttggcatcaaggacgagcatggcgatggctacctggtggacaaggtccttgacaagaccgggatgaaagggacagggaagtggacggtgcagcaggccgccgagctgtcggtggccgctcctacgatcgaggcgtccttggactcgaggttcctgagcgggctgaaggacgagcgggtggaggcctccaagatcttccagggtgactactactccaccggctcgccggtggacaaggcgcagctggtggaggacgtgaggcaggccctgtacgcgtccaagatctgcagctacgcgcagggcatgaacatcatcaaggccaagagcgcggagaaaggctgggggctcaacctcggcgagctggccaggatctggaagggcgggtgcatcatccgcgccatcttcctggaccgcatcaagaaggcctacgacaggaacccgggcctcgccagcctgctcgtagaccccgagttcgcgcaggagatcatggacaggcaggcggcgtggcgcagggtggtgtgcctcgccatcaacaacggcgtcagcaccccgggaatgtccgctagcctggcctacttcgactcctaccgcagggacaggctgcctgccaacctggtgcaggcccagagggactacttcggggctcacacctacgagagggtcgacatgcctggctctttccacaccgagtggttcaagattgcgcgcaacatctccaacaactgatgagctgctcaacggatggcatgcccggtgttgactactccagtcggtaatgagatttcctgcaggaacttgtctattgatctttgtaagttaattatttatatgaataaaataagagcagacatgcttgtgtttgggc

SEQ ID NO: 11857 - protein, 482 aa, Zea mays (maize)
MALTRIGLAGLAVMGQNLALNIAEKGFPISVYNRTTSKVDETVQRAKAEGNLPVYGFHDPASFVKSIQKPRVVIMLVKAGAPVDQTIATLAAHLEQGDCIIDGGNEWYENTERREKAMEERGLLYLGMVVSGGEEGARNGPSLMPGGSFEAYKYVKDIVLKVAAQVPDSGPCVTYIGKGGSGNFVKMVHNGIEYGDMQLISEAYDVLKFVGKLTNSELHQVFSEWNKGELLSFLIEITADIFGIKDEHGDGYLVDKVLDKTGMKGTGKWTVQQAAELSVAAPTIEASLDSRFLSGLKDERVEASKIFQGDYYSTGSPVDKAQLVEDVRQALYASKICSYAQGMNIIKAKSAEKGWGLNLGELARIWKGGCIIRAIFLDRIKKAYDRNPGLASLLVDPEFAQEIMDRQAAWRRVVCLAINNGVSTPGMSASLAYFDSYRRDRLPANLVQAQRDYFGAHTYERVDMPGSFHTEWFKIARNISNN

SEQ ID NO: 11858 - DNA, 1667 bp, Glycine max (soybean)
  CDS (55)..(1590)
tgattccagaccttaatttttctctcattcgcttcaaatttcaggaaatcaattatggctcaaccctcaacaggaataggccttgctggactggctgttatgggccaaaatctagcactcaatattgctgagaaaggctttcccatttctgtttataaccgaaccacttccaaggttgatgagactgtagaacgagcaaaacaagaaggaaatcttccagtttatggctaccatgaccccgaagcttttgttcattccattcaaaagcctagggtgataataatgcttgttaaggctggggcacctgttgaccagaccattaagaccctatctgcatacatggaaaaaggtgactgtataattgatggtggtaacgaatggtatgagaacactgaaagaagagagaaagaggtggccgaattgggtctgctctaccttgggttgggagtttctggtggtgaggaaggtgctcgtaatggtccctctttgatgcctggtggttcgtttgaggctttcaaatacatagaagatattcttctcaaggtggcagctcaagtacctgacagtggtccttgtgtgacttatattggtaaaggtggttctggtaattttgtgaagatgatccacaatggcattgagtatggtgacatgcagctgattgcagaggcctatgatgtgctgaaatcagttggaaagttgtcaaatgaggaactacaaagtgtcttttcagaatggaacaagggagaacttctgagtttcctgattgaaatcactgcagatatatttggaattaaggatgataagggagatggatatcttgttgacaaggtcctagacaagactggcatgaagggcactggtaagtggactgttcagcaagctgctgaattatcaattgctgctcccactattgaagcatcattggatgcaaggttcctgagtgggttgaaggaggaaagagttgaagctgcaaaggtctttaaatcaggtggcattggtgatattgtgactgatcaacatgtagacaagcagaagttgattgatgatgttaggaaggctctttatgcagccaaaatctgtagttatgcacagggaatgaatttgatccgtgcaaagagtattgaaaagggttgggatttgaagttgggtgaactggcccggatttggaaagggggttgcattattagagcaatattcttagacagaatcaagcaggcatatgaaagaaaccctaatctggcaaaccttcttgtggatccagagtttgcaaaggaaataattgattaccaatctgcctggaggagagttgtttgccttgctatcaattctggtattagcactccaggtatgtctgctagtcttgcttattttgacacttacagaagggaaaggttgccagctaatttggtgcaagctcaacgagactactttggtgctcatacatatgaaagggttgacatagaggggtcttaccatactgagtggttcaagcttgccaaacagtcaaagaaattagattactgtatttcagccaatcaggattttcctaataaatgtaatattttctgctcagactgtatgctgagttgagtttacatagccacaacgtggtgaagttttatttatattatttccaactgaattgcttgatagtttgttttcaactt

SEQ ID NO: 11859 - protein, 511 aa, Glycine max (soybean)
MAQPSTGIGLAGLAVMGQNLALNIAEKGFPISVYNRTTSKVDETVERAKQEGNLPVYGYHDPEAFVHSIQKPRVIIMLVKAGAPVDQTIKTLSAYMEKGDCIIDGGNEWYENTERREKEVAELGLLYLGLGVSGGEEGARNGPSLMPGGSFEAFKYIEDILLKVAAQVPDSGPCVTYIGKGGSGNFVKMIHNGIEYGDMQLIAEAYDVLKSVGKLSNEELQSVFSEWNKGELLSFLIEITADIFGIKDDKGDGYLVDKVLDKTGMKGTGKWTVQQAAELSIAAPTIEASLDARFLSGLKEERVEAAKVFKSGGIGDIVTDQHVDKQKLIDDVRKALYAAKICSYAQGMNLIRAKSIEKGWDLKLGELARIWKGGCIIRAIFLDRIKQAYERNPNLANLLVDPEFAKEIIDYQSAWRRVVCLAINSGISTPGMSASLAYFDTYRRERLPANLVQAQRDYFGAHTYERVDIEGSYHTEWFKLAKQSKKLDYCISANQDFPNKCNIFCSDCMLS

SEQ ID NO: 11860 - DNA, 1455 bp, Caenorhabditis elegans
  CDS (1)..(1455)
atggccgaagctgatattgccgtcatcggattggccgttatgggtcaaaatcttattctgaacatgaatgatcacggattcactgtttgcgccttcaacagaactgtcaaattggtcgacgattttcttgccaatgaagctaaaggaactaagattattggagctcattcaattgaggaaatgtgcaagaaattgaaaagaccacgtcgtgtcatgatgctcattaaagccggaactcctgtcgatatgatgatcgatgcaattgttccgcatcttgaggaaggtgatattatcattgatggaggaaattctgaatacactgattcaaacagacgctccgagcaactcgccgcaaaggggatcatgttcgtcggctgtggagtttccggaggagaagaaggagctcgttttggaccatctcttatgccaggaggtaatccaaaagcctggccacatctgaaagacatcttccaaaagatcgctgccaagtcaaacggagaaccatgctgtgattgggtaggaaacgctggatccggtcacttcgtgaaaatggttcataatggaattgaatatggagacatgcaactgatagctgaagcatatcatcttctgagcaaggccgtcgagctgaatcacgatcaaatggctgaagttcttgatgattggaataaaggagaattggaatctttccttattgaaatcaccgctaatattttgaaataccgtgacgagcaaggagagccaattgttccaaagattcgtgattctgctggacaaaagggaactggaaaatggacttgtttcgctgctcttgagtatggacttcctgttactcttatcggagaagccgttttcgccagatgtctatctgctctgaaggatgaacgtgttcgtgcttcgaaacaacttcctcgtccacaagtctcaccagataccgtcgttcaggacaaaagagtcttcatcaagcaaatcagcaaggctctttacgcctcaaaaatcgtcagttatgctcaaggatttatgcttcttgccgaagcatctaaacaattcaactggaatttgaactttggagctattgctttgatgtggagaggaggatgcattattcgttcaagattcctcggagacattgaacacgctttccaaaagaacaagcaactttccaatcttcttctcgatgatttcttcaccaaggccatcaccgaagcgcaggattcatggcgtgttgttgtgtgtgcagctgttcgtctcggaattccagttccagcattctcatcggccctcgctttctatgatggatacaccagtgaggtagttccggctaacttgcttcaagcccaaagagactatttcggagcccacacctacgagcttctcgccaagccaggtacatgggtacacaccaactggactggaactggtggacgtgtcacctcaaatgcttacaatgcataa

SEQ ID NO: 11861 - protein, 484 aa, Caenorhabditis elegans
MAEADIAVIGLAVMGQNLILNMNDHGFTVCAFNRTVKLVDDFLANEAKGTKIIGAHSIEEMCKKLKRPRRVMMLIKAGTPVDMMIDAIVPHLEEGDIIIDGGNSEYTDSNRRSEQLAAKGIMFVGCGVSGGEEGARFGPSLMPGGNPKAWPHLKDIFQKIAAKSNGEPCCDWVGNAGSGHFVKMVHNGIEYGDMQLIAEAYHLLSKAVELNHDQMAEVLDDWNKGELESFLIEITANILKYRDEQGEPIVPKIRDSAGQKGTGKWTCFAALEYGLPVTLIGEAVFARCLSALKDERVRASKQLPRPQVSPDTVVQDKRVFIKQISKALYASKIVSYAQGFMLLAEASKQFNWNLNFGAIALMWRGGCIIRSRFLGDIEHAFQKNKQLSNLLLDDFFTKAITEAQDSWRVVVCAAVRLGIPVPAFSSALAFYDGYTSEVVPANLLQAQRDYFGAHTYELLAKPGTWVHTNWTGTGGRVTSNAYNA

SEQ ID NO: 11862 - DNA, 882 bp, Streptomyces coelicolor
  CDS (1)..(882)
atgcagatcggtcttgtgggtctcggcaagatgggcggcaacatgcgcgagcgactgcgcaacgccggccacaccgtcgtcggatacgacaccaatcccgaccgggccgacgtcgacagcctggtcgagctggtggaccggctggagcggccgcgcgcggtctgggtgatggtcccggccggcggcgccacccagcacgtcatcgaccagctggcgacgctgctcaagcccggtgacaccgtcatcgacggcggcaactcccgctggacggacgacgagaagcacgccgaggaactgggcaagcgcggcatcaacttcgtcgacgcgggcgtctcgggcggcgtgtggggactgaagaacggctatgccctgatggtcggcggcgacaaggagaccgtcgacgacctgaagccggtcttcgacgccctcaagcccgacggcccctacggctacgtccacgcgggcaaggtcggcgccgggcacttctccaagatggtccacaacggcatcgagtacgccatgatgcaggcctacgccgagggctgggagctgctggagaaggtcgactccgtggacaacgtccgcgaggtcttccgctcctggcaggagggcaccgtcatccggtcctggctcctggacctggccgtcaacgccctcgacgacgaccaccacctggagaagctgcgcggctacgccgacgactcgggcgagggccgctggaccgtggaggcggcgatcgacaacgccgtgccgctgcccgcgatcacggcctccctcttcgcccggttcgcgtcccgccaggaggactcgccgcagatgaagatggtcgccgcgctgcgcaaccagttcggtggccacgccgtggagtcggccaagaagtag

SEQ ID NO: 11863 - protein, 293 aa, Streptomyces coelicolor
MQIGLVGLGKMGGNMRERLRNAGHTVVGYDTNPDRADVDSLVELVDRLERPRAVWVMVPAGGATQHVIDQLATLLKPGDTVIDGGNSRWTDDEKHAEELGKRGINFVDAGVSGGVWGLKNGYALMVGGDKETVDDLKPVFDALKPDGPYGYVHAGKVGAGHFSKMVHNGIEYAMMQAYAEGWELLEKVDSVDNVREVFRSWQEGTVIRSWLLDLAVNALDDDHHLEKLRGYADDSGEGRWTVEAAIDNAVPLPAITASLFARFASRQEDSPQMKMVAALRNQFGGHAVESAKK

SEQ ID NO: 11864 - DNA, 1479 bp, Schizosaccharomyces pombe
  CDS (1)..(1479)
atgtcacaaaaagaagttgccgattttggtctcatcggtttggccgtcatgggtcaaaacttgattctcaacggtgccgacaagggctttaccgtctgttgctacaaccgtacaacttccagagttgacgagtttttggcaaacgaagccaaaggtaaatctattgttggtgctcactcccttgaggaatttgtttccaagcttaagaagcctcgtgtttgtattttgcttgttaaggctggtaagcctgttgattaccttattgagggattggctcctctcctcgagaagggcgatatcattgttgacggtggtaactcccattaccctgatactacccgccgttgcgaggagttggccaagaagggcattctttttgttggttccggtgtttctggtggtgaagagggtgctcgttacggtccctctttgatgcctggtggtaatcccgctgcctggcctcgtatcaagcccatcttccaaactttggccgccaaagccggaaacaacgagccttgctgtgactgggttggtgaacaaggtgctggtcattatgttaagatggttcacaatggtatcgaatatggtgacatgcaattgatttgcgaaacttatgacattatgaaacgtggccttggtatgtcttgtgatgagattgccgatgtttttgagaagtggaacactggtaaacttgactctttcttaattgaaatcactcgcgatgttttgcgttacaaggctgatgacggcaagcccttggttgagaagattctcgacgctgctggacagaagggtactggtaagtggactgctcaaaacgctttggaaatgggtacccctgtcagtttgatcaccgaagccgtttttgctcgttgtctttcctccttgaagagcgagcgtgttcgtgcctctaagaagcttactggccccaacaccaagttcactggtgacaagaagcaattgattgatgatttggaagatgccttgtacgcttccaagattatctcttatgctcaaggtttcatgcttatgcgtgaggctgctaaggagtacggctggaagcttaacaacgccggtatcgctttgatgtggcgtggtggttgtattatccgttccgtcttccttaaggatatcactgaggctttccgtgaggatcctaacctcgagtctatccttttccatcctttcttcactaatggtgttgaaaaggctcaagctggttggcgtagagttgttgcccaagccgctatgttgggcattccagtccctgccacttctaccggtctttccttctacgacggttatcgtagtgctgttttgcctgctaacttattgcaagctcaacgtgactactttggtgcccatactttccgtgttttgcctgaagctgctgataagagcttacctgctgacaaggatatccacattaactggaccggtcacggtggtaacatcagtgctactacctatgatgcttag

SEQ ID NO: 11865 - protein, 492 aa, Schizosaccharomyces pombe
MSQKEVADFGLIGLAVMGQNLILNGADKGFTVCCYNRTTSRVDEFLANEAKGKSIVGAHSLEEFVSKLKKPRVCILLVKAGKPVDYLIEGLAPLLEKGDIIVDGGNSHYPDTTRRCEELAKKGILFVGSGVSGGEEGARYGPSLMPGGNPAAWPRIKPIFQTLAAKAGNNEPCCDWVGEQGAGHYVKMVHNGIEYGDMQLICETYDIMKRGLGMSCDEIADVFEKWNTGKLDSFLIEITRDVLRYKADDGKPLVEKILDAAGQKGTGKWTAQNALEMGTPVSLITEAVFARCLSSLKSERVRASKKLTGPNTKFTGDKKQLIDDLEDALYASKIISYAQGFMLMREAAKEYGWKLNNAGIALMWRGGCIIRSVFLKDITEAFREDPNLESILFHPFFTNGVEKAQAGWRRVVAQAAMLGIPVPATSTGLSFYDGYRSAVLPANLLQAQRDYFGAHTFRVLPEAADKSLPADKDIHINWTGHGGNISATTYDA

SEQ ID NO: 11866 - DNA, 1455 bp, Corynebacterium glutamicum
  CDS (1)..(1455)
atgactaatggagataatctcgcacagatcggcgttgtaggcctagcagtaatgggctcaaacctcgcccgcaacttcgcccgcaacggcaacactgtcgctgtctacaaccgcagcactgacaaaaccgacaagctcatcgccgatcacggctccgaaggcaacttcatcccttctgcaaccgtcgaagagttcgtagcatccctggaaaagccacgccgcgccatcatcatggttcaggctggtaacgccaccgacgcagtcatcaaccagctggcagatgccatggacgaaggcgacatcatcatcgacggcggcaacgccctctacaccgacaccattcgtcgcgagaaggaaatctccgcacgcggtctccacttcgtcggtgctggtatctccggcggcgaagaaggcgcactcaacggcccatccatcatgcctggtggcccagcaaagtcctacgagtccctcggaccactgcttgagtccatcgctgccaacgttgacggcaccccatgtgtcacccacatcggcccagacggcgccggccacttcgtcaagatggtccacaacggcatcgagtacgccgacatgcaggtcatcggcgaggcataccaccttctccgctacgcagcaggcatgcagccagctgaaatcgctgaggttttcaaggaatggaacgcaggcgacctggattcctacctcatcgaaatcaccgcagaggttctctcccaggtggatgctgaaaccggcaagccactaatcgacgtcatcgttgacgctgcaggtcagaagggcaccggacgttggaccgtcaaggctgctcttgatctgggtattgctaccaccggcatcggcgaagctgttttcgcacgtgcactctccggcgcaaccagccagcgcgctgcagcacagggcaacctacctgcaggtgtcctcaccgatctggaagcacttggcgtggacaaggcacagttcgtcgaagacgttcgccgtgcactgtacgcatccaagcttgttgcttacgcacagggcttcgacgagatcaaggctggctccgacgagaacaactgggacgttgaccctcgcgacctcgctaccatctggcgcggcggctgcatcattcgcgctaagttcctcaaccgcatcgtcgaagcatacgatgcaaacgctgaacttgagtccctgctgctcgatccttacttcaagagcgagctcggcgacctcatcgattcatggcgtcgcgtgattgtcaccgccacccagcttggcctgccaatcccagtgttcgcttcctccctgtcctactacgacagcctgcgtgcagagcgtctgccagcagccctgatccaaggacagcgcgacttcttcggtgcgcacacctacaagcgcatcgacaaggatggctccttccacaccgagtggtccggcgaccgctccgaggttgaagcttaa

SEQ ID NO: 11867 - protein, 484 aa, Corynebacterium glutamicum
MTNGDNLAQIGVVGLAVMGSNLARNFARNGNTVAVYNRSTDKTDKLIADHGSEGNFIPSATVEEFVASLEKPRRAIIMVQAGNATDAVINQLADAMDEGDIIIDGGNALYTDTIRREKEISARGLHFVGAGISGGEEGALNGPSIMPGGPAKSYESLGPLLESIAANVDGTPCVTHIGPDGAGHFVKMVHNGIEYADMQVIGEAYHLLRYAAGMQPAEIAEVFKEWNAGDLDSYLIEITAEVLSQVDAETGKPLIDVIVDAAGQKGTGRWTVKAALDLGIATTGIGEAVFARALSGATSQRAAAQGNLPAGVLTDLEALGVDKAQFVEDVRRALYASKLVAYAQGFDEIKAGSDENNWDVDPRDLATIWRGGCIIRAKFLNRIVEAYDANAELESLLLDPYFKSELGDLIDSWRRVIVTATQLGLPIPVFASSLSYYDSLRAERLPAALIQGQRDFFGAHTYKRIDKDGSFHTEWSGDRSEVEA

SEQ ID NO: 11868 - DNA, 2335 bp, Corynebacterium glutamicum
  CDS (474)..(1853)
ttgttcggccacgatgacaccggagctcacagcagaaatgaagtcggtgttgttgttgatgccgacgaccatttttccaggggcggaaatcatgctggcgactgatccagtggattcggcgatggcggcgtagacaccaccgttgaccaagcccaccacttgcaggtgcttggatgccacgtgaagttcgctgaccacccggccgggctcgatggtggtgtagcgcagccccagattgcggtcgaggccataattggcgttgttgagtgcttcaagttcgtctgtggttaaagctctggtggcggcaagttctgcaagcgaaagcagatcttggggttgatcatcgcgggaagtcataattaattactctagtcggcctaaaatggttggattttcacctcctgtgacctggtaaaatcgccactacccccaaatggtcacaccttttaggccgattttgctgacaccgggctatgccgtcaagtacgatcaataacatgactaatggagataatctcgcacagatcggcgttgtaggcctagcagtaatgggctcaaacctcgcccgcaacttcgcccgcaacggcaacactgtcgctgtctacaaccgcagcactgacaaaaccgacaagctcatcgccgatcacggctccgaaggcaacttcatcccttctgcaaccgtcgaagagttcgtagcatccctggaaaagccacgccgcgccatcatcatggttcaggctggtaacgccaccgacgcagtcatcaaccagctggcagatgccatggacgaaggcgacatcatcatcgacggcggcaacgccctctacaccgacaccattcgtcgcgagaaggaaatctccgcacgcggtctccacttcgtcggtgctggtatctccggcggcgaagaaggcgcactcaacggcccatccatcatgcctggtggcccagcaaagtcctacgagtccctcggaccactgcttgagtccatcgctgccaacgttgacggcaccccatgtgtcacccacatcggcccagacggcgccggccacttcgtcaagatggtccacaacggcatcgagtacgccgacatgcaggtcatcggcgaggcataccaccttctgccctacgcagcaggcatgcagccagctgaaatcgctgaggttttcaaggaatggaacgcaggcgacctggattcctacctcatcgaaatcaccgcagaggttctctcccaggtggatgctgaaaccggcaagccactaatcgacgtcatcgttgacgctgcaggtcagaagggcaccggcaagtggactgtcaaggctgctcttgatctgggtattgctaccaccggcatcggcgaacgtgttttcgcacgtgcactctccggcgcaaccagccagcgcgctgcagcacagggcaacctacctgcaggtgtcctcaccgatctggaagcacttggcgtggacaaggcacagttcgtcgaaggacttcgccgtgcactgtacgcatccaagcttgttgcttacgcacagggcttcgacgagatcaaggctggctccgacgagaacaactgggacgttgaccctcgcgacctcgctaccatctggcgcggcggctgcatcattcgcgctaagttcctcaaccgcatcgtcgaagcatacgatgcaaacgctgaacttgagtccctgctgctcgatccttacttcaagagcgagctcggcgacctcatcgattcatggcgtcgcgtgattgtcaccgccacccagcttggcctgccaatcccagtgttcgcttcctccctgtcctactacgacagcctgcgtgcagagcgtctgccagcagccctgatccactagtgtcgacctgcaggcgcgcgagctccagcttttgttccctttagtgagggttaatttcgagcttggcgtaatcaaggtcatagctgtttcctgtgtgaaattgttatccgctcacaattccacacaatatacgagccggaagtataaagtgtaaagcctggggtgcctaatgagtgagctaactcacagtaattgcggctagcggatctgacggttcactaaaccagctctgcttatatagacctcccaccgtacacgcctaccgcccatttgcgtcaatggggcggagttgttacgacattttggaaagtcccgttgattttggtgccaaaacaaactcccattgacgtcaatggggtggagacttggaaatccccgtgagtcaaaccgctatccacgcccattgatgtactgccaaaaccgcatcaccatggtaatagcgatgactaatacgtagatgtactgccaagtaggaaagtccc

SEQ ID NO: 11869 - protein, 459 aa, Corynebacterium glutamicum
MPSSTINNMTNGDNLAQIGVVGLAVMGSNLARNFARNGNTVAVYNRSTDKTDKLIADHGSEGNFIPSATVEEFVASLEKPRRAIIMVQAGNATDAVINQLADAMDEGDIIIDGGNALYTDTIRREKEISARGLHFVGAGISGGEEGALNGPSIMPGGPAKSYESLGPLLESIAANVDGTPCVTHIGPDGAGHFVKMVHNGIEYADMQVIGEAYHLLPYAAGMQPAEIAEVFKEWNAGDLDSYLIEITAEVLSQVDAETGKPLIDVIVDAAGQKGTGKWTVKAALDLGIATTGIGERVFARALSGATSQRAAAQGNLPAGVLTDLEALGVDKAQFVEGLRRALYASKLVAYAQGFDEIKAGSDENNWDVDPRDLATIWRGGCIIRAKFLNRIVEAYDANAELESLLLDPYFKSELGDLIDSWRRVIVTATQLGLPIPVFASSLSYYDSLRAERLPAALIH

SEQ ID NO: 11870 - DNA, 1407 bp, Escherichia coli
  CDS (1)..(1407)
atgtccaagcaacagatcggggttgtcggtatggctgtgatggggcgtaaccttgcgctgaatatcgaaagccgtggttataccgtctccgttttcaaccgctcccgtgaaaagaccgaagaagtgattgccgaaaacccaggcaagaaactggttccttactacacagtacaagagtttgttgaatccctcgaaacaccacgtcgtatcctgttgatggtgaaggccggggctggcaccgacagcgccatcgattccctgaagccttacctcgacaaaggcgacatcatcattgatggcggcaatactttcttccaggataccatccgtcgtaaccgtgaactgtctgccgaaggttttaactttatcggtaccggtgtttccggtggagaagagggggctctgaaagggccttccatcatgcccggtggccagaaagaagcctatgagctggttgctccaattctgaagcagattgctgcggttgctgaagacggcgagccatgtgtcacctatatcggtgctgatggtgctggtcattatgtaaagatggttcataacggcatcgagtatggcgatatgcaactcattgcagaagcttatgcgctgttgaaaggcggtctggctctttccaacgaagagctggcgcaaaccttcaccgaatggaacgaaggtgaactgagcagttacctgatcgacattaccaaagatatcttcaccaagaaggatgaagaaggtaaatacctcgttgatgtcattcttgatgaagctgcaaacaaaggtaccggtaagtggaccagccagagctcactggatctcggcgaacctctgtctctgatcaccgagtccgtatttgctcgttacatttcttcgcttaaagaccagcgtgtagctgcttcgaaagtgctgagtggtccgcaggctcaaccagccggcgataaagcagaatttatcgaaaaagtgcgtcgcgcgttgtacctcggtaaaatcgtctcctatgctcagggcttctcccagctacgagctgcttctgatgaatacaactgggagctgaactacggcgagatcgctaagattttccgcgctggctgcataattcgtgcgcagttcctgcagaaaatcaccgatgcttatgcgcaaaaggctggcattgctaacctcctgctggcgccgtacttcaaacagatcgctgatgactatcagcaggcgctgcgtgatgtcgtggcgtatgcgtatcagaatggtattccggtaccgacgttctctgcggcaattgcctactatgacagctaccgttccgcagttctgcccgctaacctgattcaggctcagcgtgattactttggcgcgcacacttataagcgtactgataaagaaggtgtattccataccgagtggttggaataa

SEQ ID NO: 11871 - protein, 468 aa, Escherichia coli
MSKQQIGVVGMAVMGRNLALNIESRGYTVSVFNRSREKTEEVIAENPGKKLVPYYTVQEFVESLETPRRILLMVKAGAGTDSAIDSLKPYLDKGDIIIDGGNTFFQDTIRRNRELSAEGFNFIGTGVSGGEEGALKGPSIMPGGQKEAYELVAPILKQIAAVAEDGEPCVTYIGADGAGHYVKMVHNGIEYGDMQLIAEAYALLKGGLALSNEELAQTFTEWNEGELSSYLIDITKDIFTKKDEEGKYLVDVILDEAANKGTGKWTSQSSLDLGEPLSLITESVFARYISSLKDQRVAASKVLSGPQAQPAGDKAEFIEKVRRALYLGKIVSYAQGFSQLRAASDEYNWELNYGEIAKIFRAGCIIRAQFLQKITDAYAQKAGIANLLLAPYFKQIADDYQQALRDVVAYAYQNGIPVPTFSAAIAYYDSYRSAVLPANLIQAQRDYFGAHTYKRTDKEGVFHTEWLE

SEQ ID NO: 11872 - DNA, 1407 bp, Escherichia coli
  CDS (1)..(1407)
atgtcaaagcaacagatcggcgtagtcggtatggcagtgatggggcgcaaccttgcgctcaacatcgaaagccgtggttataccgtctctattttcaaccgttcccgtgagaagacggaagaggtgattgccgaaaatccaggcaagaaactggttccttactatacggtgaaagagtttgttgaatctctggaaacgcctcgtcgcatcctgttaatggtgaaagcaggtgcaggcacggatgctgctattgattctctcaagccatacctcgataaaggtgacatcatcattgatggtggtaacaccttcttccaggacaccattcgtcgtaaccgtgagctttctgccgaaggttttaacttcatcggtaccggtgtttctggcggtgaagagggggcgctgaaaggtccttccattatgcctggtgggcagaaagaagcctatgaactggttgctccgatcctgaccaaaatcgccgccgttgctgaagatggcgcaccgtgcgttacctatattggtgccgatggcgctggtcactatgtgaagatggttcacaacggtattgaatacggtgatatgcaactgatcgttgaagcctattctctcctgaaaggcggcctgaatctctctaacgaagaactggcgcagacctttaccgagtggaataacggtgaactgagcagctacctgattgacatcaccaaagacatcttcactaaaaaagatgaagacggtaactacctggttgatgtgatcctggatgaagcagcaaacaaaggtaccggtaaatggactagccagagcgcactggatctcggcgaaccggtgtcgctgattaccgagtctgtgtttgcacgttatatctcttctctgaaagatcagcgtgttgccgcgtctaaagttctctctggtcgccaagcgcagccagcaggcgacaaagctgaattcattgaaaaagttcgccgtgcgctgtatctgggcaaaatcgtttcttacgctcagggcttctctcagctacgcgccgcgtctgaagagtacaactgggatctgaactacggcgaaatcgcgaagattttccgtgctggctgcatcatccgtgccaggttcctgcagaaaacaaccgatgcatatgccgaaaatccgcagatcgctaacctactgctggctccgtacttcaagcaaattgccgatgactaccagcaggcgctgcgtgatgtcgttgcttatgcagtgcagaacggtatcccggttccgaccttcgccgctgcggttgcctattacgatagctaccgtgccgctgttctgcctgcgaacctgatccaggcacagcgtgactatttcggtgcacatacttataagcgcattgataaagccggtgtgttccatactgaatggctggattaa

SEQ ID NO: 11873 - protein, 468 aa, Escherichia coli
MSKQQIGVVGMAVMGRNLALNIESRGYTVSIFNRSREKTEEVIAENPGKKLVPYYTVKEFVESLETPRRILLMVKAGAGTDAAIDSLKPYLDKGDIIIDGGNTFFQDTIRRNRELSAEGFNFIGTGVSGGEEGALKGPSIMPGGQKEAYELVAPILTKIAAVAEDGAPCVTYIGADGAGHYVKMVHNGIEYGDMQLIVEAYSLLKGGLNLSNEELAQTFTEWNNGELSSYLIDITKDIFTKKDEDGNYLVDVILDEAANKGTGKWTSQSALDLGEPVSLITESVFARYISSLKDQRVAASKVLSGRQAQPAGDKAEFIEKVRRALYLGKIVSYAQGFSQLRAASEEYNWDLNYGEIAKIFRAGCIIRARFLQKTTDAYAENPQIANLLLAPYFKQIADDYQQALRDVVAYAVQNGIPVPTFAAAVAYYDSYRAAVLPANLIQAQRDYFGAHTYKRIDKAGVFHTEWLD

SEQ ID NO: 11874 - DNA, 1407 bp, Escherichia coli
  CDS (1)..(1407)
atgtcaaagcaacagatcggcgtcgtcggtatggcagtgatggggcgcaaccttgcgctcaacatcgaaagccgtggttataccgtctctattttcaaccgttcccgtgagaaaacggaagaagtaattgccgaaaacccaggcaagaaactggttccttactatacggtgaaagagtttgttgaatctctggaaacgcctcgtcgcatcctgttaatggtgaaagcaggtgcaggcacggatgctgctattgattccctcaaaccatatctcgataaaggtgacatcatcattgatggcggtaacaccttcttccaggacaccattcgtcgtaaccgtgagctttctgccgaaggctttaacttcattggtaccggtgtttccggtggtgaagaaggcgcgctgaaaggtccttccattatgcctggtgggcagaaagaagcctatgaactggttgcaccgatcctgaccaaaatcgccgcagtggctgaagacggtgagccatgcgttacctatattggtgccgatggcgcaggtcactatgtgaagatggttcacaacggtattgaatacggcgatatgcagctgattgctgaagcctattctctgcttaaaggtggcctgaatctcaccaacgaagaattggcgcagacctttaccgagtggaataacggtgaactgagcagctacctgatcgacatcaccaaagacattttcactaaaaaagatgaagacggtaactacctggttgatgtgattctggatgaagcagcaaacaaaggtaccggtaaatggactagccagagcgcgctggatctcggcgaaccgctgtcgctgattacagagtctgtgtttgcacgttatatctcttctctgaaagagcagcgcgttgccgcgtctaacgtactgactggtcgccaagcgcagccagcaggcgacaaggctgagtttatcgaaaaagttcgccgtgcgctgtatctgggcaaaatcgtttcttacgctcagggcttttctcagctgcgtgctgcgtctgaagagtacaactgggacctgaattacggcgaaatcgcgaagattttccgtgctggctgcatcattcgtgccaggttcctgcagaaaattaccgatgcttatgccgaaaatccgcagatcgctaacctgctgctggctccgtacttcaagcaaattgccgatgattaccagcaggcgctgcgtgatgtcgttgcttatgcggtacagaacggtatcccggttccgaccttcgctgctgcggttgcctattacgatagctaccgtgccgctgttctgcctgcgaacctgatccaggcacagcgtgactatttcggtgcgcatacttataagcgcattgataaagaaggtgtgttccatactgaatggctggattaa

SEQ ID NO: 11875 - protein, 468 aa, Escherichia coli
MSKQQIGVVGMAVMGRNLALNIESRGYTVSIFNRSREKTEEVIAENPGKKLVPYYTVKEFVESLETPRRILLMVKAGAGTDAAIDSLKPYLDKGDIIIDGGNTFFQDTIRRNRELSAEGFNFIGTGVSGGEEGALKGPSIMPGGQKEAYELVAPILTKIAAVAEDGEPCVTYIGADGAGHYVKMVHNGIEYGDMQLIAEAYSLLKGGLNLTNEELAQTFTEWNNGELSSYLIDITKDIFTKKDEDGNYLVDVILDEAANKGTGKWTSQSALDLGEPLSLITESVFARYISSLKEQRVAASNVLTGRQAQPAGDKAEFIEKVRRALYLGKIVSYAQGFSQLRAASEEYNWDLNYGEIAKIFRAGCIIRARFLQKITDAYAENPQIANLLLAPYFKQIADDYQQALRDVVAYAVQNGIPVPTFAAAVAYYDSYRAAVLPANLIQAQRDYFGAHTYKRIDKEGVFHTEWLD

SEQ ID NO: 11876 - DNA, 1421 bp, Escherichia coli
  misc_feature (1408)..(1408): n is a, c, g, or t
  CDS (1)..(1407)
atgtccaagcaacagatcggcgtcgtcggtatggcagtgatggggcgcaacctggcgctcaacatcgaaagccgtggttataccgtctctgtcttcaaccggtcccgcgaaaaaactgaagaagttgttgccgagaacccgggtaagaaactggttccttattacacggtgaaagagtttgtcgagtctctggaaacccctcgtcgcatcctgttaatggtgaaagcaggtgcaggcacggatgctgctattgattccctcaaaccatatctcgataaaggtgacatcatcattgatggtggtaacaccttcttccaggacactattcgtcgtaatcgtgagctttcagcagagggctttaacttcatcggtaccggtgtttccggcggtgaagagggggcgttgaaaggaccttccatcatgcctggtgggcagaaagaagcctatgaactggtagcaccgatcctgaccaaaatcgccgcagtagctgaagacggtgagccatgcgttacctatattggtgccgatggcgcaggtcactatgtgaagatggttcacaacggtattgaatacggcgatatgcagctgattgctgaagcctattctctgctaaaaggtggcctgaacctcaccaacgaagaactggcgcagacttttaccgagtggaataacggtgaactgagcagctacctgatcgacatcaccaaagatatcttcaccaaaaaagatgaagacggtaactacctggttgatgtgattctggatgaagcagcaaacaaaggcacgggcaaatggaccagccagagtgcgctggatctcggcgaaccgctgtcgctgataaccgagtctgtgtttgcacgttatatctcttctctgaaagatcagcgcgttgccgcgtctaaagttctctctggcccgcaagcgcagccagcaggcgacaaggctgagttcatcgaaaaagttcgtcgtgcgctgtatctgggcaaaatcgtttcttacgctcagggcttctctcagctacgcgccgcgtctgaagagtacaactgggatctgaactacggcgaaatcgcgaagattttccgtgctggctgcatcatccgtgccaggttcctgcagaaaatcaccgatgcttatgccgaagatccgcagatcgctaacctgctgctggctccgtacttcaagcaaattgctgatgactaccagcaggcgctgcgtgatgtcgttgcttatgcagtacaaaacggtatcccggttccgaccttcgccgctgcggttgcctattacgatagctaccgtgccgctgttctgcctgcgaacctgatccaggcacagcgtgactatttcggtgcacatacttataagcgcattgataaagaaggtgtgttccatactgaatggctggattaanttystrctstart

SEQ ID NO: 11877 - protein, 468 aa, Escherichia coli
MSKQQIGVVGMAVMGRNLALNIESRGYTVSVFNRSREKTEEVVAENPGKKLVPYYTVKEFVESLETPRRILLMVKAGAGTDAAIDSLKPYLDKGDIIIDGGNTFFQDTIRRNRELSAEGFNFIGTGVSGGEEGALKGPSIMPGGQKEAYELVAPILTKIAAVAEDGEPCVTYIGADGAGHYVKMVHNGIEYGDMQLIAEAYSLLKGGLNLTNEELAQTFTEWNNGELSSYLIDITKDIFTKKDEDGNYLVDVILDEAANKGTGKWTSQSALDLGEPLSLITESVFARYISSLKDQRVAASKVLSGPQAQPAGDKAEFIEKVRRALYLGKIVSYAQGFSQLRAASEEYNWDLNYGEIAKIFRAGCIIRARFLQKITDAYAEDPQIANLLLAPYFKQIADDYQQALRDVVAYAVQNGIPVPTFAAAVAYYDSYRAAVLPANLIQAQRDYFGAHTYKRIDKEGVFHTEWLD

SEQ ID NO: 11878 - DNA, 1488 bp, Debaryomyces hansenii CBS767
  CDS (1)..(1488)
atgtctgctccaactggtgatattggtttaattggtttagccgttatgggtcaaaacttgatcttaaacgctgctgacaatggttacactgtcgtagcttacaacagaactgttgcaaaggtcgacgacttcttggacaacgaggctaagggcaaatcagtcattggtgctcactccatcgaagaattatgtgctaacttgaagagaccaagaagaatcattttattagttaaggctggtaaaccagttgacgcttttattgaacaattattacctcacttagaaaagggtgatatcatcattgacggtggtaactcccatttcccagattctaaccgtcgttacgaagaattaaacggtaagggtatcttattcgttggttctggtgtttctggtggtgaagaaggtgctagatacggtccatctttgatgccaggtggtcacaaggacgcttggccacacatcaaggatatcttccaaagtattgctgccaagtctgatggtgaaccatgttgtgactgggttggtgatgccggtgctggtcattacgttaagatggtgcacaatggtattgaatacggtgacatgcaattgatttgtgaagcttatgatttattaaagagagttggtaaattctccaacaaggaaatcggtgacgttttcgctaaatggaacaagggtgttttagactctttcttaattgaaattaccagagatattttgtacttcaatgatccaactgacaataagccattattagaaaagattttggatactgctggtcagaagggtactggtaagtggactgctatcaatgctttagatttaggtatgcctgtcaccttaattggtgaagctgttttctctcgttgtttatccgccttgaaggatgaaagagtcagagcttctaaatcattagccggcccatcagttgaagatgacgaatctccaattcaagataagcaaaagttcgttgacgacttagaacaagctttatatgcttctaagattatctcttacgctcaaggtttcatgttgattagagaagctgctaaggaatacggctggaaattaaataacccagctatcgccttaatgtggagaggtggttgtattatcagatctgttttcttaggtgaaatcacttctgcttaccgtgaaaccccagacttagaaaacttattattccatccattcttcaatgatgccatcaaaaaggctcaaaagggttggagatcaactattggtaaggctgttgaatttggtgttccagttccagcttttagcactgctttatctttctacgatggttacagatctgctaagttaccagctaacttgttgcaagctcaaagagattacttcggtgctcacactttccaagtgttaccaggtgaagaaaatgatttcttaaagaaggaccaatggatccatgttaactggaccggtaagggtggtaatgtttccgcctctacttatgatgcttag

SEQ ID NO: 11879 - protein, 495 aa, Debaryomyces hansenii CBS767
MSAPTGDIGLIGLAVMGQNLILNAADNGYTVVAYNRTVAKVDDFLDNEAKGKSVIGAHSIEELCANLKRPRRIILLVKAGKPVDAFIEQLLPHLEKGDIIIDGGNSHFPDSNRRYEELNGKGILFVGSGVSGGEEGARYGPSLMPGGHKDAWPHIKDIFQSIAAKSDGEPCCDWVGDAGAGHYVKMVHNGIEYGDMQLICEAYDLLKRVGKFSNKEIGDVFAKWNKGVLDSFLIEITRDILYFNDPTDNKPLLEKILDTAGQKGTGKWTAINALDLGMPVTLIGEAVFSRCLSALKDERVRASKSLAGPSVEDDESPIQDKQKFVDDLEQALYASKIISYAQGFMLIREAAKEYGWKLNNPAIALMWRGGCIIRSVFLGEITSAYRETPDLENLLFHPFFNDAIKKAQKGWRSTIGKAVEFGVPVPAFSTALSFYDGYRSAKLPANLLQAQRDYFGAHTFQVLPGEENDFLKKDQWIHVNWTGKGGNVSASTYDA

SEQ ID NO: 11880 - DNA, 1470 bp, Yarrowia lipolytica CLIB99
  CDS (1)..(1470)
atgactgacacttcaaacatcaagcctgtcgctgacattgccctcatcggtctcgccgtcatgggccagaacctgatcctcaacatggccgaccacggctacgaggttgttgcctacaaccgaaccacctccaaggtcgaccacttcctcgagaacgaggccaagggaaagtccattattggtgctcactctatcaaggagctgtgtgctctgctgaagcgaccccgacgaatcattctgctcgttaaggccggtgctgctgtcgattctttcatcgaacagctcctgccctatctcgataagggtgatatcatcattgacggtggtaactcccacttccccgactccaaccgacgatacgaggagcttaacgagaagggaatcctctttgttggttccggtgtttccggcggtgaggagggtgcccgatacggtccctccatcatgcccggtggaaacaaggaggcctggccccacattaagaagattttccaggacatctctgctaaggctgatggtgagccctgctgtgactgggtcggtgacgctggtgccggccactttgtcaagatggttcacaacggtattgagtatggtgacatgcagcttatctgcgaggcttacgacctcatgaagcgaggtgctggtttcaccaatgaggagattggagacgttttcgccaagtggaacaacggtatcctcgactccttcctcattgagatcacccgagacatcttcaagtacgacgacggctctggaactcctctcgttgagaagatctccgacactgctggccagaagggtactggaaagtggaccgctatcaacgctcttgaccttggtatgcccgtcaccctgatcggtgaggccgtcttcgctcgatgcctttctgccctcaagcaggagcgtgtccgagcttccaaggttcttgatggccccgagcccgtcaagttcactggtgacaagaaggagtttgtcgaccagctcgagcaggccctttacgcctccaagatcatctcttacgcccagggtttcatgcttatccgagaggccgccaagacctacggctgggagctcaacaacgccggtattgccctcatgtggcgaggtggttgcatcatccgatccgtcttccttgctgacatcaccaaggcttaccgacaggaccccaacctcgagaacctgctgttcaacgacttcttcaagaacgccatctccaaggccaacccctcttggcgagctaccgtggccaaggctgtcacctggggtgttcccactcccgcctttgcctcggctctggctttctacgacggttaccgatctgccaagctccccgctaacctgctccaggcccagcgagactacttcggcgcccacacctaccagctcctcgatggtgatggaaagtggatccacaccaactggaccggccgaggtggtgaggtttcttcttccacttacgatgcttaa

SEQ ID NO: 11881 - protein, 489 aa, Yarrowia lipolytica CLIB99
MTDTSNIKPVADIALIGLAVMGQNLILNMADHGYEVVAYNRTTSKVDHFLENEAKGKSIIGAHSIKELCALLKRPRRIILLVKAGAAVDSFIEQLLPYLDKGDIIIDGGNSHFPDSNRRYEELNEKGILFVGSGVSGGEEGARYGPSIMPGGNKEAWPHIKKIFQDISAKADGEPCCDWVGDAGAGHFVKMVHNGIEYGDMQLICEAYDLMKRGAGFTNEEIGDVFAKWNNGILDSFLIEITRDIFKYDDGSGTPLVEKISDTAGQKGTGKWTAINALDLGMPVTLIGEAVFARCLSALKQERVRASKVLDGPEPVKFTGDKKEFVDQLEQALYASKIISYAQGFMLIREAAKTYGWELNNAGIALMWRGGCIIRSVFLADITKAYRQDPNLENLLFNDFFKNAISKANPSWRATVAKAVTWGVPTPAFASALAFYDGYRSAKLPANLLQAQRDYFGAHTYQLLDGDGKWIHTNWTGRGGEVSSSTYDA

SEQ ID NO: 11882 - DNA, 1407 bp, Erwinia carotovora subsp
  CDS (1)..(1407)
atgtccaaacagcaaattggcgttgttggtatggcggtgatggggcgcaatctggcgctgaacattgagagccgtggctatagcgtttccatctttaaccgctcttccgataaaaccgatgaagttatcgcggaaaatccgggtaaaaaactggtgccttcttacaccgttgaagagtttgtcgaatccctggaaaaaccccgccgtattctgctgatggtgaaggccggtgaagcaaccgataaaacgattgaatcgctgaaaccttacctggagaagggcgatattctgatcgatggcggtaacaccttctataaagataccattcgccgtaaccgcgaactgtccgctgaagggtttaacttcatcggtacaggcgtatccggcggagaagagggtgcactgaaagggccttctattatgcctggtggccagaaagaagcttatgatttggtggcaccgattctggaacagatcgccgcgcgtgctgatggcgaagcctgtgtgacctatattggctctgatggcgctgggcactatgtcaagatggtgcataacggtattgaatacggcgatatgcagcttattgctgaagcctatgcattgctcaagcaggcactgaatctggacaacgacgagcttgctaccacgttctctgagtggaacaaaggcgagttaagcagctacctgattgaaatcacggccgatatcttcaagaaaaaagatgaagaaggtaaatatctggttgacgtgattctggatgaagcggctaacaaaggtaccggtaaatggaccagccaaagctctctggatctgggcgaacctttgtctctgatcacggaatccgtttttgcccgctacctttcttcactgaaagatcagcgtgtcgctgcatctaaagtactgactggcccaacggctcagccatttggcggtgataaagccgagttcgttgagaaagtacgtcgtgcgctgtacttaggcaaaatcgtttcttatgctcagggcttctcacagctgaaagcggcatcagacgagaacagctgggatctgaactacggtgaaatcgccaagattttccgcgcgggttgcatcattcgtgcgcagttcctacaaaaaatcaccgatgcgtatgagcagaaagcggatattgctaacctgctgctggcaccttacttcaaaaaagtggcggatgaataccagcaagcactgcgcgacgtcgtctcttacgccgttcagcagggtatcccgacgccaacattctcagcggcaattgcctattacgacagctaccgctcagccgtgctgccagctaacctgattcaggctcagcgtgactatttcggcgcgcatacctataagcgtacagataaagaaggtgtattccataccgaatggttggaataa

SEQ ID NO: 11883 - protein, 468 aa, Erwinia carotovora subsp
MSKQQIGVVGMAVMGRNLALNIESRGYSVSIFNRSSDKTDEVIAENPGKKLVPSYTVEEFVESLEKPRRILLMVKAGEATDKTIESLKPYLEKGDILIDGGNTFYKDTIRRNRELSAEGFNFIGTGVSGGEEGALKGPSIMPGGQKEAYDLVAPILEQIAARADGEACVTYIGSDGAGHYVKMVHNGIEYGDMQLIAEAYALLKQALNLDNDELATTFSEWNKGELSSYLIEITADIFKKKDEEGKYLVDVILDEAANKGTGKWTSQSSLDLGEPLSLITESVFARYLSSLKDQRVAASKVLTGPTAQPFGGDKAEFVEKVRRALYLGKIVSYAQGFSQLKAASDENSWDLNYGEIAKIFRAGCIIRAQFLQKITDAYEQKADIANLLLAPYFKKVADEYQQALRDVVSYAVQQGIPTPTFSAAIAYYDSYRSAVLPANLIQAQRDYFGAHTYKRTDKEGVFHTEWLE

SEQ ID NO: 11884 - DNA, 1470 bp, Candida glabrata CBS138
  CDS (1)..(1470)
atgtctgctgatttcggtttgattggtttggccgttatgggtcaaaacttgatcctaaacattgctgaccacggttacactgttgttgcttacaacagatccgttgacaaggtccaccaattcttggacaacgaagccaagggtaagtccatcatcggtgctgagtccatcgaggacttggtcgccaagttgaagagacctagaaagatcatgatgttggtcaaggccggtgccccagtcgacggtttgatcgctcaattggttccacacttggaaaagggtgacatcatcattgacggtggtaactcccacttcccagactctaacagacgttacgaggagttgaaggccaagggtatcttgttcgtcggctctggtgtctctggtggtgaagacggtgcccgttacggtccatctttgatgccaggtggtgccgaagaagcttggccacacatcaaggagatcttccaatccatctccgccaagtccgacggtgagccatgttgtgactgggttggcccagctggttctggtcactacgtcaagatggtccacaacggtatcgaatacggtgacatgcagttgatctgtgaagcctacgacatcatgaagagaatcggtggtttcaccgacaaggaaatctccgaagtcttcggcaagtgggacactggtgttctagactctttcttggtcgaaattaccaccaacatcctaaagaaggacgacgttgacggtaagccattggttgaaaagatcatggactctgctggtcaaaagggtaccggtaagtggaccgccatcaacgccttggacctaggtatgccagtctctttgattggtgaagccgtcttcgctagatgtttgtctgctctaaagtgtgaaagagttaaggcctccaagactttgccaggcccagaaattccaaaggacttgatcaaggacagacaacaattcattgacgacttggaacaagccctatacgcttctaagatcatctcctacgctcaaggtttcatgttgatcagagaagccgctaagacttacggctggaagctaaacaacccagctattgctctaatgtggagaggtggttgtatcatcagatccgtcttcttgggtgaaatcaccaaggcttacagagaaaacccagacttggaaaacttgctattccacaagttcttcaaggacgccgtcaccaaggctcaaggtggctggagaagatctttggctttggctgccacttacggtatcccatccccagccttcgccaccgctttgtccttctacgatggttacagatctgaaagattgccagctaacttgttgcaagctcaacgtgactacttcggtgctcacactttcagagtcttgccagaatgtgcttccgactccctaccaaaggacaaggacatccacatcaactggaccggtcacggtggtaacgtctcttctaccacttacgatgcttaa

SEQ ID NO: 11885 - protein, 489 aa, Candida glabrata CBS138
MSADFGLIGLAVMGQNLILNIADHGYTVVAYNRSVDKVHQFLDNEAKGKSIIGAESIEDLVAKLKRPRKIMMLVKAGAPVDGLIAQLVPHLEKGDIIIDGGNSHFPDSNRRYEELKAKGILFVGSGVSGGEDGARYGPSLMPGGAEEAWPHIKEIFQSISAKSDGEPCCDWVGPAGSGHYVKMVHNGIEYGDMQLICEAYDIMKRIGGFTDKEISEVFGKWDTGVLDSFLVEITTNILKKDDVDGKPLVEKIMDSAGQKGTGKWTAINALDLGMPVSLIGEAVFARCLSALKCERVKASKTLPGPEIPKDLIKDRQQFIDDLEQALYASKIISYAQGFMLIREAAKTYGWKLNNPAIALMWRGGCIIRSVFLGEITKAYRENPDLENLLFHKFFKDAVTKAQGGWRRSLALAATYGIPSPAFATALSFYDGYRSERLPANLLQAQRDYFGAHTFRVLPECASDSLPKDKDIHINWTGHGGNVSSTTYDA

SEQ ID NO: 11886 - DNA, 894 bp, Bacillus thuringiensis
  CDS (1)..(894)
atgcaagtaggattaattggcttaggtaaaatgggattaaacttagggaaaaatttaatcgatcataaacatgaagtagcagcatttgatttgaatgcaagtgcagtggaagaaatgaaagagtacggggcaacaggtgcatctagtttaaatgaacttgttcagtcattacaatcaccaagagttctttgggttatggtaccacacgctgttgtagattctgttatcgatgaggttacaccacttttatcaaaaggagatattttaattgaagcgggtaattcacattataaagagtctattcgccgatatgagcaactaaagaaagatggcattcactttatggatgcaggaacttctggcggaatggaaggcgctcgtaatggtgcttgttatatgatcgggggagatcaagaagcttgggacatcgttgaacctatcttccgcgatactgctgtagaaaatggatacttatatgctggaaaagctggtagtggtcacttcttaaaaatggttcacaacggaattgaatacggtatgatggctgctattggtgaaggatttgagattctagagaaaagtgaatttgactacgattatgaaaaagtatcaagagtatggaacaacggttcagtaatccgttcatggttaatggaattaacagaaaatgcattttctaaagatgcaaaactggatgaaattaagggtgttatgcattcttctggtgaaggaaaatggacagtagaaacggcattagatcttcaaacagcaactcctgttatcgcaatgtctctattaatgcgctaccgctcattagacaatgatacatttacaggaaaagtagtagctgctctgcgcaatgaatttggcggacatgcagtagaaaagaaataa

SEQ ID NO: 11887 - protein, 297 aa, Bacillus thuringiensis
MQVGLIGLGKMGLNLGKNLIDHKHEVAAFDLNASAVEEMKEYGATGASSLNELVQSLQSPRVLWVMVPHAVVDSVIDEVTPLLSKGDILIEAGNSHYKESIRRYEQLKKDGIHFMDAGTSGGMEGARNGACYMIGGDQEAWDIVEPIFRDTAVENGYLYAGKAGSGHFLKMVHNGIEYGMMAAIGEGFEILEKSEFDYDYEKVSRVWNNGSVIRSWLMELTENAFSKDAKLDEIKGVMHSSGEGKWTVETALDLQTATPVIAMSLLMRYRSLDNDTFTGKVVAALRNEFGGHAVEKK

SEQ ID NO: 11888 - DNA, 1410 bp, Bacillus thuringiensis
  CDS (1)..(1410)
atggaaaagttacaaattggagttgttggtgtgggtgttatgggaaaaagtctcgcacttaactttgagagtaaagggtattctgttgccctatatgatatttcaaaggaaaaagttgatgaaaccattgaggaaaaccgtggtaaaaacttagttggtactcatatagttgaagagtttgttaactcactcgaatcacctagaaagattttattaatggttaatgcgggggaaattacagataaagcgattgattctctagtccctcacctcgataaaggtgatattttaattgacggtggtaatacatactttgtcgatacaattcgccgaaacaaacgtcttgccgaagaaggaatcaatttcatcggggcaggtgtgtcaggcggcgaagagggtgcattgaagggaccatctattatgcccggcggacagaaggatgcatacgaaaaagtaaaggatatgcttgaaaacatctctgcaaaagtgaataacgagccttgctgttcttatatcggacctaatggggcaggacactatgtaaagatggttcacaatggtattgagtatggagatatgcaattaatttgtgaagcatatttcttcttgaaacaaacactagatttgactgcagaagagttccatgaaatatttgctgaatggaataaaggtgaactgaatagctatctaattgagattacagccgatattttcaagaagaaagatgaagaaactggtaagccattagtggatgttattcttgatactgcaggacaaaagggtacagggaaatggacaagtcaaagcgcacttgatttaggtatctctctgcctattatcacggaatctgtatttgcacgttgcatttctgctttaaaagaagagcgtgtgaacgcaagcaaagttttatctggccctaaagataaaacggcaattggagttgaaaaagccgaattaattgaagcggtgcgccaagctttatatatgagcaaaatttgttcttatgcacaaggattcacgcaattgaaggcagcttctgaggaatatgattggaaccttgattttggcagcatttctatgctttggagaggtggatgcattatccgtgctgcctttttacagaacattaaagaggcttatgagactaacactgacctaccgaatcttttacttgatccatactttaaagaaattgtagagtcatatcaaggtggattacgccaaattatctcaatggcggtacaacagggcattccgatacctgcattttcagcagcaatttcttattatgacagctatcgtactgccaaactacctgcaaacttattgcaagcgcagcgcgattattttggagcgcatacgtataaacgagtagataaagaaggtacattccatacaaaatggatataa

SEQ ID NO: 11889 - protein, 469 aa, Bacillus thuringiensis
MEKLQIGVVGVGVMGKSLALNFESKGYSVALYDISKEKVDETIEENRGKNLVGTHIVEEFVNSLESPRKILLMVNAGEITDKAIDSLVPHLDKGDILIDGGNTYFVDTIRRNKRLAEEGINFIGAGVSGGEEGALKGPSIMPGGQKDAYEKVKDMLENISAKVNNEPCCSYIGPNGAGHYVKMVHNGIEYGDMQLICEAYFFLKQTLDLTAEEFHEIFAEWNKGELNSYLIEITADIFKKKDEETGKPLVDVILDTAGQKGTGKWTSQSALDLGISLPIITESVFARCISALKEERVNASKVLSGPKDKTAIGVEKAELIEAVRQALYMSKICSYAQGFTQLKAASEEYDWNLDFGSISMLWRGGCIIRAAFLQNIKEAYETNTDLPNLLLDPYFKEIVESYQGGLRQIISMAVQQGIPIPAFSAAISYYDSYRTAKLPANLLQAQRDYFGAHTYKRVDKEGTFHTKWI

SEQ ID NO: 11890 - DNA, 1500 bp, Photobacterium profundum
  CDS (1)..(1500)
atggtttttagattcagacgcagccaaagcgctagtgtaaaggagagtatgatgaaaggtgatattggtgtaatcggtttggctgtaatgggtcagaatctgattttgaacatgaacgatcacggttttaaagtcgtagcgtttaatcgaaccgtcgctaaagtggatgaatttttagcgggccctgcgaaagacacgaacattattggcgcaacgtctttagaagaccttgtagcaaacttagaagcaccccgtaaagtgatgctgatggtacgtgctggtgatgtggttgatcatttcattgatagccttgtgccattgttagataaaggtgacatcattattgatggtggtaattctaattacccagacactaaccgtcgcgttgcggatttagaagcaaaaggcatttacttcgtcggtacgggtgtatcggggggtgaagaaggtgcacgatttgggccttctattatgccgggcggctctcctgaagcttggccacatgttaagcctatttttcaagtaatctctgcaaaaaccgatcaaggtgaagcgtgttgtgattgggtaggtaaagatggttcgggtcattttgttaaaatggttcacaacggcatcgaatacggtgatatgcagctgatcagtgaagcataccatttcatgaaagaaggcttagggctatcttatgatgagatgcaagcaatctttaaagaatggaatgacactgaactcaatagttacttagttgaaattacagcagatatattaggctaccgcgatgaagatggcgagccgctgctagagaaaattcttgatacggcaggtcaaaagggtactggtaaatggacggggattaatgcacttgaccttggtattccgctaacgctgattactgaatctgtgttcgcgcgttgtttgtctgcaattaaagatcagcgtgttgaagctgaagcgttatttggcaaaaccattcaaccgattgatggcgataagaaagagtgggttgatgcactgcgtcaggcgctgcttgcttcaaaaatcatttcttacgcacaaggctttatgttgattcgtgaagcgtcagaagaaaataattggtcactgaactacggtaacgtagcactcatgtggcgtggcggttgtattattcgaagtgctttcttgggcaacattcgtgatgcatacgaagccacacctgatattaagttcttgggtactgacccatactttaaagatatcttggtcgatagcttaccggcatggcgtaaagtggcagcgaaagcaatggaagtgggtttgcctatgccaacaatgacatcagcattaacgttccttgatggttacacaacaggccgtctacctgccaacatgattcaagcacaacgagactacttcggtgcgcacacgtatgagcgcttagatcaaccccgtggccagttcttccatacgaactggacaggtacaggcggtgatactgcatctaccacgtacgatgtgtaa

SEQ ID NO: 11891 - protein, 499 aa, Photobacterium profundum
MVFRFRRSQSASVKESMMKGDIGVIGLAVMGQNLILNMNDHGFKVVAFNRTVAKVDEFLAGPAKDTNIIGATSLEDLVANLEAPRKVMLMVRAGDVVDHFIDSLVPLLDKGDIIIDGGNSNYPDTNRRVADLEAKGIYFVGTGVSGGEEGARFGPSIMPGGSPEAWPHVKPIFQVISAKTDQGEACCDWVGKDGSGHFVKMVHNGIEYGDMQLISEAYHFMKEGLGLSYDEMQAIFKEWNDTELNSYLVEITADILGYRDEDGEPLLEKILDTAGQKGTGKWTGINALDLGIPLTLITESVFARCLSAIKDQRVEAEALFGKTIQPIDGDKKEWVDALRQALLASKIISYAQGFMLIREASEENNWSLNYGNVALMWRGGCIIRSAFLGNIRDAYEATPDIKFLGTDPYFKDILVDSLPAWRKVAAKAMEVGLPMPTMTSALTFLDGYTTGRLPANMIQAQRDYFGAHTYERLDQPRGQFFHTNWTGTGGDTASTTYDV

SEQ ID NO: 11892 - DNA, 1455 bp, Parachlamydia sp
  CDS (1)..(1455)
atgcacatgacacaagcagatattggtttaatcggtctagccgtaatgggacaaaatctcgttcttaatatgaacgatcatggatacacggttgctgtttataataggacaacttccaaggtagatgaatttttagatgggccagcaaaaggcacaaaagtcattggggctcattcattaaaagatttgattagtcagttgaaacggccacgccgtgtgatgctaatggttaaagcaggtgaacctgtcgataattttattgagcaatgtcttccttatcttgaaaaaggtgacatacttatcgatggaggaaatagcttatttacagacacaaatcgccgttgtaatagtttgaaagaaaaaggaattatttttattggaacgggaatttctggaggagaggagggagctcgtcatggtccttctattatgcctggaggaaatcctgagggatggccacatattaaagaaatttttcaatccatcagtgctaaagttgaaggggaaccttgttgtgattgggtaggcgatcaaggagctgggcattacgttaaaatggttcataatgggatcgaatatggcgacatgcagctgatttcagaagcttattatttgttgaaagaagctcttcatcttaatcaaaacgaattatatcaggtgtttgcagattggaataaaggagatttggatagctatttaatcgaaatcacttcgaaaatatttaaagtgaatgatgaagacggaaaaccacttgtagataaaattttagacgttgcaggtcaaaaaggcacaggaaaatggacagtgattaatgcattggatttaggaatgcctttaacattaattggagaggcagtttttgcaagatgtttgtctgctttaaaagatgaacgggtagctgcaagcgagttattgaaagggcctgatgccaaatttgaaggaaatagggaagagtttattcaagcaattcgagaagctctttattcctcaaaaatcattagttatactcaaggttttatgttaatgcaacaagcggcagcagaatataaatggcagcttaattatggggcaattgccttaatgtggcgtggtggatgtattatccgcagtcaatttttgggcaaaattaaagaagcatttaaactaaatccaaacctcaagagtttacttcttgatgaatactttcttcaagaaattcaaaagcggcaaaaagggtggagaaaagtcgtttctaaatcagttgagcttggaattgccactccttgttttaatactgccttggtgttttacgatggttatcgcacagcaaaattacctgccaatctcttacaagctcaaagagatttctttggggctcatacctatgaacgaggagatcgggctcgaggacaatattttcatacagattggtcaggcaccggtggaaaggtgagttcaggttcgtacaacgcttaa

SEQ ID NO: 11893 - protein, 484 aa, Parachlamydia sp
MHMTQADIGLIGLAVMGQNLVLNMNDHGYTVAVYNRTTSKVDEFLDGPAKGTKVIGAHSLKDLISQLKRPRRVMLMVKAGEPVDNFIEQCLPYLEKGDILIDGGNSLFTDTNRRCNSLKEKGIIFIGTGISGGEEGARHGPSIMPGGNPEGWPHIKEIFQSISAKVEGEPCCDWVGDQGAGHYVKMVHNGIEYGDMQLISEAYYLLKEALHLNQNELYQVFADWNKGDLDSYLIEITSKIFKVNDEDGKPLVDKILDVAGQKGTGKWTVINALDLGMPLTLIGEAVFARCLSALKDERVAASELLKGPDAKFEGNREEFIQAIREALYSSKIISYTQGFMLMQQAAAEYKWQLNYGAIALMWRGGCIIRSQFLGKIKEAFKLNPNLKSLLLDEYFLQEIQKRQKGWRKVVSKSVELGIATPCFNTALVFYDGYRTAKLPANLLQAQRDFFGAHTYERGDRARGQYFHTDWSGTGGKVSSGSYNA

SEQ ID NO: 11894 - DNA, 1041 bp, Rhodopseudomonas palustris
  CDS (1)..(1041)
atgcagatcggcatgatcggcctcggccggatgggtggcaatatcgtccggcgcctgatgaaggatggccatcatgccgtggtgtacgacagggacccgcaagcgatcgaaacgctgacgcgcgaaggcgcaaccggcgccggcgggctcgaagacctggtgcgcaagctcgacgcgccgcgcgcggtgtgggtgatgctgcccgccggacagatcaccgagaccaccatcgaacagcttgccaagctgctcgccgccggcgacgtcgtcatcgatggcggcaacaccttctggcaggacgatatccgccgcgccaagacgctgaaggaaaccagcatcgactacgtcgatgtcggcacctccggcggcatctggggcttcgagcgcggctactgcatgatgatcggcggcgacaaagccgtcgtcgaccggctcgatccgatcttcgctacactggcgccgggcatcggcgacatcccgcgcacgccgggccgcgacgatcgcgatccccgcgtcgagcagggctatctgcacgccggcccggtcggcgccggccatttcgtcaaaatggttcacaacggcatcgaatacggcctgatgcaggcctatgccgaaggcttcgacattctcaagaacgccagcagcgactccctgcccgaagcgcaccgcttcgatctcgacatcgccgacatcgccgaggtctggcgccgcggcagcgtgatcccgtcctggctgctcgacctcaccgccaccgcgctggcgaaaaacgatcagctcgacaactactcgggcttcgtcgaggactcaggcgaaggccgctggaccatcaacgccgcgatcgaagaagcggtaccggccgaagtgctcaccgccgcgctgttcgcgcgtttccgctcgcgacgggagcatacgtttgcggagaaaattctctcggcgatgcgggcgggcttcggcggccacaaggagccgcagcagcatcctgagccggagcagcaagccgctccgcagcaaaaactgaaaccgaaagcggagcgcgcgtga

SEQ ID NO: 11895 - protein, 346 aa, Rhodopseudomonas palustris
MQIGMIGLGRMGGNIVRRLMKDGHHAVVYDRDPQAIETLTREGATGAGGLEDLVRKLDAPRAVWVMLPAGQITETTIEQLAKLLAAGDVVIDGGNTFWQDDIRRAKTLKETSIDYVDVGTSGGIWGFERGYCMMIGGDKAVVDRLDPIFATLAPGIGDIPRTPGRDDRDPRVEQGYLHAGPVGAGHFVKMVHNGIEYGLMQAYAEGFDILKNASSDSLPEAHRFDLDIADIAEVWRRGSVIPSWLLDLTATALAKNDQLDNYSGFVEDSGEGRWTINAAIEEAVPAEVLTAALFARFRSRREHTFAEKILSAMRAGFGGHKEPQQHPEPEQQAAPQQKLKPKAERA

SEQ ID NO: 11896 - DNA, 1455 bp, Corynebacterium diphtheriae
  CDS (1)..(1455)
atgactgatcaaacacaactagcgcagatcggcattgtcggtctcgctgtcatgggttcgaacctcgcacgcaattttgctcataaaggccacacggttgctgtttttaatcgcagctttgaaaagacccaagcgctcatggatcagcacggagatgaaggcaatttcatcccgtccgccacaatcgaagaatttgttgcttcgctagaaaagcctcgtcgcgccatcatcatggttcaagcaggacctgcaactgacgcagtaatcaaccaacttgccgatgcgatggatgaaggcgacatcattatcgatggcggcaacgcactctacaccgacacgattcgtcgtgaaagcgaaattgctcaacgaggcctcaacttcgtcggcgccggcatttccggaggcgaagaaggagccctcaacggtccttctatcatgcctggtggtcctgataaatcttgggaagcacttggaccgctgctcgaatccatcgccgcacaggttggcggcacaccatgtgttactcacatcggccctgacggcgcaggccactttgtcaagatggttcataatggaatcgaatatgccgacatgcaagtgatcggcgaggcataccaattgcttcgatacgccaccgaaatgcagccatctgagattgcagatgtgtttaagacatggaaccaaggtgacttggactcctacctcattgagattacgtctgaggtacttgctcaggtcgattctgaaactggcacaccacttatcgatctcatcgtggatgaagctggtcaaaaaggaaccggtcgttggacggtgaaagctgctctagaccttggtattgcaactactggaatcggcgaagcagtattcgctcgcgcactttcaggtgcaaccactcagcgcaaggcagcccaaggtaacttgccagccggcactttggaatcattggcctcgttgaacatcgataaggaccagttcgtagaagatgtccgtcgcgcactctatgcttcaaagctcgtcgcttatgcgcagggcttcgacgaaattatcgccggatcagccgagcacaactgggatgtcgatcctcgcgacctcgctaccatctggcgcggtggctgcatcattcgcgcaaagttccttaaccgcatcgttgaagcttacgacgctaatccagaactcccgtccctcctactggatccctactttaagactgagctggaatcgcttatcgattcatggcgccgcgtagtcgttgcagctacacaactgggattgcctgttccagtgttcgcttcatcgttatcctactacgactctttgcgagccgaacgcctaccagctgcacttatccaaggccagcgtgattttttcggtgcacacacttaccgtcgcacggataaagacggaagcttccacaccttgtggtccggtgatcgtagcgaagtagaagcttaa

SEQ ID NO: 11897 - protein, 484 aa, Corynebacterium diphtheriae
MTDQTQLAQIGIVGLAVMGSNLARNFAHKGHTVAVFNRSFEKTQALMDQHGDEGNFIPSATIEEFVASLEKPRRAIIMVQAGPATDAVINQLADAMDEGDIIIDGGNALYTDTIRRESEIAQRGLNFVGAGISGGEEGALNGPSIMPGGPDKSWEALGPLLESIAAQVGGTPCVTHIGPDGAGHFVKMVHNGIEYADMQVIGEAYQLLRYATEMQPSEIADVFKTWNQGDLDSYLIEITSEVLAQVDSETGTPLIDLIVDEAGQKGTGRWTVKAALDLGIATTGIGEAVFARALSGATTQRKAAQGNLPAGTLESLASLNIDKDQFVEDVRRALYASKLVAYAQGFDEIIAGSAEHNWDVDPRDLATIWRGGCIIRAKFLNRIVEAYDANPELPSLLLDPYFKTELESLIDSWRRVVVAATQLGLPVPVFASSLSYYDSLRAERLPAALIQGQRDFFGAHTYRRTDKDGSFHTLWSGDRSEVEA

SEQ ID NO: 11898 - DNA, 1440 bp, Leishmania mexicana
  CDS (1)..(1440)
atgtcgaacgacctcggcattatcggtctcggcgtcatgggcgcgaatctcgccctgaacatcgccgagaatggatttaaagttgccgtcttcaaccgcacctacacgaagacgacgtcgtttctcaaggagcatgagaacgaggcgcttgtcgtcaacctgaaggggtacgagaccatgaaggagttcgccgcgtccctcaagaagccgcgccgcgcgttcattctcgtccaggccggcgctgctacggactccacaatcgaacagctcaaggaagttttcgaggagggcgacatcgtcatagacactggcaatgcgaacttcaaggaccaggacaggcgcgccgcgcagttggagagccagggtctccgcttcctcggcatgggcatctccggtggtgaggagggtgcgcgcaaggggccggccttcttccctgggggcacaccaagcgtgtgggaggaggtacgcccgatcgtggaggcggctgcggccaaggctgaggacggtcgcccgtgcgtgacgttcaacggcaagggcggcgctggatcctgcgtgaagatgtaccacaacgctggtgagtacgccgtgctgcagatctggggtgaggcgtacagcgccttgcttgccttcggattcaacaacgatcagatcgctgacgtgttcgagtcgtggaaggcagacggcttcctcaaatcctacatgctcgacatctccattgtcgcttgccgggcgagggaggcagcaggcaactatttgtcagagaaggtgctggaccgcatcggctccaaaggaaccggcctgtggtcggcccaggaggctctggaagttggggtgccagcgccctcgctcaacatggccgtcatctcacgccagatgaccatgtacaaagcggagcgtgtcgcgaactccaaggcatttcctcacttcccttgcggcccgtgtgagaaagccacggacaagtccccgaactcccccgaagcgaagcagctgttccacgccgtcagcctttccatcattgcaagttacgcgcagatgtttcagtgcttgcgcgagctggacaaggtgtacggatttggcttgaacctgcccgccaccatcgcaaccttccgcgccggctgcattctgcagggctacctgctggggcccatgacgaaggccttcgaggagaacccgaacctgcccaacctgatggacgccttcaccaaggagatagctgcgggccttaatgactgccgccagattctcgccaggctcacagtgaatacggcagtgtcactggcgggcatgatggcctcactgtcctacatcaacgccatgtacacggagattcttccgtacggacagctggtgtcgttgcaacgcgacgtctttggccgccacggctacgagcgcacggacagggatggtcgtgagtcgttcgaatggcccgcactgcagtaa

SEQ ID NO: 11899 - protein, 479 aa, Leishmania mexicana
MSNDLGIIGLGVMGANLALNIAENGFKVAVFNRTYTKTTSFLKEHENEALVVNLKGYETMKEFAASLKKPRRAFILVQAGAATDSTIEQLKEVFEEGDIVIDTGNANFKDQDRRAAQLESQGLRFLGMGISGGEEGARKGPAFFPGGTPSVWEEVRPIVEAAAAKAEDGRPCVTFNGKGGAGSCVKMYHNAGEYAVLQIWGEAYSALLAFGFNNDQIADVFESWKADGFLKSYMLDISIVACRAREAAGNYLSEKVLDRIGSKGTGLWSAQEALEVGVPAPSLNMAVISRQMTMYKAERVANSKAFPHFPCGPCEKATDKSPNSPEAKQLFHAVSLSIIASYAQMFQCLRELDKVYGFGLNLPATIATFRAGCILQGYLLGPMTKAFEENPNLPNLMDAFTKEIAAGLNDCRQILARLTVNTAVSLAGMMASLSYINAMYTEILPYGQLVSLQRDVFGRHGYERTDRDGRESFEWPALQ

SEQ ID NO: 11900 - DNA, 1461 bp, Buchnera aphidicola
  CDS (1)..(1461)
atgttaaataaaaatcttatagatctatttaggagtttttctaatatgtctttacaaaaagttggtgtaataggaatggcagtaatgggaagaaatttagctttaaatatagaaagtaaaggatatactgtttctatttttaatagatcaaaaaataaaacaaaagaagtaatcttaaaaaataaaaataaaaatcttataccattttttacaattaaagattttatattatctttacaaaaacctagaattattttattaatggttcaatcaggaacagcaacagatttaactattaaatctattattccttatttagatccagaagatattttaattgatggtggtaatagtttttataaagatactataaaacgtagttctttattatttaagaaaaaaatatatttttttggtataggtatatctggtggtgaagagggtgcattaaaaggtccagcaattatgccaggaggtaataaattaatttataaaaaaatatcttctttactgaaaaagattgcagctaaaacagaaaataacgaatcatgtgtaagttatattggtacagatggttctggtcattatgtaaaaatggttcataatggaattgaatatggagatatgcaattaatttctgaatcttattttattttaaaacattctttaaatttaaataataaacaactttctaaaattttttctaattggaataaaggtgaattaaaaagttatttaatcgaaattactaaaaacatttttttaaaaaaagattcttctggaaaatatttaatagatgttatattagataaagctaataataaaggtacaggaaaatggactagtcaaagtgcattaaatttaggcgaacctttatctttaattacgcaatctgttttttttagatatttatcttcttttaaaaaccaaagattacaagcttctaaaattctttatggccctaaaccttctcaagatgttttaaatcatgaagattttattgaaaatattcgacgttctttatatttaggaaaaattatttcttatgctcaaggattctctcaattaaaaaaagcatcacaagtatatcattggaatttaaattattctaaaattgcaaagatttttcgtgcaggtagtatcattagagcagattttttaaaagaaattattcatgcatatcaaaaaagtaatggtttagaaaatttattattagcgccatattttataaaaatttctaaagaatatcaaaattctttaagaaaaattgtatcttattctgttatgcatggtataccaattccagcattttctgcagcaatttcttattatgattcttatagatctcctatattaccagcaaatctattacaagctcaaagagattattttggagctcatacttattctagaattgacaaaaaaggtacttttcatactaattggatagatataaaataa

SEQ ID NO: 11901 - protein, 486 aa, Buchnera aphidicola
MLNKNLIDLFRSFSNMSLQKVGVIGMAVMGRNLALNIESKGYTVSIFNRSKNKTKEVILKNKNKNLIPFFTIKDFILSLQKPRIILLMVQSGTATDLTIKSIIPYLDPEDILIDGGNSFYKDTIKRSSLLFKKKIYFFGIGISGGEEGALKGPAIMPGGNKLIYKKISSLLKKIAAKTENNESCVSYIGTDGSGHYVKMVHNGIEYGDMQLISESYFILKHSLNLNNKQLSKIFSNWNKGELKSYLIEITKNIFLKKDSSGKYLIDVILDKANNKGTGKWTSQSALNLGEPLSLITQSVFFRYLSSFKNQRLQASKILYGPKPSQDVLNHEDFIENIRRSLYLGKIISYAQGFSQLKKASQVYHWNLNYSKIAKIFRAGSIIRADFLKEIIHAYQKSNGLENLLLAPYFIKISKEYQNSLRKIVSYSVMHGIPIPAFSAAISYYDSYRSPILPANLLQAQRDYFGAHTYSRIDKKGTFHTNWIDIK

SEQ ID NO: 11902 - DNA, 1434 bp, Trypanosoma cruzi
  CDS (1)..(1434)
atggacgttggcattgttggacttggtgtcatgggtgccaacctggcactaaacattgcagagaaagggtttcacgttgcggtattcaatcgcacatactccaaggcggagagttttattaaagagcatgcctcggctccttttgcggcaaatcttaaggcatatgagacgatgaattcttttattatggccattaaaaagccgcgcaagatatttattcttgttcaggctggcgctgctactgacgcgacgattgagcaattaaagggcgttctggagaaggatgacattattgtggacacgggtaacgctcacttcaaggatcagacccgccgagccgaacaactggaggcagcaggtctgcgttttcttggaatgggcatttccggtggggaagagggcgcccgaaaaggccctgccttttttcccggtggcacgttgagtgtatggaaagaaatccaaccagtggttgaagctgccgcagcaaaggccgatgatggccgtccgtgtgtcactatgaatggccgtggtggggccggttcgtgtgtcaagatgtaccataacgctggggagtatgccgttctgcaggtatggggcgaggcctttgacattcttcgtgcaatggggttaagcaacgatgaggtggctgctgtatttgaggactggaargctaaggggtttttgacttcatatatgctcgatatttccatcgtcgccgcgcgtgccaaggttgcggatggcagccatctttctgaacacgtcaaggactgtattggttctaaaggcacgggtctatggtctgcgcaggaagcgctagaggttggtgtacccgcaccaagtctaaacatggctgtgttgtcacggcagatgacaatgtacaagtcggaacgtgagctaaatgcaaagacacttccttttgttctaaaagtccctggatacgcaataaaggacaagagtcccaacgcaccagagattcgacaactctaccatgctgtttccatcgcgattatagcgtgctatgcgcaaatgtttcaatgcctccgagctctggataaagtgtatgattttggtttggatcttccagccaccattgccactttccgcgccggttgcattttgaagggttatctccttcagcctatgacggaggccttcgcaaagaatgtaaatctaagtaacctgatgtgtgcctttgaaaaggaaataacagaaggactgcagagctaccgcgatatcttgggttttatcacttccaagacagccttgacgctccctgtgctctcagcctctctggtgtacgttaatgggatgtttaccccgacgctaaggtacggtcaacttgtttctttgcaaagggatgtatttggccgccacggatacgagcggctagacaaggagggccgtgaatcccaccaatggccggagctacagtga

SEQ ID NO: 11903 - protein, 477 aa, Trypanosoma cruzi
MDVGIVGLGVMGANLALNIAEKGFHVAVFNRTYSKAESFIKEHASAPFAANLKAYETMNSFIMAIKKPRKIFILVQAGAATDATIEQLKGVLEKDDIIVDTGNAHFKDQTRRAEQLEAAGLRFLGMGISGGEEGARKGPAFFPGGTLSVWKEIQPVVEAAAAKADDGRPCVTMNGRGGAGSCVKMYHNAGEYAVLQVWGEAFDILRAMGLSNDEVAAVFEDWKAKGFLTSYMLDISIVAARAKVADGSHLSEHVKDCIGSKGTGLWSAQEALEVGVPAPSLNMAVLSRQMTMYKSERELNAKTLPFVLKVPGYAIKDKSPNAPEIRQLYHAVSIAIIACYAQMFQCLRALDKVYDFGLDLPATIATFRAGCILKGYLLQPMTEAFAKNVNLSNLMCAFEKEITEGLQSYRDILGFITSKTALTLPVLSASLVYVNGMFTPTLRYGQLVSLQRDVFGRHGYERLDKEGRESHQWPELQ

SEQ ID NO: 11904 - DNA, 1434 bp, Trypanosoma cruzi
  CDS (1)..(1434)
atggacgttggcattgttggacttggtgtcatgggtgccaacctggcactaaacattgcagagaaagggtttcacgttgcggtattcaatcgcacatactccaaggcggagagttttattaaagagcatgcctcggctccttttgcggcaaatctcaaggcatatgagacgatgaagtcttttattatggccattaaaaagccgcgcaagatatttattcttgttcaggctggcgctgctactgacgcgacgattgagcaattaaaaggcgtcctggagaaggatgacattattgtggacacgggtaacgctcacttcaaggatcagacccgccgggccgaacaactggaggcagcaggtctgcgttttcttggaatgggcatttccggtggggaagagggcgcccgaaaaggccctgccttttttcccggtggcacgttgagtgtatggaaagaaatccaaccagtggttgaagctgccgcggcaaaggccgatgatggccgtccgtgtgtcactatgaatggccgtggtggggccggttcgtgtgtcaagatgtaccataacgctggggagtatgccgttctgcaggtatggggcgaggcctttgacgttcttcgtgcaatggggttaagcaacgatgaggtggctgctgtatttgaggactggaaggctaaggggtttttgacttcatatatgctcgatatttccatcgtcgccgcgcgtgccaaggttgcggatggcagccatctttctgaacacgtcaaggactgtattggttctaaaggcacgggtctatggtctgcgcaggaagcgctagaggttggtgtacccgcaccaagtctaaacatggctgtgttgtcacggcagatgacaatgtacaagtcggaacgtgagctaaatgcaaagacacttccttttgttctaaaagtccctggatacgcaataaaggacaagagtcccaacgcaccagagattcgacaactctaccatgctgtwtccatcgcgattatagcgtgctatgcgcaaatgtttcaatgcctccgagctctggataaagtgtatgattttggtttggatcttccagccaccattgccactttccgcgccggttgcattttgaagggttatctccttcagcctatgacggaggccttcgcaaagaatgtaaagctaagtaacctgctctgtgcctttgaaaaggaaataagagaaggactgcagagctaccgcgatatcttgggttttatcacttccaagacagccttgacgctccctgtgctctcagcctctctggtgtacgttaatgggatgtttaccccgacgctaaggtacggtcaacttgtttctttgcaaagggatgtatttggccgccacggatacgagcggctagacaaggagggccgtgaatcccaccaatggccggagctacagtga

SEQ ID NO: 11905 - protein, 477 aa, Trypanosoma cruzi
MDVGIVGLGVMGANLALNIAEKGFHVAVFNRTYSKAESFIKEHASAPFAANLKAYETMKSFIMAIKKPRKIFILVQAGAATDATIEQLKGVLEKDDIIVDTGNAHFKDQTRRAEQLEAAGLRFLGMGISGGEEGARKGPAFFPGGTLSVWKEIQPVVEAAAAKADDGRPCVTMNGRGGAGSCVKMYHNAGEYAVLQVWGEAFDVLRAMGLSNDEVAAVFEDWKAKGFLTSYMLDISIVAARAKVADGSHLSEHVKDCIGSKGTGLWSAQEALEVGVPAPSLNMAVLSRQMTMYKSERELNAKTLPFVLKVPGYAIKDKSPNAPEIRQLYHAVSIAIIACYAQMFQCLRALDKVYDFGLDLPATIATFRAGCILKGYLLQPMTEAFAKNVKLSNLLCAFEKEIREGLQSYRDILGFITSKTALTLPVLSASLVYVNGMFTPTLRYGQLVSLQRDVFGRHGYERLDKEGRESHQWPELQ

SEQ ID NO: 11906 - DNA, 1023 bp, Mycobacterium paratuberculosis
  CDS (1)..(1023)
atgcagctggggatgatcggcctgggccggatgggtgccaacatcgtccgacgggtggtcaagggcggacacgaatgcgttgtctacgaccacaatccggacgcggtcaaggcgatggcgggggaggagaagacgaccggggtctcctcgctgcaagagctcgccgcgaagctgagcgccccgcgggtggtgtgggtgatggtgccggccgggacgatcaccaccggggtgatcgaggagctggccaccacgctggagcccggcgacatcgtcatcgacggcggcaactcctactaccgcgacgacattcgtcactcgaagaccctgtcggagaaggggattcggctgctggactgcggcaccagcggcggcgtctggggccgggaacggggttactgcctgatgatcggcggcgacgaggaggcgttcgcgcacgccgagccgatcttcgccaccgtcgcaccgggggtggacgccgcgccgcggacgccgggccgcgacggcgaggtcacccggtcggagcaggggtatctgcattgcgggccgtccggcgccgggcacttcgtgaagatggtgcacaacggcatcgagtacgggatgatggcctcgctcgccgagggactcaacgtgttgcgcaacgccgacatcggcaagcacgcgcaggaaggcgacgccgaaaccgcgccgctgtccaatcccgagttctaccaatacgatttcgacatccccgaggtcgccgaggtgtggcggcgcggcagcgtcatcggatcctggctgctggatctcacggcgatcgcactgcacgaatcaccggagctcaaggagttctccgggcgggtctccgactcgggggagggccgctggacgtccatcgccgcgatcgacgagggggtccccacgccggtgctgaccaccgcgctgcagtcccgcttcgcttcccggcatctcgatgacttcgccaacaagacgctctcggcgatgcgtaagcaattcggcgggcacgccgagaagccggccaactag

SEQ ID NO: 11907 - protein, 340 aa, Mycobacterium paratuberculosis
MQLGMIGLGRMGANIVRRVVKGGHECVVYDHNPDAVKAMAGEEKTTGVSSLQELAAKLSAPRVVWVMVPAGTITTGVIEELATTLEPGDIVIDGGNSYYRDDIRHSKTLSEKGIRLLDCGTSGGVWGRERGYCLMIGGDEEAFAHAEPIFATVAPGVDAAPRTPGRDGEVTRSEQGYLHCGPSGAGHFVKMVHNGIEYGMMASLAEGLNVLRNADIGKHAQEGDAETAPLSNPEFYQYDFDIPEVAEVWRRGSVIGSWLLDLTAIALHESPELKEFSGRVSDSGEGRWTSIAAIDEGVPTPVLTTALQSRFASRHLDDFANKTLSAMRKQFGGHAEKPAN

SEQ ID NO: 11908 - DNA, 1470 bp, Mycobacterium paratuberculosis
  CDS (1)..(1470)
atgagttcgtcggttaccccgtcgcgtcccaccaccggcaccgcccagatcggcgtcaccgggctggccgtgatgggttcgaacatcgcccgcaatttcgcccggcacggttacaccgtggcgctgcacaaccggtctatcgccaaaaccgacgcgctgctgaaagagcacggcgacgagggcaagttcgtgcgctgcgaaaccatcgccgaattcctcgacgcgctggaaaaaccgcgtcgcgtgctgataatggtcaaggccggcgaccccaccgacgcggtgatcaacgagctcgccgatgccatggagcccggcgacatcatcatcgacggcggcaacgccctctacaccgacaccatccgccgggagcaggcgatgcgcgaacgcggcctgcacttcgtgggcgccggcatctccggcggcgaggagggcgcgctcaacggcccgtcgatcatgcccggcggcccggccgagtcctaccggtcgctgggcccgctgctcgaggagatctccgcgcacgtcgacggggtgccgtgctgcacgcacatcggccccgacggggccgggcacttcgtcaagatggtgcacaacggcatcgagtactccgacatgcagctgatcggcgaggcctaccagctgctgcgcgacgcgctgggcaagaccgccgagcagatcgccgacgtgttcgacgaatggaactccggcgacctggacagcttcctggtcgagatcaccgcgcaggtgctgcgccagaccgacgccaagaccggaaagccgctcgtcgacctcatcctcgacgaggccgaacagaagggcaccggccgctggacggtcaaatcggcgctggacctcggcgtgccggtgaccggcatcgccgaggcggtgttcgcccgcgcgttgtcgggctcggtggcccagcgcagggccaccaccgggctggcgtcgggccggttcggcgaaaagccaagcgacgcagcacagttcaccgaggacatccgccaggccctgtacgcgtccaagatcatcgcctacgcgcagggcttcaaccagatccaggccggcagcgccgaatacggctgggacatcacccccggcgacctggccaccatctggcgcggcggctgcatcatccgggccaagttcctcaaccggatcaaggacgccttcgacgagaaccccgacctgccgaccctgatcgtcgcgccgtatttccgcagcgcgatcgaggccgccatcgacggctggcgccgggtcgtggtcacggccacccggttgggcatcccgatccccggcttctcctcggcgctgtcctactacgacgcgctgcgcaccgagcggctgcccgccgcgctcacccagggtctgcgggacttcttcggcgcgcacacctacgggcgcatcgacgaggaccccgacaagcgcttccacacgctgtggagcgccgaccgccgcgaagtgccggcgtaa

SEQ ID NO: 11909 - protein, 489 aa, Mycobacterium paratuberculosis
MSSSVTPSRPTTGTAQIGVTGLAVMGSNIARNFARHGYTVALHNRSIAKTDALLKEHGDEGKFVRCETIAEFLDALEKPRRVLIMVKAGDPTDAVINELADAMEPGDIIIDGGNALYTDTIRREQAMRERGLHFVGAGISGGEEGALNGPSIMPGGPAESYRSLGPLLEEISAHVDGVPCCTHIGPDGAGHFVKMVHNGIEYSDMQLIGEAYQLLRDALGKTAEQIADVFDEWNSGDLDSFLVEITAQVLRQTDAKTGKPLVDLILDEAEQKGTGRWTVKSALDLGVPVTGIAEAVFARALSGSVAQRRATTGLASGRFGEKPSDAAQFTEDIRQALYASKIIAYAQGFNQIQAGSAEYGWDITPGDLATIWRGGCIIRAKFLNRIKDAFDENPDLPTLIVAPYFRSAIEAAIDGWRRVVVTATRLGIPIPGFSSALSYYDALRTERLPAALTQGLRDFFGAHTYGRIDEDPDKRFHTLWSADRREVPA

SEQ ID NO: 11910 - DNA, 1389 bp, Lactobacillus johnsonii
  CDS (1)..(1389)
atgcaacaatttggggttattggcttgtccgttatggggaaaaaccttgccttaaacgttaaaaatcatggctactctgtctctggattttcaattgataagccagaggttgatgctttagcaaaatatgaagataagaatttaaagccaacttatacttgggaagaatttgttaattcactagaaaagccacgaaaaatcttgattcaaatcatggctggtaaaccagttgatgaaactttacaaaaactattgcctcttttagataagggcgatattttaattgacggtggtaattctaatttccatgatactaatcgtcgctataaggaaatggaaaagcatggtattcacttcattggtatgggtgtttctggcggtgaagaaggagctttgaacggtcctgccttaatgccaggtggtgatgaaaaagcttatgaagaagtagcgccaatccttgaagctatggctgccaagactccaactggtcaaccatgtgtcggatacattggaccagcaggtagtggtcactatgtgaagatggttcacaatggtattgaatatggtattatgcagattatttctgaagtatacgatgttctccgcaccgttggtcattattcaaacaatgaaatgagtgaaatctttaagaattgggataagggtggtttacaagcttatttaattgaaatcacttctaaggtcttaaaacaaaaggataacttaactgatgatcatattattgatcatatcttaaatgaagcttcttataagggaactggtaactggatgcttgaagatgcaattcgtttaggtgctccaattactgtaattgcagaagccgttcttgctcgttttatgtcaaaagcaactttgagaaatgatcctgaaccaaagattgacccagagaaagctccaaaggacttagttgatcaacttgcaaaagccttatacttagctatggctgtttcatatggtcaaggatttgagcaattaacgatggctgcaaaagcttataactggcgcttgcactattcaactattgcccaaaactgggaagctggatgtatcatccgctcacaaatgcttcatgatattaagtttgcgtataatgctgataaagacttgcctaacttattcaaggctccattttttgataaggtaaagaaagaaaatattggcgctcttagagatgtggttaaaattgcggctgatgctggcgtaccaactccaactcttagtgcagctttgaattacttggaatctatttttaatccacgcttacctcaaaacattattcaaggtcaacgtgattactttggtgctcacacttaccaaagaaatgatcgtccaggtactttccatactgaatggtacgaagaaaaataa

SEQ ID NO: 11911 - protein, 462 aa, Lactobacillus johnsonii
MQQFGVIGLSVMGKNLALNVKNHGYSVSGFSIDKPEVDALAKYEDKNLKPTYTWEEFVNSLEKPRKILIQIMAGKPVDETLQKLLPLLDKGDILIDGGNSNFHDTNRRYKEMEKHGIHFIGMGVSGGEEGALNGPALMPGGDEKAYEEVAPILEAMAAKTPTGQPCVGYIGPAGSGHYVKMVHNGIEYGIMQIISEVYDVLRTVGHYSNNEMSEIFKNWDKGGLQAYLIEITSKVLKQKDNLTDDHIIDHILNEASYKGTGNWMLEDAIRLGAPITVIAEAVLARFMSKATLRNDPEPKIDPEKAPKDLVDQLAKALYLAMAVSYGQGFEQLTMAAKAYNWRLHYSTIAQNWEAGCIIRSQMLHDIKFAYNADKDLPNLFKAPFFDKVKKENIGALRDVVKIAADAGVPTPTLSAALNYLESIFNPRLPQNIIQGQRDYFGAHTYQRNDRPGTFHTEWYEEK

SEQ ID NO: 11912 - DNA, 1461 bp, Yersinia pestis
  CDS (1)..(1461)
atggccttaaggctggtaacaggtgtcatccttcagacaggagtttttttaatgtccaaacaacagatcggcgttgtcggtatggcggtgatgggccgtaacctggcgctcgacatcgaaagccgtggctattccgtttctatttttaaccgttcatcagacaaaaccgacgaagtggttgccgagaatccaggtaagaatctggtgccgagttataccgttgaagagtttgttgattcactggaaaaaccgcgccgtatcctgctgatggtgaaagcgggtgaagcaacagataaaacgatcgcttcactgacgccgcatcttgataaaggcgatattctgattgatggtggcaatacttattacaaagacaccattcgtcgtaaccgtgaactttctgcacaaggctttaactttatcggtaccggcgtgtctggtggtgaagagggtgcattgaaaggcccttctatcatgccgggtggccagaaagaagcctacgaattggttgccccgatccttgagaaaattgcggcccgtgctgatgatggtgacgcctgcgttgcctatatcggcgctgacggtgctggccattacgttaaaatggttcacaacggtatcgaatacggtgatatgcaattgatcgccgaagcctattcactgctgaaacagtctctgggtctgagcaatgaagagctggccagtacttttgctgagtggaacaaaggcgaactgaacagctacctgattgatatcaccaaagacatcttcaccaagaaagacgaagacggtaactatctggttgatgtgatcctggacgaagctgccaacaaaggcaccggtaaatggaccagccaaagttctctggacttgggtgagccgttaacactgatcactgaatctgtgtttgcccgttacttgtcttctctgaaagatcaacgtgttgctgcctctaaagtgttgactggccctaaagttcagcctttcactggtgataaagccgagtttatcgaaaaaattcgtcgcgcgctgtatctgggtaaaatcgtttcttacgcacaaggtttctctcaactgaaagcggcatctaacgagaataactgggatctgaattacggtgaaatcgcgaagattttccgtgctggctgtattattcgtgctcagttcctacaaaaaattactgatgcttatgcagaaaacgcagatatcgctaacttgctgctggcaccgtacttcaagcaaattgctgatgaataccagcaagcgctgcgtgatgtggtgtcttatgcggtacaaaacggtatcccaacgccaacattctctgctgcgattaactattacgacagctaccgttcagccgtgctgcctgctaacttgatccaggcacagcgcgactatttcggtgcgcatacgtataagcggacagataaagaaggtgtattccacactgagtggatggcgtaa

SEQ ID NO: 11913 - protein, 486 aa, Yersinia pestis
MALRLVTGVILQTGVFLMSKQQIGVVGMAVMGRNLALDIESRGYSVSIFNRSSDKTDEVVAENPGKNLVPSYTVEEFVDSLEKPRRILLMVKAGEATDKTIASLTPHLDKGDILIDGGNTYYKDTIRRNRELSAQGFNFIGTGVSGGEEGALKGPSIMPGGQKEAYELVAPILEKIAARADDGDACVAYIGADGAGHYVKMVHNGIEYGDMQLIAEAYSLLKQSLGLSNEELASTFAEWNKGELNSYLIDITKDIFTKKDEDGNYLVDVILDEAANKGTGKWTSQSSLDLGEPLTLITESVFARYLSSLKDQRVAASKVLTGPKVQPFTGDKAEFIEKIRRALYLGKIVSYAQGFSQLKAASNENNWDLNYGEIAKIFRAGCIIRAQFLQKITDAYAENADIANLLLAPYFKQIADEYQQALRDVVSYAVQNGIPTPTFSAAINYYDSYRSAVLPANLIQAQRDYFGAHTYKRTDKEGVFHTEWMA

SEQ ID NO: 11914 - DNA, 1497 bp, Ashbya gossypii
  CDS (1)..(1497)
atgcgccgagaccatatactaacagctagcagaggagatattggcctgatcggcctggctgtcatgggccagaacttgatcctaaacgccgccgaccacggatacacggtcgtggcgtacaacaggacggtttcgaaggtggaccggttcctggaggatgaggcgaagggcaagtccatcatcggcgcgcatacagtggaggaactctgcgcgaacctaaagagaccaagaagggtgattttactggtcatggccggatctgctgatgatgcgttcatcgaacagctgcttccatacatggagcagggtgacatcatcattgtcggcggtaactctcacttccctgtcagcaacagacgctttgaagagctaaagcagaagggtatccacttcgtcggctctggtgtgtccgacggtgaggaaggtgctcgttatggtccttccttgatgcctggtggtgcccctgaggcatggccacacatcaaggagatcttccagtctattgctgccaagtcagagggcgaggcatgctgcgactgggtcggacctgccggcgctggccactacgtcaagatggtgcacaacggtattgagtatggtgacatgcaattgatctgtgaggcgtatgacatcatgaagagattgggtggcttcacggacaaggagattggccaggtgttctcggagtggaacaaaggcatcctagactctttcttgattgagatcacgagagacatcttgctttacgaggatctagatgggacccctctagtggagaagatcctggactctgctggtcaaaagggtactggtaagtggaccgctatcaacgcgttggacatgggcatgcctgtgactttgatcggtgaggccgtcttcgctcgttgcctatcctccctaaaggatgagagaatgcgcgcttccgcgctattgagcggtcccgaaatccctaaggatgctgtgaaggacagaaagcagtttgtcgacgacttggagcaggctttgtatgcgtccaagatcatgtcctacgcccagggcttcatgttaatgagagaggcaggtaagacttttggctgggagctaaacttccctgccattgctttgatgtggagaggtggctgcatcatcagatctgttttccttgcccagatcaccaaggcgtacagagagaacccttacttggagaacttgttgttcaacaagttctttgctgacgctgtcaccaaggctcagcagggctggagaagaaccatcgggttggcaactacctacggtattcctactcccgccttctctaccgcgcttgccttctacgacgggtacagatctaagagattgcctgccaacttgctgcaagctcagcgtgactactttggcgcccacaccttccgtgtgctgccagaggctgccagcgctcacttgccagtagacaaggacatccatatcaactggaccggtaagggtggtaacatctccgcctctacctaccaggcctga

SEQ ID NO: 11915 - protein, 498 aa, Ashbya gossypii
MRRDHILTASRGDIGLIGLAVMGQNLILNAADHGYTVVAYNRTVSKVDRFLEDEAKGKSIIGAHTVEELCANLKRPRRVILLVMAGSADDAFIEQLLPYMEQGDIIIVGGNSHFPVSNRRFEELKQKGIHFVGSGVSDGEEGARYGPSLMPGGAPEAWPHIKEIFQSIAAKSEGEACCDWVGPAGAGHYVKMVHNGIEYGDMQLICEAYDIMKRLGGFTDKEIGQVFSEWNKGILDSFLIEITRDILLYEDLDGTPLVEKILDSAGQKGTGKWTAINALDMGMPVTLIGEAVFARCLSSLKDERMRASALLSGPEIPKDAVKDRKQFVDDLEQALYASKIMSYAQGFMLMREAGKTFGWELNFPAIALMWRGGCIIRSVFLAQITKAYRENPYLENLLFNKFFADAVTKAQQGWRRTIGLATTYGIPTPAFSTALAFYDGYRSKRLPANLLQAQRDYFGAHTFRVLPEAASAHLPVDKDIHINWTGKGGNISASTYQA

SEQ ID NO: 11916 - DNA, 1771 bp, Oryza sativa
  CDS (53)..(1495)
cgcctttccgcgatttcgtcagttacccagatctcatcttacgcaggcagagatggctgtcactagaattggtcttgctggccttgcggtcatggggcagaaccttgccctcaacattgcagagaaagggttccctatctctgtctacaacaggacgacttctaaggttgatgagaccgttcagcgcgccaaggtagaaggaaaccttcctgtgtacgggttccatgaccctgcatcctttgtgaactccattcagaagccacgtgttgtcatcatgcttgtcaaggctggtgcaccagtggaccagaccattgcaactcttgcagcacacttggagcagggtgactgtattattgatggaggaaatgagtggtacgagaacactgagaggagggagaaggcaatggaggagcgtggcctcctctatcttgggatgggtgtttccggaggagaggagggtgcccgcaatggcccgtccttgatgcctggtggctcattcgaggcgtacaagtacattgaagatattcttctcaaggtggctgcccaggttcctgatagtggcccgtgcgtcacatacattggcaaaggtggatctggaaactttgtcaagatggttcacaacggaattgagtatggtgacatgcaactgatttctgaggcatatgatgttctcaagtcagttggtaagctcacaaacagtgagctgcagcaggtgttttctgagtggaacaagggtgagctcctcagtttcctgattgagatcacagccgacatatttagcatcaaggatgaccagggttcaggccacctggtcgacaaggtcctggacaagactgggatgaagggaactgggaagtggactgtgcagcaggccgcagagctttctgtggctgctcctacaattgaggcatccttggattccaggttcctcagtgggttgaaggatgagcgtgttgaggctgccaaggtcttccaaggtgacttctccagcaacttgccagtggacaaggcacagctgattgaagacgtgaggcaggctctttacgcctcgaagatctgcagctacgctcagggcatgaacatcatcaaggccaagagcatggagaaagggtggagcctcaacctcggtgagctagcgaggatctggaagggagggtgcatcatccgtgccatcttcctggaccgcatcaagaaggcctacgacaggaactccgacctcgccaacctgctcgtggaccctgagttcgctcaggagatcatggacaggcaagcggcatggcgcagggtggtctgccttgccatcaacaatggcgtcagcaccccaggcatgtcggcgagtctcgcgtacttcgactcctaccggagggacaggctgcctgccaacctggtgcaggcacagagggactatttcggggctcacacctacgagagggtcgacatgcccggctccttccacaccgagtggttcaagatcgcgcgtgctgctaagatgtgaaatgcttcaaattttcggtaatatttggttgctgcttgctgctgagtcgcttgtagggtgggaggaactgttgttaaattttatggtcaatgtgctacgcttaatttggataaggaggtccatagctatctccattcttttaatgtaaggagcagcccagggtggagagaacatggatatttatcattggaacctttgttgtgatctttgtaagtctatatatgaataaaagcattttggcaatgcttgcttttttaaaaaaaaaaaaaaaaaaaa

SEQ ID NO: 11917 - protein, 480 aa, Oryza sativa
MAVTRIGLAGLAVMGQNLALNIAEKGFPISVYNRTTSKVDETVQRAKVEGNLPVYGFHDPASFVNSIQKPRVVIMLVKAGAPVDQTIATLAAHLEQGDCIIDGGNEWYENTERREKAMEERGLLYLGMGVSGGEEGARNGPSLMPGGSFEAYKYIEDILLKVAAQVPDSGPCVTYIGKGGSGNFVKMVHNGIEYGDMQLISEAYDVLKSVGKLTNSELQQVFSEWNKGELLSFLIEITADIFSIKDDQGSGHLVDKVLDKTGMKGTGKWTVQQAAELSVAAPTIEASLDSRFLSGLKDERVEAAKVFQGDFSSNLPVDKAQLIEDVRQALYASKICSYAQGMNIIKAKSMEKGWSLNLGELARIWKGGCIIRAIFLDRIKKAYDRNSDLANLLVDPEFAQEIMDRQAAWRRVVCLAINNGVSTPGMSASLAYFDSYRRDRLPANLVQAQRDYFGAHTYERVDMPGSFHTEWFKIARAAKM

SEQ ID NO: 11918 - DNA, 1449 bp, Vibrio vulnificus
  CDS (1)..(1449)
atgaaaggtgatatcggtgtaattggcctagcagtaatgggtcaaaaccttatcctgaacatgaacgaccacggctttaaagtggtggctcacaaccgtactgcggcgaaagtagatgagtttctagaaggcccagcgaaaggcactaacatcattggcgcatactcacttgaggaactggttgagaaactggaaacaccacgcaaagtgatgttgatggttcgtgctggcgcggtagtggaccagtttattgatgcacttgtaccgcttcttgataaaggcgacatcatcattgacggtggtaacacgaactacccagacaccaaccgtcgtgtagcggcgctgcgtgaaaaaggcatccacttcatcggtactggtgtctctggtggtgaagaaggcgcacgtttcggcccttctattatgcctggcggtgctcctgaagcatgggaagcggttaagcctatcttccaaggtatctctgcaaaaactgacgctggcgagccttgctgtgactgggttggtaacgatggtgcaggtcacttcgttaaaatggtacacaacggcatcgaatacggcgacatgcagctgatcaccgaagcgtaccagttcatgaaagatggccttggtatgtctgcagacgagatgcaagccgttttcgctgattggaacaagactgagctagacagctacctagtcgaaatcaccgctgacatccttggctacaaagacgaagatggcgagccactagtagaaaagatcctcgatacggctggccaaaaaggcacaggtaaatggacaggtatcaacgcactagacctaggcattccactaacgcttatctctgagtctgtcttctctcgttgcctatcggcactaaaagatcaacgtgttgaagctgagaaattgtttggtaagaccatcacgccagtagaaggtgacaagcaagagtgggttgacgcacttcgccaagcgcttctagcatctaagattatctcttacgctcaaggctttatgctgatgcgtgaagcgtctaatgaaaatggttgggatctcaactacggcaacgtggcactgatgtggcgcggtggttgtatcattcgttctgcattcctaggtaacatccgtgatgcctacgaagcgaacccagatcttgcgttcctaggctctgatgactacttcaaaggcatcctacaaaacagcctagtggcatggcgtaaagtggcggcgaagtcgctagaagcgggcattccaatgccatgtacaacgtctgcactgacgttcctagacggttacacaaccgcgcgtctacctgcaaacctactgcaagcacaacgtgactacttcggtgctcacacttatgagcgtatcgaccgtgagcgtggtgagttcttccacaccaactggacaggtaccggcggcaacacagcgtcgacgacttacgacgtttaa

SEQ ID NO: 11919 - protein, 482 aa, Vibrio vulnificus
MKGDIGVIGLAVMGQNLILNMNDHGFKVVAHNRTAAKVDEFLEGPAKGTNIIGAYSLEELVEKLETPRKVMLMVRAGAVVDQFIDALVPLLDKGDIIIDGGNTNYPDTNRRVAALREKGIHFIGTGVSGGEEGARFGPSIMPGGAPEAWEAVKPIFQGISAKTDAGEPCCDWVGNDGAGHFVKMVHNGIEYGDMQLITEAYQFMKDGLGMSADEMQAVFADWNKTELDSYLVEITADILGYKDEDGEPLVEKILDTAGQKGTGKWTGINALDLGIPLTLISESVFSRCLSALKDQRVEAEKLFGKTITPVEGDKQEWVDALRQALLASKIISYAQGFMLMREASNENGWDLNYGNVALMWRGGCIIRSAFLGNIRDAYEANPDLAFLGSDDYFKGILQNSLVAWRKVAAKSLEAGIPMPCTTSALTFLDGYTTARLPANLLQAQRDYFGAHTYERIDRERGEFFHTNWTGTGGNTASTTYDV

SEQ ID NO: 11920 - DNA, 1407 bp, Photorhabdus luminescens
  CDS (1)..(1407)
atgtccaagcagcagattggtgttgtcggtatggcggtgatggggcgtaacctggcattaaatattgagagccgtggttattccgtatctatatttaaccgttcaagtgataaaactgacgaagtgatcgccgaaaatccggggaagaaattagttccaagttacactgtcgaagaatttgtcgattcactggaaaaaccgcgccgtattctgctcatggttaaggctggcgaagcaaccgataaaactattgcttcactgactccacatctggataaaggtgatattttgattgatgggggtaatacctattttcaggatactatccgtcgtaatcgcgagctttctgctcagggttttaattttatcggtactggggtttccggtggtgaagagggggcattgaaaggtccatctattatgcctggcggccagaaagaggcgtataaattggtggcaccaattctgcaagagattgcggctaaagctgaaggtgaaccttgtgtggcctatattggcccggatggtgccggtcattatgtgaaaatggttcacaatggtattgaatacggtgatatgcagctcattgctgaagcttattctttactgaaaaatgccctaaatctgagcaatgaagaactatctgagattttcactgactggaataacggcgaattgagcagttatttgattgaaatcacggctgatattttccataagaaagatgaagcaggccaatatttggttgatgtgattttggatgaagcagcaaataaaggtacgggtaagtggaccagccagagctctctggatttagggattccagtgacgttgatcacagaatcggtatttgcacgttatatctcttctctgaaagatcagcgagttgctgcggctcaagttttgagcgggccggatgtacaaccatttaaaggtgataaggccgaatttattgagaaagtccgccgtgcgctttatttgggtaaaatcgtctcttatgcccaaggttttcagcaattgaaagcggcatctgatgagtaccagtgggatctcaattacggtgagattgctggaattttccgggcgggttgtattattcgtgctcaattcctgcaaaaaattactgacgcgtataacgaaaatgtggatattgctaacctgttgttggcaccttactttaagaaaattgctgatgaatatcagcaggcgttgcgtgatgtcgtctcgtatggggtgcagaatggtatcccaaccccgactttctctgctgctatttcttactacgatagttatcgttcagcggtactgcctgctaatttaattcaggctcagcgtgattattttggtgctcatacctataagcgtactgataaagaaggtgttttccatactgaatggatggagtaa

SEQ ID NO: 11921 - protein, 468 aa, Photorhabdus luminescens
MSKQQIGVVGMAVMGRNLALNIESRGYSVSIFNRSSDKTDEVIAENPGKKLVPSYTVEEFVDSLEKPRRILLMVKAGEATDKTIASLTPHLDKGDILIDGGNTYFQDTIRRNRELSAQGFNFIGTGVSGGEEGALKGPSIMPGGQKEAYKLVAPILQEIAAKAEGEPCVAYIGPDGAGHYVKMVHNGIEYGDMQLIAEAYSLLKNALNLSNEELSEIFTDWNNGELSSYLIEITADIFHKKDEAGQYLVDVILDEAANKGTGKWTSQSSLDLGIPVTLITESVFARYISSLKDQRVAAAQVLSGPDVQPFKGDKAEFIEKVRRALYLGKIVSYAQGFQQLKAASDEYQWDLNYGEIAGIFRAGCIIRAQFLQKITDAYNENVDIANLLLAPYFKKIADEYQQALRDVVSYGVQNGIPTPTFSAAISYYDSYRSAVLPANLIQAQRDYFGAHTYKRTDKEGVFHTEWME

SEQ ID NO: 11922 - DNA, 1452 bp, Gloeobacter violaceus
  CDS (1)..(1452)
atggaaacatcggctctgcaatccggcgcgcaggcgacccacgaaaaacccagcattgggctgatcgggcttgcggtgatgggcgagaatctggcgctcaacattgccaaccacggttttccaatctcggtctacaaccgcaccgccgctaaaacccaagaactggccgaaggccgcgcccggggcaaggcgctctacccgactttcaccatggaagaattcgtcgcctccatggagcgcccccgcaaaatcatcatcctggtcaaggccggcgctccggtcgatgcggtgatcgaccagctcaagccgctgctcgaaaaagacgacgtgatcatcgacggcggcaactcgctgtttaccgataccgagaagcgctccggcgagatcgaagcgctcggattgcgcttcgtgggcatgggggtctcgggcggcgaagagggtgccctcaagggtcccagcctgatgcccggcggaccgaagaccgcctacgacgatctggccccgattctcacccagattgccgcccaggtcgacgacggcccctgcgtcacctatatcggcccgcgcggcgccggccactacgtgaagatggtccacaacggcatcgagtacggcgacatgcaactcatcgccgaagcctacgacctgctgcgccagaccctgggtctgggggccgccgaactgcacgacatctttgccgagtggaacgcaggggaactcaagtcgtttttgatcgagatcaccgccgacatttttaccaagatcgaccccgagaccggcaagccgctggtggacttgatcctcgacaaagcgggccaaaaaggcaccggcaagtggaccagccagaacgcctacgatctgggtattccgattccgaccatcaacgccgcagtcgaatcgcgcatcctctcggcctacaaaagcgaacgggtggccgcttccaaaatcctgagcggtccggagcggcctccgtttacgggcgagaagaaacaatttatcgatgcggtgcgcgacgcgctctactgcgccaagatctgctcctacgcccaggggatggccctgctcaaagccgcttcccacgagtacgactaccacctcaacctttctgaactggcgcgcatctggaagggcggctgcatcatccgggccatcttcctggataagatcaaaaacgctttcctgcgcgacccggccctcaccaacttgctcatcgacagcgaattcagcggcgatattcaggcgcgccaggccaactggcgctacgcggtacagacggccgcccaactgggcatcccagcctacgccacgggtgcgtcccttgcctactacgacgcctaccgcacagcccaactgcccctcaacctcacccaggcccagcgcgactacttcggcgcccacacctacgagcgcatcgacaaagaaggagtcttccacaccgagtggttcagctga

SEQ ID NO: 11923 - protein, 483 aa, Gloeobacter violaceus
METSALQSGAQATHEKPSIGLIGLAVMGENLALNIANHGFPISVYNRTAAKTQELAEGRARGKALYPTFTMEEFVASMERPRKIIILVKAGAPVDAVIDQLKPLLEKDDVIIDGGNSLFTDTEKRSGEIEALGLRFVGMGVSGGEEGALKGPSLMPGGPKTAYDDLAPILTQIAAQVDDGPCVTYIGPRGAGHYVKMVHNGIEYGDMQLIAEAYDLLRQTLGLGAAELHDIFAEWNAGELKSFLIEITADIFTKIDPETGKPLVDLILDKAGQKGTGKWTSQNAYDLGIPIPTINAAVESRILSAYKSERVAASKILSGPERPPFTGEKKQFIDAVRDALYCAKICSYAQGMALLKAASHEYDYHLNLSELARIWKGGCIIRAIFLDKIKNAFLRDPALTNLLIDSEFSGDIQARQANWRYAVQTAAQLGIPAYATGASLAYYDAYRTAQLPLNLTQAQRDYFGAHTYERIDKEGVFHTEWFS

SEQ ID NO: 11924 - DNA, 1416 bp, Giardia lamblia ATCC 50803
  CDS (1)..(1416)
atggacattggcatcgtggggctgggtgcaatgggcaaaaaccttgcgctcaatttccaccgcaataagttcaaggttgctatctacaacagaacgcactcgaaggcgaaagctgttgccgatgagctcaagtcagagagcttaaaagcgtacgagtccgtcagtgactttgtagcctctttggtaaagcctcgtgttatcgtcctcctcgttcaggcagatgctgtcgattctgttggggagatgatggctaaatgcatgcaggaggatgatatcattatagattcaggtaactcttactacaagctcacagaggagcgtaaggttcgctttcacaagaacttcaaagtgcatttttacgggataggcatttcgggcggtgaagaaggcgccctctgggggcctgcgataatggttggcggggacgaagagagcgcaagaaagcgcctccttccacttcttgagaaggtctgtgcagacccccaggtcgaggggactgatggaaagaaatgcatatcttattgtgggcccggaggtgctggccacatggtgaagatggtgcacaatggctgcgaatacggcatcatgcaacttatttccgaggcaatcgccatctttcgctcggtcctcaagttttccgtggaacaggtggccgatgtctttgcgttgtatgcaaggaccgaaggctgctatctgttcgaaaatgtcgcccagatactatacaagaaggaggatgacaagcctcttattgactttgtcaaagacgtggccatgcagaaagggactggccgttggacgtctatcgaggcgctgaatctaggggtatgcgcgacgatcattgatgcaggcgtggctgcacgcacgttctcgagctcaaaggaccgctttctgatgcatgtcgaggactccaccgcgttgctgaagtctgtcttcacacagggtctttgtaaggacgctatcatgcgttctctgctggccgctatgctccttgcattccaacagtctatctgcgttattcacgccctctccgaatctatgcaatacaacacaagcatctttgaggctctttgctcctggcgcggaggctgcataattcgcatgaatcttcttacaccgctggcggacttctacaagcagaacgccaacaagcgtgtaccgctgatgcatgcaagctttgtgaaggaaaagtacatcaatcgtgacgttgtctcccagctcaggttgctggtctcctctgccgtgaaggctgggctgcctataccggctttttcgtctgctatgacatatctcgacatgatccagactgaggttctgccgaccaagtatattcagggcatgagggataactttggagctcacacctatgaaaggattgacaaggaaggtgtattccactctgtctggactgagaaataa

SEQ ID NO: 11925 - protein, 471 aa, Giardia lamblia ATCC 50803
MDIGIVGLGAMGKNLALNFHRNKFKVAIYNRTHSKAKAVADELKSESLKAYESVSDFVASLVKPRVIVLLVQADAVDSVGEMMAKCMQEDDIIIDSGNSYYKLTEERKVRFHKNFKVHFYGIGISGGEEGALWGPAIMVGGDEESARKRLLPLLEKVCADPQVEGTDGKKCISYCGPGGAGHMVKMVHNGCEYGIMQLISEAIAIFRSVLKFSVEQVADVFALYARTEGCYLFENVAQILYKKEDDKPLIDFVKDVAMQKGTGRWTSIEALNLGVCATIIDAGVAARTFSSSKDRFLMHVEDSTALLKSVFTQGLCKDAIMRSLLAAMLLAFQQSICVIHALSESMQYNTSIFEALCSWRGGCIIRMNLLTPLADFYKQNANKRVPLMHASFVKEKYINRDVVSQLRLLVSSAVKAGLPIPAFSSAMTYLDMIQTEVLPTKYIQGMRDNFGAHTYERIDKEGVFHSVWTEK

SEQ ID NO: 11926 - DNA, 1419 bp, Plasmodium yoelii yoelii
  CDS (1)..(1419)
atgacagatggttgcgacattggtctcattggacttgctgttatgggtcaaaacctcagcatgaacatcgctagtaacggatttaaaataggagtatacaatagaacttatgaaagaacaactgaaaccttaaagagagccaaggaagaaaatttagtgatttatggatataaaacattagaagagttaataaataatttaaaaaaacctcgaaaaattatattattaataaaagcgggtcccgcagttgatgaaaatataaataatatattaaaatattatgaaaaaggtgatataataatagatggaggtaatgaatggtatttaaattcagaaaaaagaataaaaatatgtgctgaaaaaaatgtagaatatttagctatgggagttagtggtggtgaagcaggggcacgatatggttgctcttttatgcctggaggatcaaaatatgcatatgaccaggtagaagaaatattaaaaaaatgttctgctaaagttaatacatcaccatgtgttacatatataggcccgggatcatctggaaattatgttaagatggtacacaatggtatagaatatggtgatatgcaattaatatcagaaagttattttattatgaaacatatattaaaatatgataataaaaagttagcagaagtatttaaaaaatggaatgaaggtatattaaattcttatttaattgaaataacatcaaaaatattagataaaaaagataacttaacagataattatttagtagatgttatattggatatagcgggtgctaaaggaacaggaaaatggactatgctcgaatctattgaaagaggcatcccttgcccaactatttgtgctgccttagatgcccgtaatttaagtgcttacaaagaattaagaataaacgcaaataataatttttctaatgaaataaaaattaataatactaatgaagatctaacaaattttgaaaatgatctattaaatgctttgtattgttgtaaaattatttcatatacacaaggattatttttattaaaacaagtctcaaaagaaatgaattggaatttaaatttaggagaaatatcaagaatatggagaggtggatgtattataagagctatttttctagatcgtataactaatgcatataaaaataataatgctttagaattattgtttatggacaaagaattttccgaagaaatgaaaaacaaattaccatccttaagaagagttgtagacatatctgtacaatgttctattcctattcctgcattttcagcaagtttagcctattttcaaatgatatcatcacaaaatttaccccttaatttggtccaagcacaaagagatttttttggatcacacacatataagagaactgacagagatggtgattatcatactcaatgggaataa

SEQ ID NO: 11927 - protein, 472 aa, Plasmodium yoelii yoelii
MTDGCDIGLIGLAVMGQNLSMNIASNGFKIGVYNRTYERTTETLKRAKEENLVIYGYKTLEELINNLKKPRKIILLIKAGPAVDENINNILKYYEKGDIIIDGGNEWYLNSEKRIKICAEKNVEYLAMGVSGGEAGARYGCSFMPGGSKYAYDQVEEILKKCSAKVNTSPCVTYIGPGSSGNYVKMVHNGIEYGDMQLISESYFIMKHILKYDNKKLAEVFKKWNEGILNSYLIEITSKILDKKDNLTDNYLVDVILDIAGAKGTGKWTMLESIERGIPCPTICAALDARNLSAYKELRINANNNFSNEIKINNTNEDLTNFENDLLNALYCCKIISYTQGLFLLKQVSKEMNWNLNLGEISRIWRGGCIIRAIFLDRITNAYKNNNALELLFMDKEFSEEMKNKLPSLRRVVDISVQCSIPIPAFSASLAYFQMISSQNLPLNLVQAQRDFFGSHTYKRTDRDGDYHTQWE

SEQ ID NO: 11928 - DNA, 1467 bp, Neurospora crassa
  CDS (1)..(1467)
atgtctcttctgttcgccgagtacggcatccacacgcactactacgacccttccaaaaagaacatcgaagccctccaatcgcacgccaaagaaagcaagcacgaagacaagatcacctaccacgacgatcacaagtctttgtgcgaggctctagaggacggtgataaacccaaggttttcatgttcagcatcccccatggcggccccgccgacgacagcatcgatgccctcgaaccctacctcaagccaggcgacatcatcatggacgcctccaacgagcactggaaggcgaccgagagacgacaggcccgccttgagccaaagggaatccattacattggaatgggcgtctctgggggctaccagtctgctcgccatggtccttccatctccccgggtggcagcaaggaggccctcgacaaagttttccccttcctccagaaaatcgcggccaaagacaacaggggacggccatgcgtggccaagcttggaccgggcggatgcgggcactacgtcaagatgatccacaacggcattgagcacggaatgatgactgccctctgtgaagcctgggccatcatgaacatcggcttgggcatggactacgaagagatcggcaccatctttgagaagtggaacggtgacaagcaaaggccattgagggacaacttcttgattgacattggtgccgatatctgtcggaccaaggatgagaagggcaactatgtgctggccaacgtgcgtgacaaggtcgttcaggatgtagacaactccgagggtacgggaacgtggtcggtccaggagggtaccagactccatgtgccagatcctaccattgccgtctcgcatcttttcagggtagcttcggcagatgcagcgaggagagagacagtcaacaaggcgctggacggaaagggggtgaagcccgctcaaatcgagggtgtcgataaggccaagttcctggaagacttgtacaacgctgtctacgcctccttcctcatgtgcttcatccagggcctgcacgtcctatccaaggcaaacgaggaaaacgactggaagctcgactttgctgatgtactgcagctctggcgcaatggatgcatcattcaaagcgacggagttgccgatttgctcgagactgtgtatcgctcgagggagcatgacaacgatgatctcctaggacaccaaacgattgctggcgagctggcaaagacgtacccgtcgctcaagagggttgtactgaaggctatcgagtttgatctacatgctggagcgctgggtaccagtctcgaatactacaagtactcaggttcgactgagctacccacccaattccaagaggccgagttggactacttcggggctcacatgtttgacctaaaaactgctgagccgggtaagccggtgacgggtaaacaccactttgagtggaagcccgcgagaggtattctggagacgaacgactag

SEQ ID NO: 11929 - protein, 488 aa, Neurospora crassa
MSLLFAEYGIHTHYYDPSKKNIEALQSHAKESKHEDKITYHDDHKSLCEALEDGDKPKVFMFSIPHGGPADDSIDALEPYLKPGDIIMDASNEHWKATERRQARLEPKGIHYIGMGVSGGYQSARHGPSISPGGSKEALDKVFPFLQKIAAKDNRGRPCVAKLGPGGCGHYVKMIHNGIEHGMMTALCEAWAIMNIGLGMDYEEIGTIFEKWNGDKQRPLRDNFLIDIGADICRTKDEKGNYVLANVRDKVVQDVDNSEGTGTWSVQEGTRLHVPDPTIAVSHLFRVASADAARRETVNKALDGKGVKPAQIEGVDKAKFLEDLYNAVYASFLMCFIQGLHVLSKANEENDWKLDFADVLQLWRNGCIIQSDGVADLLETVYRSREHDNDDLLGHQTIAGELAKTYPSLKRVVLKAIEFDLHAGALGTSLEYYKYSGSTELPTQFQEAELDYFGAHMFDLKTAEPGKPVTGKHHFEWKPARGILETND

SEQ ID NO: 11930 - DNA, 1572 bp, Neurospora crassa
  CDS (1)..(1572)
atgtctggacctgtcgctcgcctagcgaacatcattgttggcggagctgtgaaaccgggctcccagtcccaatctcaaagtcagacaagtgctaacgatgccccaagcgctgatatcggcctcatcggcctggccgtcatgggtcagaatttgatcctcaacatggccgaccatggcttcaccgtctgcgccttcaaccgtaccgtttccaaggtcgaccacttccttgccaacgaggccaagggcaagtcgatcgttggtgccaagtccaccgaggagttcgtctccaagctcaagtccccccgccgcatcatgctcctcgtccaggccggcaagcccgtcgatgactggatcgagactcttctccccctcctcgagaagggcgacatcatcattgatggcggtaactctcacttccccgacagcaaccgcaggacaaagtaccttgcctccaagggcctccacttcgttggttccggtgtctctggtggtgaggagggtgcccgctacggcccttcgctgatgcccggtggtgacgaggctgcctggccccacatcaaggacatcttccagtccattgctgccaagagcgatggcgaggcctgctgcgagtgggtcggtgacgagggcgctggccactacgtcaagatggtccacaacggcattgagtacggtgacatgcagctcatctgcgaggcctacgacattatgaagcgcggtctcggcctctcccacaaggagatgggcgatgtgtttgccaagtggaacaagggcgttctcgactcgttcctgattgagatcaccagggatatcatgtacttcaccgacgatgatggcactcctctcgtcgagaagattctcgacaaggctggccagaagggtaccggcaagtggactgctgtcaacgcccttgacctgggcatgcctgtcaccctcatcgccgaggctgtccttgctcgttgcctgtctggcatcaaggaggagcgtgtcaaggcctccaccaagctcgagtttgttggccgtgccaacaagttcgagggtgataaggagcagttcttggaggacctcgagcaggctctctatgcttccaagatcatctcttatgcccagggcttcatgctcatgcaggaggctgctaaggagtacaactggaagctcaacaagccttccattgccctcatgtggcgcggtggttgcattatccgctccgtcttcctgaaggacatcaccgctgcttaccgcaagaaccccgacctcgagaaccttttgttcgacgacttcttcaacaaggccatccacaaggcccagcccggctggcgtgacgtcgttgccaaggctgctctccttggtcttcccactcccgctttctccactgctctgtcgtggttcgatggctatcgcaccaaggacctccccgcgaacctgctccaggctcagcgcgactacttcggcgcccacaccttcttggtcaagcccgagtacgccaacgagaagtaccccgagggcaagtacatccacgtcaactggactggccgcggcggcaacgtttccgcttccacctaccaggcgtaa

SEQ ID NO: 11931 - protein, 523 aa, Neurospora crassa
MSGPVARLANIIVGGAVKPGSQSQSQSQTSANDAPSADIGLIGLAVMGQNLILNMADHGFTVCAFNRTVSKVDHFLANEAKGKSIVGAKSTEEFVSKLKSPRRIMLLVQAGKPVDDWIETLLPLLEKGDIIIDGGNSHFPDSNRRTKYLASKGLHFVGSGVSGGEEGARYGPSLMPGGDEAAWPHIKDIFQSIAAKSDGEACCEWVGDEGAGHYVKMVHNGIEYGDMQLICEAYDIMKRGLGLSHKEMGDVFAKWNKGVLDSFLIEITRDIMYFTDDDGTPLVEKILDKAGQKGTGKWTAVNALDLGMPVTLIAEAVLARCLSGIKEERVKASTKLEFVGRANKFEGDKEQFLEDLEQALYASKIISYAQGFMLMQEAAKEYNWKLNKPSIALMWRGGCIIRSVFLKDITAAYRKNPDLENLLFDDFFNKAIHKAQPGWRDVVAKAALLGLPTPAFSTALSWFDGYRTKDLPANLLQAQRDYFGAHTFLVKPEYANEKYPEGKYIHVNWTGRGGNVSASTYQA

SEQ ID NO: 11932 - DNA, 2058 bp, Mycobacterium bovis
  CDS (1)..(2058)
atgggttccaacatcgcccgaaacttcgcccggcacggctacaccgtggcagtgcacaatcggtcggtcgccaagaccgacgcgctgcttaaggagcacagctcagacggcaagttcgtgcgcagtgaaacgatccccgaatttcttgccgcactggaaaaaccgcgtcgggtgctgatcatggtcaaggccggagaggccactgacgctgtcatcaacgaacttgctgacgccatggaacccggcgacatcatcatcgacggcggcaatgcgttgtacaccgacaccatgcgccgcgagaaagcgatgcgtgagcggggcttgcacttcgtcggggccgggatctccggcggcgaagagggcgcgttgaacgggccgtcgatcatgcccggcggacccgccgagtcataccaatcgctgggtccgctgctcgaggagatctccgcgcatgtcgacggcgtgccgtgctgcacccacattggcccggacggctccgggcacttcgtcaagatggtccacaacggcatcgagtactccgacatgcagctcatcggtgaggcctaccagctgatgcgcgacgggctaggtctgaccgcgccggcgatcgccgatgtgttcaccgagtggaacaatggcgatctggacagctacctggtcgagatcaccgccgaggtgctgcggcagaccgatgccaagaccggcaaaccgctcgtcgacgtcatcgtggaccgggccgagcagaaaggcaccggccgttggaccgtcaagtccgcgctggacctgggtgtgccggtgaccggcatcgccgaagcggtgtttgcccgcgctctctcgggatccgtggggcaacgctcggccgccagcggtctggcttcgggcaagctcggcgagcagcccgccgaccccgccacgttcaccgaagacgtccgccaggcgttgtacgcctccaagatcgtggcctacgctcagggcttcaaccagatccaggccggcagcgccgaattcggctgggacatcacgccgggcgacctggccaccatctggcgtggcggctgcatcatccgggcgaagttcctcaaccacatcaaggaagcctttgacgccagcccgaacctggccagtctgattgtggccccgtatttccgcgcgccgtcgaatcggcgatcgacagttggcggcgtgtggtgtcgacggcggcccaactgggtatcccgaccccgggattctcgtcggccctgtcgtattacgacgcgctgcgcaccgcgcggctgcccgctgcactcacccaggcccagcgcgacttcttcggcgcacacacctacggccggatcgacgaaccaggcaagttccacacactatggagttcagaccgcaccgaagtaccggtgtagcgggctagaactaaaggggggtaaaggggtaagtgatgagatttctagacgggcacccacccgggtacgacctgacatacaacgacgtgttcatcgttccgaaccgatccgaggtcgcgtcgcgcttcgacgtcgatttgtccaccgccgacggctcgggcaccaccattccggtagtggtcgccaatatgaccgcggtagccgggcggcggatggccgagacggtcgcccgccgcggtggcatcgtaatcctgccgcaggatctgccgatcccggcggtaaagcagacggtggcgttcgtcaaaagccgggacctggtgctcgacaccccagtgacgctggcacccgacgattcggtgtccgacgccatggcgctcatccacaagcgcgcacatggcgtcgcggtggtcatcctcgagggtcgcccgatcggattggtgcgcgaatcgtcctgcctgggcgtggatcgcttcacccgggtgcgcgatatcgccgtgacggactatgtgaccgctccagcgggaaccgagccacgcaagatcttcgacctgctggagcacgccccggtcgacgttgcggtgctgaccgacgccgacggcacgttggcgggagtgctaagccgcaccggggctatccgcgccggtatctacaccccggccaccgatag

SEQ ID NO: 11933 - protein, 685 aa, Mycobacterium bovis
MGSNIARNFARHGYTVAVHNRSVAKTDALLKEHSSDGKFVRSETIPEFLAALEKPRRVLIMVKAGEATDAVINELADAMEPGDIIIDGGNALYTDTMRREKAMRERGLHFVGAGISGGEEGALNGPSIMPGGPAESYQSLGPLLEEISAHVDGVPCCTHIGPDGSGHFVKMVHNGIEYSDMQLIGEAYQLMRDGLGLTAPAIADVFTEWNNGDLDSYLVEITAEVLRQTDAKTGKPLVDVIVDRAEQKGTGRWTVKSALDLGVPVTGIAEAVFARALSGSVGQRSAASGLASGKLGEQPADPATFTEDVRQALYASKIVAYAQGFNQIQAGSAEFGWDITPGDLATIWRGGCIIRAKFLNHIKEAFDASPNLASLIVAPYFRAPSNRRSTVGGVWCRRRPNWVSRPRDSRRPCRITTRCAPRGCPLHSPRPSATSSAHTPTAGSTNQASSTHYGVQTAPKYRCSGLELKGGKGVSDEISRRAPTRVRPDIQRRVHRSEPIRGRVALRRRFVHRRRLGHHHSGSGRQYDRGSRAADGRDGRPPRWHRNPAAGSADPGGKADGGVRQKPGPGARHPSDAGTRRFGVRRHGAHPQARTWRRGGHPRGSPDRIGARIVLPGRGSLHPGARYRRDGLCDRSSGNRATQDLRPAGARPGRRCGADRRRRHVGGSAKPHRGYPRRYLHPGHR

SEQ ID NO: 11934 - DNA, 1419 bp, Synechococcus sp
  CDS (1)..(1419)
atgtcccagtcgcacttcggtttaatcggtctcggcgtgatgggggagaacctcgtcctcaatgccgagcgcaatgggttctcgagcgttgtctacaaccgcacctacgccaagactgaggagttcctcaacggtcgcggtcaagggcggaacattcagggggcgacggatctgcaggatttcgttggcaagctggaacgtcctcgccggatcctgatgatggtcaaggcaggtccagctgtggatgctgtcgttgaccagatctccccatatctcgaggaaggcgatctgctaatcgatggtggcaactcggattatcacgacaccgagcgccgggtgaaggagctcgagagcaagagcttcggcttcatcggcatgggtgtgtccggtggtgctaagggggctctggagggccccagcatgatgcccggcggcaccaaagcctcctacgacgccattgagagcctggtgaacaagatggcggctcaggtggatgacggcccctgcgtcacttacatcggtcccggtggatctggccaccttgtgaagaccgtccacaacggcattgagtacggcatcgagcagatcctggcggagggctatgacctgatgaagcgggtcaagggcatgaacggggagcagatggccgatgtgcttgcccagtggaatgccactgaggagctctcctcctatctggtggagattacagaggtttgcctgcgcacgaaggatcctgaagacggcgcagatctcgtcgagaaaatcatggatcaggctggccagaagggcaccggtctgtggaccgtggtcaccgccctgcagatgggtgcatccgttcccaccatctacgcatcactcaatggtcgggtgatgagttccctcaagcctgagcgggtggcagccgaatccatcctcaaaggaccagtcatcaaggatttcgacctcggcacccccgacgacgccatggctcccctgatggatgccacggtgctcagctgcatcgccagctatgcccagggcatggaactgctgcgcatcgcctcccgggatctggactacagcttgcagatgccctccatcgcccagatctggaaaggcggctgcatcatccgtgcccgcctgctccagcggattcaggatgccttcgctgccaatcctgatctgaccaacctgatgttggatccctggtttgccgatcagatcaaccggcgtctgcccggtttggccaaggtggtggccggcgccgctgaatccggcattcccgtgccctgcttcagcagcaccctggactacatcaacagctaccgcaccggtcgccttcctcagaacctggtgcaggccatgcgcgactgcttcgggtcccacacgtaccagagggtggacaaagagggcgccttccacaccgagtggctcggctga

SEQ ID NO: 11935 - protein, 472 aa, Synechococcus sp
MSQSHFGLIGLGVMGENLVLNAERNGFSSVVYNRTYAKTEEFLNGRGQGRNIQGATDLQDFVGKLERPRRILMMVKAGPAVDAVVDQISPYLEEGDLLIDGGNSDYHDTERRVKELESKSFGFIGMGVSGGAKGALEGPSMMPGGTKASYDAIESLVNKMAAQVDDGPCVTYIGPGGSGHLVKTVHNGIEYGIEQILAEGYDLMKRVKGMNGEQMADVLAQWNATEELSSYLVEITEVCLRTKDPEDGADLVEKIMDQAGQKGTGLWTVVTALQMGASVPTIYASLNGRVMSSLKPERVAAESILKGPVIKDFDLGTPDDAMAPLMDATVLSCIASYAQGMELLRIASRDLDYSLQMPSIAQIWKGGCIIRARLLQRIQDAFAANPDLTNLMLDPWFADQINRRLPGLAKVVAGAAESGIPVPCFSSTLDYINSYRTGRLPQNLVQAMRDCFGSHTYQRVDKEGAFHTEWLG

SEQ ID NO: 11936 - DNA, 1479 bp, Rhodopirellula baltica
  CDS (1)..(1479)
atgagtggtgattgtgatttcggcctgattggtttggccgtcatgggcgaaaatctggccttgaacgtcgaaagccgcggctacaaagtcgccgtctacaaccgcaccacgtccaaagtcgacgctttgatggaaggccgtgcgaagggcaaaaacttcgtcggctgccactcgatcgaagaattcgtcaaatcagtcaaacgacctcgcagactgatgatgctggtcaaagccggccccgccgtcgacgcattgatcgagcaattgctgccacactgcgaacccggcgacatcatcattgacggtggtaacgagtactacgttcacactgaacgccgcaccaagcaagtcgaagaagccggaatgctgtacgtcggttgcggcgtcagcggtggcgaagaaggtgccctcaaaggcccatcattgatgcccggcggaagtgccgaagcatggcctcacatcaaagaaatgttccagtcgatcgcagccaaggtcggacccaacaacgacatcccttgctgcgaatggctcggtgccggtggcgcgggcaactacgtcaagatggttcacaacggcatcgaatacggcgacatgcagttgatctgcgaagcctatcaattgctgaaagaactcggcggtttgtccaatgacgaactgtatgacgtcttcgacgaatggaaccgtggtgatctgcaaagctatctgatcgaaatctctcgcgacatcttcagcgtcaaagacgaccaaggcggcgacggatacctcgtcgacaagatcatggacgttgccggtgcaaagggcacaggtaaatggatgagccaactggctctcgaccttggcgtccccagcaccctggtcacgaccgccgtgttcgctcgcggtttgtcggcacaaaaggaagcacggactcgtgccagcaagacgctcaacggtcccgctgaatcgtccaaccctgaaatgcgtgcgatcgctcaatcgttggttggtgatcgtgctgagtttgtcgaagcggttcgccaagcactgtacgcttcgaaaattgtttcttacgcgcaaggctttgttcaactgcaagccgcatcggccgagcacaattggggcttggactacggtgccgccgcattgctatggcgaggtggttgcatcatccgtgctcagttcctggatcgcatcaaagaagccttcgacgccgatccaaacctggaaaacttgctgctggccaagtacttcgaagacgcagtcgaaaacgcacaagaaaaatggcgaaaggtcgtcgccatcgcttcgatcatgggcattccggttcccgcgttcagcaccgcattgtgctactacgacggatatcgcatggaacgcttgccagccaacatgctgcaagcccaacgcgattactttggtgctcacacctaccaacgcgtcgacaaggaaggcaccttccacagcgagtggattcaacttcgcaaagagcccaaagcttag

SEQ ID NO: 11937 - protein, 492 aa, Rhodopirellula baltica
MSGDCDFGLIGLAVMGENLALNVESRGYKVAVYNRTTSKVDALMEGRAKGKNFVGCHSIEEFVKSVKRPRRLMMLVKAGPAVDALIEQLLPHCEPGDIIIDGGNEYYVHTERRTKQVEEAGMLYVGCGVSGGEEGALKGPSLMPGGSAEAWPHIKEMFQSIAAKVGPNNDIPCCEWLGAGGAGNYVKMVHNGIEYGDMQLICEAYQLLKELGGLSNDELYDVFDEWNRGDLQSYLIEISRDIFSVKDDQGGDGYLVDKIMDVAGAKGTGKWMSQLALDLGVPSTLVTTAVFARGLSAQKEARTRASKTLNGPAESSNPEMRAIAQSLVGDRAEFVEAVRQALYASKIVSYAQGFVQLQAASAEHNWGLDYGAAALLWRGGCIIRAQFLDRIKEAFDADPNLENLLLAKYFEDAVENAQEKWRKVVAIASIMGIPVPAFSTALCYYDGYRMERLPANMLQAQRDYFGAHTYQRVDKEGTFHSEWIQLRKEPKA

SEQ ID NO: 11938 - DNA, 1419 bp, Prochlorococcus marinus subsp
  CDS (1)..(1419)
atgcccaaggcacattttggtttaatcggtcttggagttatgggggagaatttagttcttaatgcagaaaggaacggattttctagtgtagtttttaatagaacctattcaaaaactcaagaattcttagaaggtagaggtttaggaaagaatgtagaaggagctaaaacacttcaagaatttgtgaataagcttgaaagaccaagaagaattttaatgatggttaaagccggggcagctacagatgctgttattgataatatttctgaatatcttgaagaaggcgatttattaattgatggaggtaattctcagtttaaagatactgaaagacgagttgcgactcttgaaagtaaaagctttggatatataggaatgggtgtctctggaggggctaaaggagccttggaggggccaagcatgatgcctggcggaactaaagcctcttatgacgctatagaaagtttattgactaaaatggctgcgaaagtagaagacggtccttgtgtagcttatgttggacccggtggttcaggccacttcgttaaaactgttcataatggtattgaatatggcattgagcaaattcttgcagaagcttatgaccttatgaaaagagtcaaaaatatgaatggatcacaaatggctgaggtttttggtctttggaataatactgatgaattggcatcttatcttgtagaaataacgcaaatatgtttaaacaccaaagatgaactaacaggcgaagatgttgtggaaaaaatattggataaagctggccaaaaaggtactggattgtggactgttgttagtgccttagaacttggtatatcagttcccactatttatgcttcattaaatgcaagggttatgagttcccttaaggttcaacgtagtgaaatcgagaaaacaattccgatggaagctattgaagattttgatttaggagaaatttctaatggtatgaaacctttgtttgatgcagtcgttcttgctactattgctagttacgctcaagggatggatatattaagtgaagcttcatcagtttataattatgagctaaatatgccatctattgctcaaatatggaaaggtggttgcattattagatcaaaattattaaaaaagattcaagatgcatatcaaaaagatccaaatttgaagaatctaatttttgatgattggttcaacaacgaaatttctacaagaattgataatttagcaagtgtcgtttcttcttcaactaaggctggtattccagtgccttgtttatcaagtactttagattatttaaatagttacagaacaaacagacttcctcagaatttagttcaagccatgagagattgttttggttcacatacttacgaaagagttgacaaggaaggaagttttcatactgaatggatgaaatga

SEQ ID NO: 11939 - protein, 472 aa, Prochlorococcus marinus subsp
MPKAHFGLIGLGVMGENLVLNAERNGFSSVVFNRTYSKTQEFLEGRGLGKNVEGAKTLQEFVNKLERPRRILMMVKAGAATDAVIDNISEYLEEGDLLIDGGNSQFKDTERRVATLESKSFGYIGMGVSGGAKGALEGPSMMPGGTKASYDAIESLLTKMAAKVEDGPCVAYVGPGGSGHFVKTVHNGIEYGIEQILAEAYDLMKRVKNMNGSQMAEVFGLWNNTDELASYLVEITQICLNTKDELTGEDVVEKILDKAGQKGTGLWTVVSALELGISVPTIYASLNARVMSSLKVQRSEIEKTIPMEAIEDFDLGEISNGMKPLFDAVVLATIASYAQGMDILSEASSVYNYELNMPSIAQIWKGGCIIRSKLLKKIQDAYQKDPNLKNLIFDDWFNNEISTRIDNLASVVSSSTKAGIPVPCLSSTLDYLNSYRTNRLPQNLVQAMRDCFGSHTYERVDKEGSFHTEWMK

SEQ ID NO: 11940 - DNA, 1419 bp, Prochlorococcus marinus
  CDS (1)..(1419)
atgtccaaggcacatttcggtttgatcggtcttggcgtgatgggcgaaaaccttgtgctcaatgcagagcgcaatggtttttctagtgtcgtttacaaccgcacctacgccaaaacagaggagttccttaaagggcttgggtctgataaagccattcagggtgccaaggaccttcaagatttcgtcgacaagctcgaacgaccccgtcgaattctgatgatgatcaaggcaggttcggctattgatgctgttattgaacagatctccccttatctgcaggaaggtgatctactcatcgatggtggaaattccgaatttcgtgataccgagcgacgtgtcgccgagttagagagcaaaagctttggatatatcgggatgggtgtctccggtggggctaagggtgcacttgaagggccgagcatgatgccaggcggaacaaaaacctcctatgaggcgattgagagccttgtttgcaagatggctgcccaagttgaggatggtccctgtgtgacctacatcggtcctggaggttctgggcatttcgttaaaaccgtccacaacgggatcgagtacggcattgagcagattcttgctgaggcctatgacctgatgaagcgtgttggtggcatgaccggtacccagatggctgatgtcttggcgcaatggaatgccacagaagagctctcttcttatctggttgagatcaccgaagtatgtttgcgcaccaaggatcctgacgatggaagtgaccttgttgagaaaattatggatcaggcaggccagaagggaactggtctatggaccgttgtcagtgccttggagttaggagcttcagtgccaaccatttacgcctctctaaatggccgtgtgatgagctcaatgaagcctcaaagaattaccgctgagcagattttgcatgggtcagcgatcaaaccatttgatcttggtagttccgcagatggcatggcaccgctcatggacgccgtcgtgttgtcttgcatggctagttacgcgcagggcatggagctactgcgtatagcttctgctgaatacaactacaacttgcatttgccctccatcgcgcagatttggaagggtggctgcatcatcaggtcccgtctgctgaagcgcatccaggatgcctttaatgctgaccctcagctttccaacttgttgatcgatccttggttcgctgagcaagtgaaccgtcgcctgccgggcctagcaaaggtggtagccggcgcagctgaagccggtatcccagtgccttgcttcagcagcacgctcgattacatcaatagctatcgcacggcacgattaccacagaatttggtgcaggccatgcgcgattgcttcggctcacatacctaccagcgggttgacaaagaaggaaccttccatactgagtggctggactga

SEQ ID NO: 11941 - protein, 472 aa, Prochlorococcus marinus
MSKAHFGLIGLGVMGENLVLNAERNGFSSVVYNRTYAKTEEFLKGLGSDKAIQGAKDLQDFVDKLERPRRILMMIKAGSAIDAVIEQISPYLQEGDLLIDGGNSEFRDTERRVAELESKSFGYIGMGVSGGAKGALEGPSMMPGGTKTSYEAIESLVCKMAAQVEDGPCVTYIGPGGSGHFVKTVHNGIEYGIEQILAEAYDLMKRVGGMTGTQMADVLAQWNATEELSSYLVEITEVCLRTKDPDDGSDLVEKIMDQAGQKGTGLWTVVSALELGASVPTIYASLNGRVMSSMKPQRITAEQILHGSAIKPFDLGSSADGMAPLMDAVVLSCMASYAQGMELLRIASAEYNYNLHLPSIAQIWKGGCIIRSRLLKRIQDAFNADPQLSNLLIDPWFAEQVNRRLPGLAKVVAGAAEAGIPVPCFSSTLDYINSYRTARLPQNLVQAMRDCFGSHTYQRVDKEGTFHTEWLD

SEQ ID NO: 11942 - DNA, 1419 bp, Prochlorococcus marinus
  CDS (1)..(1419)
atgtccaaggcacattttggtttggttggtcttggagtaatgggagaaaatctcgtccttaatgctgaaaggaatgggttctctagcgttgtttataatcgaacttattcaaaaaccgaggcttttttaaatggtaaaggcttagggaaaaaaatatctggcgccagtgatcttcaggattttgttaacaaattagagaggcctagaaggattttgatgatggtaaaagcaggagcggcgaccgatgctgttatcgaacaaatatcaccttatttgcaagaagatgacctattgattgatggagggaatgcattgttttcagatactgaaagaagagtcttagaacttgagagtaaaagttttggttatataggaatgggtgtttcaggaggggcaaagggagccttggaaggaccaagcatgatgcctggtggaacaaaagcttcttataaagcaatagaaaatcttttgaacaaaatggcagctcaagtagatgatggaccttgtgttacttatataggtccacgaggttcgggccattttgttaaaacagtacacaatggaattgaatatggaatagaacagatactttctgaaggctatgacttgatgaaacgagtctgcaaaatgaattgtgatgagatttctgacgtttttggtatttggaataaaacagaagaattatcttcctatcttgttgaaattacagaaatttgtttacgaactaaggatccaaccgacggagctgatcttgttgagaaaataatggacaaagcaggtcaaaaaggaactggattatggacagttgtaagtgccttacaactgggggcctcggtccctaccatttacgcttctctgaatgggcgtgtaatgagttctatgaaatctgagagagtcaaggcggaaaaagtatttggcaagctatctatcgaaagaactgaccttggctcaccatcaaatggaatgtctccaataatggatgcggttgttttgtctacgattgcgagttatgcacaaggtatggaaattcttcgtttagcttctgaagaatataaatatgatcttcatatgccttctattgctcaaatttggaaaggaggctgcatcatacgttccacactcttgcaaagaatacaagatgcttttaataacgaaccacaattaacaaatctactaatggatccatggtttgccgaacaaattaaaaatagattgccagggcttacaaaaacagtggctgttgccgcgcagactggagttccagttccatgttttagtagcactttggattatataaatagttatagaactgctaggttgccacaaaatctagttcaggctatgcgtgattgctttggatcacatacttatgaacgtatagataaagaaggttcgtttcatactgaatggattaattaa

SEQ ID NO: 11943 - protein, 472 aa, Prochlorococcus marinus
MSKAHFGLVGLGVMGENLVLNAERNGFSSVVYNRTYSKTEAFLNGKGLGKKISGASDLQDFVNKLERPRRILMMVKAGAATDAVIEQISPYLQEDDLLIDGGNALFSDTERRVLELESKSFGYIGMGVSGGAKGALEGPSMMPGGTKASYKAIENLLNKMAAQVDDGPCVTYIGPRGSGHFVKTVHNGIEYGIEQILSEGYDLMKRVCKMNCDEISDVFGIWNKTEELSSYLVEITEICLRTKDPTDGADLVEKIMDKAGQKGTGLWTVVSALQLGASVPTIYASLNGRVMSSMKSERVKAEKVFGKLSIERTDLGSPSNGMSPIMDAVVLSTIASYAQGMEILRLASEEYKYDLHMPSIAQIWKGGCIIRSTLLQRIQDAFNNEPQLTNLLMDPWFAEQIKNRLPGLTKTVAVAAQTGVPVPCFSSTLDYINSYRTARLPQNLVQAMRDCFGSHTYERIDKEGSFHTEWIN

SEQ ID NO: 11944 - DNA, 1455 bp, Haemophilus ducreyi
  CDS (1)..(1455)
atgtcaatcaaaggtgatatcggcgttattggcttagccgtaatgggacaaaacttaattttaaatatgaatgacaacggcttcaaagttgtcgcatataatcgtactgcatcaaaagtagatgaatttttagcgggcgaagcaaaagataccaacataattggcgcttattctttagaagatttagccgctaaattagaaaaaccacgcaaaataatgttaatggtacgtgcaggcgaagtcgttgatcaatttattgatgctttactaccacatttagaagcaggcgatattattattgatggtggtaactctaactaccctgataccaaccgccgtactataacactagccgaaaaaggcattcgttttataggaacaggcgtgtcaggcggtgaagaaggtgcccgccacggtccgtctattatgccgggcggtaatgaagaagcttggccattcgtcaaacctattttacaagcaatctccgcaaaaacagataaagatgagccttgttgtgattgggttggtaaagaaggtgctggccattttgttaagatggtgcacaacggtatagaatatggcgatatgcaattaatttgtgaagcttatcaattcttaaaagatggcttaggtttaaactatgaagaaatgcacgcgatctttgcagattggaaaaataccgagctagatagctacttaatcgatattaccgcagatattcttgcatataaagatgcagatggtgagccactcgttgagaaaattttagatactgccggtcaaaaaggaacaggtaaatggacgggcatcaatgcgttagactttggtattccattgacgttaattactgaagcggtctttgcgcgttgtgtttctgcctttaaggatcaacgtgttgccgtatcacaattattcaataaaaccattacccctatatcagacgataaaaaagaatggattgaagcggtcagaaaagcattgttagcttcgaaaattatttcttatgcacaaggttttatgctgattcgtgaagcatcagaaaactttgaatggaatattaactatggcgccactgcattattatggcgtgaaggttgtattattcgttctgcctttttaggtaatatccgtgatgcctatgaagcgaacccaggtttagtgttcttaggttcagatccttatttccaaaatattttacaatccgcaatggcagattggcgtaaagtagtggctaaatccattgaaataggtattccaatgccatgtatggccgctgcaatcacgttcttagatggttacagctcagagcatctgcctgctaatttattacaagcacaacgtgactactttggcgcgcatacttatgagcgaacagataaaccacgttgttcattcttccatacaaattggacaggccgtggcggtaatacagcttcaacgacttatgatgtttag

SEQ ID NO: 11945 - protein, 484 aa, Haemophilus ducreyi
MSIKGDIGVIGLAVMGQNLILNMNDNGFKVVAYNRTASKVDEFLAGEAKDTNIIGAYSLEDLAAKLEKPRKIMLMVRAGEVVDQFIDALLPHLEAGDIIIDGGNSNYPDTNRRTITLAEKGIRFIGTGVSGGEEGARHGPSIMPGGNEEAWPFVKPILQAISAKTDKDEPCCDWVGKEGAGHFVKMVHNGIEYGDMQLICEAYQFLKDGLGLNYEEMHAIFADWKNTELDSYLIDITADILAYKDADGEPLVEKILDTAGQKGTGKWTGINALDFGIPLTLITEAVFARCVSAFKDQRVAVSQLFNKTITPISDDKKEWIEAVRKALLASKIISYAQGFMLIREASENFEWNINYGATALLWREGCIIRSAFLGNIRDAYEANPGLVFLGSDPYFQNILQSAMADWRKVVAKSIEIGIPMPCMAAAITFLDGYSSEHLPANLLQAQRDYFGAHTYERTDKPRCSFFHTNWTGRGGNTASTTYDV

SEQ ID NO: 11946 - DNA, 1425 bp, Candidatus Blochmannia floridanus
  CDS (1)..(1425)
atgtttaaacaacaagaagttggtgtaattggtatgggtataatgggtcaaaatttagcgttaaatattgaaaataagggatatagagtttctatttataatagatctccagataaaactaatataatcattaaaaataatcctacaaaaaatttaattccatatttttcaattgaacaatttattttttctttaaaaaaacctcgtgttatatttttaatgattactgcaggggttcatgttgatcatattattcaagttttgtctaattatttagaaataggagatattttaattgatggaggtaattctttttatcaagatacagtacgacgtgacttatatttatcagaaaaaaaaataaattttattggacttggtatatcaggaggggaagaaggagcgttaaaaggcccatcattaatgcctggtggttctcaagatgcttttaagatagttgagtcattattaaaaaaaattgctgctagatttaatgataatgagatttgtatggaatatattggtcctaatggatctggacattatgtgaagatgatgcacaatggtatggaatatggagatatgcaaataatctctgaaatatattttttcttaaaaatggtattacatttaactgctaaacagttaggaaaaatttttagtgattggaatatgggagaattgagcagttatttaattgaaataacaagtcatattttaatgaaaagtgataataatcagtattgtgttttagattatatattagatgttgctgataataaaggtactggattatggtctagtaaggatgctttagatttgggagtaccttcaactatgattactgagtcagtatttgcacgttatttatcaacattaaaaaatcaacgtattcaagcatcaaaagtattttctaatgtttttgaaggtaaagtaaattttgatttagaaaatattgatattttcgtagaaaaagcgcgtaaggctttgtatttaagcaaaattattttgtatgctcagggtttttatcaacttaaaatcagttcaatgacatatcattggaatttgaattatcaaaaaattgctaagatttttcgtgctggttgtattattcggtctaattttttacaagaaattattaatatctattcaaaaactcctaaaatagaaaatttgttattggattcatattgtgtgaatattataaataattatcaacaggatttaagagatatagtaacaattggtattgatcatggtattcctatgcctgcattatctgctgctatatcatattatgatggatttcgcagtttaatgttacctgctaatctgattcaagcgcaaagagattgttttggatctcatacttacaagcgtattgataaatcaggagtatttcatacaagatggttatctaaataa

SEQ ID NO: 11947 - protein, 474 aa, Candidatus Blochmannia floridanus
MFKQQEVGVIGMGIMGQNLALNIENKGYRVSIYNRSPDKTNIIIKNNPTKNLIPYFSIEQFIFSLKKPRVIFLMITAGVHVDHIIQVLSNYLEIGDILIDGGNSFYQDTVRRDLYLSEKKINFIGLGISGGEEGALKGPSLMPGGSQDAFKIVESLLKKIAARFNDNEICMEYIGPNGSGHYVKMMHNGMEYGDMQIISEIYFFLKMVLHLTAKQLGKIFSDWNMGELSSYLIEITSHILMKSDNNQYCVLDYILDVADNKGTGLWSSKDALDLGVPSTMITESVFARYLSTLKNQRIQASKVFSNVFEGKVNFDLENIDIFVEKARKALYLSKIILYAQGFYQLKISSMTYHWNLNYQKIAKIFRAGCIIRSNFLQEIINIYSKTPKIENLLLDSYCVNIINNYQQDLRDIVTIGIDHGIPMPALSAAISYYDGFRSLMLPANLIQAQRDCFGSHTYKRIDKSGVFHTRWLSK

SEQ ID NO: 11948 - DNA, 1480 bp, Oryza sativa
  CDS (9)..(1442)
tcgccaccatgggccagaaactcgccctcaacatcgccgagaagggcttcccgatctccgtctacaaccgcaccgccgccaaggtcgacgccaccgtgtcccgcgccgaggccgagggcgcgctcccggtgctcggccaccgcgacccgcggggcttcgtcctctccctctccaggccccgcaccgtcgtgctgctcgtccaggccgggcgcgccgtcgacgccaccatcgacgcgctcgtcccctacctcgacgccggggacgccatcgtcgacggcgggaacgagtggtaccagaacacggagcggcggatcgaggaggccgccgcgagggggatactctacctcgggatgggggtctccggcggcgaggagggcgcgcggaacgggccctcgctgatgccggggggccacatcgacgcctacaacaacatcagggacatcctcgagaaggccgccgcgcagacggaggatggggcgtgcgtcaccttcgtcggccccggcggcgcgggcaacttcgttaagatggtgcacaacgggatcgagtacggcgacatgcagctcatcgccgaggcctacgacgtgctccgccgcgtcggcggcctgtccaactcggagatcgctgacgtcttcgcggagtggaaccggggggaattggagagtttcttggttgagattactgccgatatattcacggtggccgacccgcttgatggcagcggcggcggtgggctggtggacaagattcttgacaagacggggatgaagggaaccgggaagtggacggtgcagcaggcagcagagcttgcgattgctgcgcccacgattgcagcatcactggatgggaggtacttgtctgggttgaaggacgagcgtgtggcggccgcaggggttctaaaggcggaggggatgccatcagggctactcgagacgattaatgttgataagaagatgctagttgacagggtgaggcaagctctgtatgcgtcaaaaatttgcagctacgcgcaggggatgaaccttctgcgagcaaagagtgtggagaaggggtggaatcttaacctcgcagagcttgcaaggatttggaagggcgggtgcattatccgggcgaagtttcttgataggatcaagaaggcgtatgacaggaaccctgagctggccaatctgatcgtggacagggagtttgcaagggagatggttcagcggcagaatgcatggcggtgggttgtggctcgtgctgtggaggctgggattagcactccagggatgtctgctagcctttcatactttgacacctacaggtgtagtcggctgcctgcaaatctgatccaagcacagagagacttgtttggggcacacacctatgagcgcattgaccgtccaggttcgttccacacagagtggactaagctggcgagaaagagtaatggtgcggccatttgaggacttgaatggtatcagtaactctgtgtggtgtctct

SEQ ID NO: 11949 - protein, 477 aa, Oryza sativa
MGQKLALNIAEKGFPISVYNRTAAKVDATVSRAEAEGALPVLGHRDPRGFVLSLSRPRTVVLLVQAGRAVDATIDALVPYLDAGDAIVDGGNEWYQNTERRIEEAAARGILYLGMGVSGGEEGARNGPSLMPGGHIDAYNNIRDILEKAAAQTEDGACVTFVGPGGAGNFVKMVHNGIEYGDMQLIAEAYDVLRRVGGLSNSEIADVFAEWNRGELESFLVEITADIFTVADPLDGSGGGGLVDKILDKTGMKGTGKWTVQQAAELAIAAPTIAASLDGRYLSGLKDERVAAAGVLKAEGMPSGLLETINVDKKMLVDRVRQALYASKICSYAQGMNLLRAKSVEKGWNLNLAELARIWKGGCIIRAKFLDRIKKAYDRNPELANLIVDREFAREMVQRQNAWRWVVARAVEAGISTPGMSASLSYFDTYRCSRLPANLIQAQRDLFGAHTYERIDRPGSFHTEWTKLARKSNGAAI

SEQ ID NO: 11950 - DNA, 894 bp, Bacillus cereus
  CDS (1)..(894)
atgcaagtaggattaattgggttaggtaaaatgggattaaatttagggaaaaatttaatggatcataaacatgaagtagtagcatttgatttaaatacgagcgcagtagaagaaatgaaagagtacggggcaacgggtacatctagtttaagtgaacttgttcagtcattacaatcaccaagaattctttgggtaatggtaccacacgctgttgttgattctgttattgatgaggttacaccacttttatcaaaaggagatattctaattgaagctggtaattcacattataaagagtctatccgccgatatgagcaattaaaggaagatggcattcactttatggatgcaggaacttctggtggaatggaaggcgctcgtaatggtgcttgttacatgatcggaggagatcaagaagcttgggacatcgttgaacctatcttccgcgatactgctgtagaaaatggattcttatatgctggaaaagctggtagtggtcacttcttaaaaatggttcataacggaattgaatacggtatgatggctgctattggtgaaggatttgagattctagagaaaagtgaatttgactacgattatgaaaaagtatcaagagtatggaacaacggttcagtcattcgttcttggttaatggaattaacagaaaatgcattttctaaagatgcaaaactggatgaaattaagggtgttatgcattcttctggtgaaggaaaatggacagtagaaacagcattagaccttcaaacagcaactcctgttatcgcaatgtctctattaatgcgctaccgctcattagacaatgatacatttacaggaaaagttgtagcagctctgcgcaatgaatttggcggacatgcagtagaaaagaaataa

SEQ ID NO: 11951 - protein, 297 aa, Bacillus cereus
MQVGLIGLGKMGLNLGKNLMDHKHEVVAFDLNTSAVEEMKEYGATGTSSLSELVQSLQSPRILWVMVPHAVVDSVIDEVTPLLSKGDILIEAGNSHYKESIRRYEQLKEDGIHFMDAGTSGGMEGARNGACYMIGGDQEAWDIVEPIFRDTAVENGFLYAGKAGSGHFLKMVHNGIEYGMMAAIGEGFEILEKSEFDYDYEKVSRVWNNGSVIRSWLMELTENAFSKDAKLDEIKGVMHSSGEGKWTVETALDLQTATPVIAMSLLMRYRSLDNDTFTGKVVAALRNEFGGHAVEKK

SEQ ID NO: 11952 - DNA, 897 bp, Bacillus cereus
  CDS (1)..(897)
atgaaactaggtttaattggattaggaaaaatgggatttccattagctgaacacttatatgaagacaagcatgaagtagttgtatacgatgtaaataaagagcttgttgaaaaggcaggaaaactaggaattactgcacgtcatacattaaaagaaatgattgctgaactagaagctcctcgtacaatttgggtaatggtgcctgcaggagaagttgtagagtcagtactaaaagatgtatatccattattagatgaaggtgatatcgttattgaaggcggaaattcattctataaagatacgttacgccgtgctgaagaagcaaaaagcttcggattacattatgtagatatcggtacatcaggcggtgtagaaggagctagatacggtgcttgcttaatggttggtggagaaaaagaaatttacgaccaattagaacctttatttaaagatttagcagtagaaaatggctattcttatgctggccgtgttggtagtggtcatttcttgaaaatggttcataacggtattgagtacggcatgatgcaagcaatcgctgaaggatttgaagtactagataagagtgactttgatttcaattatgaagatgttgcaaaagtatgggctaacggatcagttatccgtggttggttaatggacttaactgaaaaagcatttgcagaagatccgaaactagatggcattaaaggtgtaatgaactcttcaggagaaggaaaatggactgttgaaactgcacttgaacttcaagctgcagcaccagttatcgctatgtcattatttatgcgctatcgttctcaggaagatgatacattccatggaaaagtagtttcagcattacgtaatcagttcggtggacatgaagttgtgaaaaaataa

SEQ ID NO: 11953 - protein, 298 aa, Bacillus cereus
MKLGLIGLGKMGFPLAEHLYEDKHEVVVYDVNKELVEKAGKLGITARHTLKEMIAELEAPRTIWVMVPAGEVVESVLKDVYPLLDEGDIVIEGGNSFYKDTLRRAEEAKSFGLHYVDIGTSGGVEGARYGACLMVGGEKEIYDQLEPLFKDLAVENGYSYAGRVGSGHFLKMVHNGIEYGMMQAIAEGFEVLDKSDFDFNYEDVAKVWANGSVIRGWLMDLTEKAFAEDPKLDGIKGVMNSSGEGKWTVETALELQAAAPVIAMSLFMRYRSQEDDTFHGKVVSALRNQFGGHEVVKK

SEQ ID NO: 11954 - DNA, 1446 bp, Chlamydophila caviae
  CDS (1)..(1446)
atgacagagcaagcagatattgggctaattggtttagctgtaatggggaaaaaccttgtattaaacatgatagatcacggtttttctatttctgtttataaccgtagtccagagaaaacccgagagtttctacaagaacattctcaaaataccctccttcagggacacgaaaatttagaagactttgtgcgttctttaaaacgtcctagaaaagtgatgctgatgatcaaagcaggagctcctgtagatcaaagtatcgaatcattgctaccttatcttgaacctggagatattattatcgacgggggaaacagctattataaagattcagaaaggcgatgccgagacctcaaagaaaagggcatactttttgtagggatggggatttctggaggcgaggaaggtgctcgcaagggaccttctattatgcccggaggtaatagtgaggcgtggccagctatagcccctatctttcaaggtatttctgctaaggttcatggtaacccctgctgttgttgggttggctctggaggggcagggcattatgtaaagactgtacataatggtattgaatacggagatatacaattaatctgcgaagcttacggattattaaggacacgtttaggcatctctccagagggtatatcggaaatttttgccgaatggaatagccgagagttagaaagctaccttatgagaatttctgtagaggtgctttctttaaaaggtcctgacggatctcctgttattgatacaattttagatgtcgcaggacaaaaggggacaggccgctggacagccatagatgctatcgactctggagtccctctttctttaattattgaatctgtattagcgcgctttctctcttcatggaaaacggtacgagaacaggctgctagcgaacttcctggtattcctatagtctttgaaaaacccagagacccgcatctttttatcgaagatgtattccaggcattatatgcttcgaaaattattagctatgctcaaggattcatgctgttaaaacaagcatcagaagagcatcaatggaatctaaatttcggagagctcgctctattgtggagaggaggctgtatcatccaaagcgcatttttagatgctatccataaaggctttgaaaatgaacccgaggctccttcgctaattttacaaacctatttcaaatccacattacaaaactcagaatctggctggcgtagaactgttgcttacgcagttggttcaggatatcctgtgccttgtttagcagctgctttgaccttctatgatggttaccgaacaaaagactcttcaatagctttagctcaaggactacgagattattttggagcgcattcttacgaacgtaaggatagacctcgaggagaattctaccatacagactggatagggactaaaactacaacagcagtaaaataa

SEQ ID NO: 11955 - protein, 481 aa, Chlamydophila caviae
MTEQADIGLIGLAVMGKNLVLNMIDHGFSISVYNRSPEKTREFLQEHSQNTLLQGHENLEDFVRSLKRPRKVMLMIKAGAPVDQSIESLLPYLEPGDIIIDGGNSYYKDSERRCRDLKEKGILFVGMGISGGEEGARKGPSIMPGGNSEAWPAIAPIFQGISAKVHGNPCCCWVGSGGAGHYVKTVHNGIEYGDIQLICEAYGLLRTRLGISPEGISEIFAEWNSRELESYLMRISVEVLSLKGPDGSPVIDTILDVAGQKGTGRWTAIDAIDSGVPLSLIIESVLARFLSSWKTVREQAASELPGIPIVFEKPRDPHLFIEDVFQALYASKIISYAQGFMLLKQASEEHQWNLNFGELALLWRGGCIIQSAFLDAIHKGFENEPEAPSLILQTYFKSTLQNSESGWRRTVAYAVGSGYPVPCLAAALTFYDGYRTKDSSIALAQGLRDYFGAHSYERKDRPRGEFYHTDWIGTKTTTAVK

SEQ ID NO: 11956 - DNA, 1440 bp, Streptomyces avermitilis
  CDS (1)..(1440)
atgagcacaacagcccagatcggcgtcactggtctcgcggtcatgggccgcaacctcgcccgcaacttcgcgcgcaacggctatacggtcgcggtgcacaaccggaccgcgtcgcggacgcgtgacctcgtggaggagttcggccacgagggcgacttcgtgccggccgagaccgcgaaggacttcgtggcggcgctggagcggcccaggcgcctggtgatcatggtgaaggcgggcgcgcccaccgacgcggtgatcgaggagttcgccccgctcctggagcccggcgacatgatcatcgacggtggcaacgcacacttcgcggacacccggcgccgggagcgcgagctgcgcgagcaggacatccacttcgtcggcaccggcatctccggcggcgaggagggcgcgctgcacgggccgagcatcatgccgggcggctcgcccgagtcgtacgactccctcgggcccatgctggagaagatctccgcgaaggcggccgacggggcgccgtgcgtgacgcacgtcggtccggacggtgccgggcacttcgtgaagatggtgcacaacggcatcgagtacgcggacatgcagctgatcggcgaggcgtaccagctgctgcgcgacgtcgccggctacacgcccgcgcagatcgcggacatcttccggacctggaacacgggccgcctcgactcctacctgatcgagatcacggcggaggtcctgtcccacgtggacgcggcgaccggcaagccgttcgtggacgtggtccaggaccaggcggaacagaagggcacgggccgctggacggtccagatcgcgctcgacctgggcgtgccggtgtcgggcatcgcggaggccgtgttcgcccgctccctgtccggccaccaggagctgcgggaggcctcgcgcgggctggccgggccgaaggcggctccgctcggcgagtcggaggcggcggccttcgccgaccgcgtcgagcaggcgctgtacgcctcgaagatcgtctcgtacacgcagggcttccacgagatcgcggcgggcagcgacgagtacgactggaacatcgacctggggaagatcgcgtcgatctggcggggcgggtgcatcatccgcgccgccttcctggaccgcatccgggaggcgtacgacgcgcgtgcggacctgccgagcctgctgtccgacgacacgttcgcgcaggagatcgcggcggcgcaggacgactggcgcgaggtgctgatcgcggcgacccgccagggcgtaccgaccccggggttcgccgcggccctcgcctactacgacgccctgcgcgccgagcgcctgcccgccgccctcacccaggggcagcgggacttcttcggggcgcacacctatcgccgcacggaccgggagggctcgttccacacgctgtggggcggggaccggtcggaggtcaccgcgtag

SEQ ID NO: 11957 - protein, 479 aa, Streptomyces avermitilis
MSTTAQIGVTGLAVMGRNLARNFARNGYTVAVHNRTASRTRDLVEEFGHEGDFVPAETAKDFVAALERPRRLVIMVKAGAPTDAVIEEFAPLLEPGDMIIDGGNAHFADTRRRERELREQDIHFVGTGISGGEEGALHGPSIMPGGSPESYDSLGPMLEKISAKAADGAPCVTHVGPDGAGHFVKMVHNGIEYADMQLIGEAYQLLRDVAGYTPAQIADIFRTWNTGRLDSYLIEITAEVLSHVDAATGKPFVDVVQDQAEQKGTGRWTVQIALDLGVPVSGIAEAVFARSLSGHQELREASRGLAGPKAAPLGESEAAAFADRVEQALYASKIVSYTQGFHEIAAGSDEYDWNIDLGKIASIWRGGCIIRAAFLDRIREAYDARADLPSLLSDDTFAQEIAAAQDDWREVLIAATRQGVPTPGFAAALAYYDALRAERLPAALTQGQRDFFGAHTYRRTDREGSFHTLWGGDRSEVTA

SEQ ID NO: 11958 - DNA, 876 bp, Streptomyces avermitilis
  CDS (1)..(876)
atggagctcggtctcgtcggcctcggcaagatgggcggcaacatgcgcgagcggatccgccgcgcaggtcacaccgtcatcggatacgaccgcaacccggacgtcgccgatgtccacagcctcgaagagcttgtgggcaagctcaagggcccgcgcgtggtgtgggtgatggtccccgccggtgccgcgacgcagtccaccgtcgacgagctgggcgagctcctggagcccggcgacatcgtcgtggacggcgggaactcgcgctggacggacgatgagaagcacgcggaggagctggccgccaagggcatcgggttcgtcgactgcggcgtctccggcggcgtctggggcctgcagaacggctatgcgctgatgtacggcggcgacgccgagaacatcgccaaggtgcagccgatcttcgacgcgctcaagcccgagggcgacttcggcgccgtacacgcgggcaaggtcggcgcgggccacttctcgaagatggtccacaacggcatcgagtacgccatgatgcaggcctacgccgaaggctgggagctgctcgagaaggtcgactcggtcacggacgtccgcgaggtcttcaggtcctggcaggagggcacggtcatccgttcctggctgctcgacctggcggtcaacgccctcgacggggacgagcacctggagaagctgcgcggctacgccgaggactccggcgagggccgctggacggtggaggccgccatcgacaacgcggtcccgctgccggcgatcacggcgtcgctgttcgcgcggttcgcctcgcggcaggacgattcgccgcagatgaagatgatcgccgcgctgcggaaccagttcggcggccacgcggtcgagaagaagtaa

SEQ ID NO: 11959 - protein, 291 aa, Streptomyces avermitilis
MELGLVGLGKMGGNMRERIRRAGHTVIGYDRNPDVADVHSLEELVGKLKGPRVVWVMVPAGAATQSTVDELGELLEPGDIVVDGGNSRWTDDEKHAEELAAKGIGFVDCGVSGGVWGLQNGYALMYGGDAENIAKVQPIFDALKPEGDFGAVHAGKVGAGHFSKMVHNGIEYAMMQAYAEGWELLEKVDSVTDVREVFRSWQEGTVIRSWLLDLAVNALDGDEHLEKLRGYAEDSGEGRWTVEAAIDNAVPLPAITASLFARFASRQDDSPQMKMIAALRNQFGGHAVEKK

SEQ ID NO: 11960 - DNA, 879 bp, Streptomyces avermitilis
  CDS (1)..(879)
atgcagctcggactgatcggtctcggcaaaatgggcggcaacatgcgcgagcggatccgccgcgcgggccacacggtcgtcggctacgaccgcaaccccgaggtctcggacgtcagtagcctcaccgaactcgtgagcgccctcgaaggcccgcgcgtggtctgggtgatggtccccgcgggcgccccgacccagtccgtcgtcgacgagctcggcgacctgctctcccccggcgacaccgtcgtcgacggcggcaactcccgctggacggacgacgagaagcacgccgaggagctggccgccaagggcatcggcttcgtcgacgcgggcgtctcgggtggtgtgtggggtctccagaacggctatgcgctgatggtgggcggcgacgcggagcacatcgctcgcgtccagccgatcttcgacgcgctcaagccggagggcgacttcgggttcgtccacgcgggcaaggtcggcgcgggccacttctcgaagatggtccacaacggcatcgagtacgccatgatgcaggcgtacgccgagggctgggagctcctcgagaaggtcgactccgtgaccgatgtgcgcgcggtcttccgctcctggcaggagggcaccgtcatccgctcctggctgctcgacctcgcggtcaacgccctggacgaggacgagcacctggagaagctgcgcggctacgccgaggactccggcgagggccggtggaccgtcgaggcggccatccacaacgccgtgccgctgcccgcgatcaccgcctccctcttcgcgcggttcgcctcccgccaggacgactcgccgcagatgaagatggtcgcggcgctgcgcaaccagttcggcggccacgccgtcgagtcagcggagtag

SEQ ID NO: 11961 - protein, 292 aa, Streptomyces avermitilis
MQLGLIGLGKMGGNMRERIRRAGHTVVGYDRNPEVSDVSSLTELVSALEGPRVVWVMVPAGAPTQSVVDELGDLLSPGDTVVDGGNSRWTDDEKHAEELAAKGIGFVDAGVSGGVWGLQNGYALMVGGDAEHIARVQPIFDALKPEGDFGFVHAGKVGAGHFSKMVHNGIEYAMMQAYAEGWELLEKVDSVTDVRAVFRSWQEGTVIRSWLLDLAVNALDEDEHLEKLRGYAEDSGEGRWTVEAAIHNAVPLPAITASLFARFASRQDDSPQMKMVAALRNQFGGHAVESAE

SEQ ID NO: 11962 - DNA, 915 bp, Nitrosomonas europaea
  CDS (1)..(915)
atggaattcggtatggtgggtttagggcgcatggggggcaatatggcacgccgtcttgcccgacagagcagaaaaattgcagtgatgaaccgtagttttgatgtagccgaggcattggtgaaggaaacggggcacatcgcgtgcagggattacaccgagctggttgctgtacttgagaaaccacggattatatggctgatgctgccagcgggtgacgtgactgaaacggcgctttccacactattaccattattgtccccaggtgatctgatcgtggatggtgcaaatgcccattatcaggatgatgcgccacgtgcggcacgctgtgcagaacggggtatcgaatttgtcgatgccggggtttccggagggatatggggattggaaaatggttactgcatcatgtttggtggatcagatacagcagctgcgcgactgaagccttatctggaagtattggcaccgaccccaacgactggctggttgcatactgggccggttggctcagggcattatgtgaaaatgatccataacgggatcgagtacggcatgatgcaggcctttgccgagggatttgcgctgatgaaagacaaatccgggttcaatctcgatcttgccgagattgccgagttatggcggcatggtagtgtggtgcgctcgtggttactcgatttgtctgccgattttctggctgaagatcagatgtttgatgatattgctccttttgtggcggattcgggtgaaggtcgctggacggcacttgcttctattgagcagggtattcctgccccggtaatcatgctttcactgatgatgcgttttaccacacagggcagaaatgattatgcggctaaaatgcttgccaagatgcgccacggttttggtggccatgccatcaaaaaaggtgagcaatga

SEQ ID NO: 11963 - protein, 304 aa, Nitrosomonas europaea
MEFGMVGLGRMGGNMARRLARQSRKIAVMNRSFDVAEALVKETGHIACRDYTELVAVLEKPRIIWLMLPAGDVTETALSTLLPLLSPGDLIVDGANAHYQDDAPRAARCAERGIEFVDAGVSGGIWGLENGYCIMFGGSDTAAARLKPYLEVLAPTPTTGWLHTGPVGSGHYVKMIHNGIEYGMMQAFAEGFALMKDKSGFNLDLAEIAELWRHGSVVRSWLLDLSADFLAEDQMFDDIAPFVADSGEGRWTALASIEQGIPAPVIMLSLMMRFTTQGRNDYAAKMLAKMRHGFGGHAIKKGEQ

SEQ ID NO: 11964 - DNA, 900 bp, Enterococcus faecalis
  CDS (1)..(900)
atggacattggctttattggacttgggaaaatgggtttgaacatggcattaaatgttcacgaacaaggctggcccattattggctttgatgtaacaaaggaagcaagagcgactgctagagaacaaggtctttccgttgtagattcgttgtcagaattattgaaagcgcttaacaaaaggaaggtgatttttttaagtacccccgctggtcagattaccaatcaattagtggcagaattggtagagcaattagcaccagaggatatcattgtggatagtggcaattcaaattttcatgatagtgttgcgaatgctcagcttgctaaggaaaaaggaatttattttattgattgtggtacttctggtggcatcaaaggagcgcgggaaggagcgtgtttaatggttggcggtgcgcctgaagctgtcaaagtgttaaccccattttttgaagatttagcttgtgaacaagggtatctttatgctgggaaatcaggagctggtcactatttgaaaatggtgcataacgggattgagtacgtcatgatgcaagccatgggcgaaggattcaatttattagaagctgccgaatatgattttgcgttggagaaagtagccgatgtgtggaatcacggctcgattattgaagctcgcttgatgggcttagcgaaagaggtttttgcggaaaatcctacgttagccaatctagaagggaaagtggcagcaaatggcgaagccaaatggatgattgaagaagcattgcgtttggagatgcccgtcccaactacggcgttgtccttatttactcgaaatgaaagtatgctagcaaatcatttttcaaacaaagtggtcgcttctttgcgacaaggatttggcgggcatgaagtcgtaaaaagtcagtaa

SEQ ID NO: 11965 - protein, 299 aa, Enterococcus faecalis
MDIGFIGLGKMGLNMALNVHEQGWPIIGFDVTKEARATAREQGLSVVDSLSELLKALNKRKVIFLSTPAGQITNQLVAELVEQLAPEDIIVDSGNSNFHDSVANAQLAKEKGIYFIDCGTSGGIKGAREGACLMVGGAPEAVKVLTPFFEDLACEQGYLYAGKSGAGHYLKMVHNGIEYVMMQAMGEGFNLLEAAEYDFALEKVADVWNHGSIIEARLMGLAKEVFAENPTLANLEGKVAANGEAKWMIEEALRLEMPVPTTALSLFTRNESMLANHFSNKVVASLRQGFGGHEVVKSQ

SEQ ID NO: 11966 - DNA, 1422 bp, Enterococcus faecalis
  CDS (1)..(1422)
atgacaaaacaacaatttggcgtagtcggcatggctgtcatgggaaaaaatcttgctttaaacattgaaagcagaggctatacagttgcgctgtataaccgtacaggatcaaaaacaacagaagtggttgaagaacatcctgacaaaaactttcaagcaacatactcaattgaggaatttgtgaatgcaattgaaaaacctcgtcgaattatgttgatggttaaagctggacctgcaacagatgcgacaatccaagaattgttaccacaccttgataaaggcgacatcttaattgatggcggtaatacgttcttcaaagacacaatgcgacgtaatgaagaactagcaaactcaggaattaactttattggtactggcgtttctggcggagaagaaggagccttgaaaggaccatctatcatgcctggcggacaaaaagaagcgtatgagttagttgcgccaattcttgaaaaaatttcagctaaagcagaagacggtgaaccatgtgtgacttacattggcccaaatggtgctggacattatgtaaaaatggttcataatgggattgaatatggggacatgcaattaattgctgaatcctacgatttaatgaaacaaatcttaggcttatctgttgatgaaatggcagagattttcaaagaatggaacgaaggcgaattagacagttaccttatcgagatcacggctgacattttgacacgtaaagatgatgaaggaaccgaccaaccaatcgttgatgttattcttgatgcagcaggcaacaaaggaacaggtaaatggacaagccaaagtgcgttagatcttggcgtaccattaccattaattacagaatcagtatttgcacgttttatttcggcttacaaagaagaacgcgtaaaagcaagtggcattttatcaaaacctgcagcctttaactttgcaggcgataaaaaagaattgattgaaaaaattcgcgaagcattatactttagtaaattaatgagttatgcgcaaggttttgcacaactccgtgcagcttctgaagaatacggatgggatttaccatttggtgaaattgcaaaaatctggcgagcaggttgtattatccgtgcacaattcttacaaaaaattaccgatgcatatgaaaaaaatccagcacttgaaaacttgttgttagatgaatacttcgtagaaattacgaaaaaatatcaacaagccgttcgtgaagttgttgcgattgctgttcaagcaggtgttcctgtaccaacattctcatctgcaattgcttattacgattcttatcgttcagatcgcttaccagcgaatttaattcaagcacaacgtgattacttcggtgctcatacgtacgaacgcacagacaaagaaggaatctaccattacagctggtacaacgaagaataa

SEQ ID NO: 11967 - protein, 473 aa, Enterococcus faecalis
MTKQQFGVVGMAVMGKNLALNIESRGYTVALYNRTGSKTTEVVEEHPDKNFQATYSIEEFVNAIEKPRRIMLMVKAGPATDATIQELLPHLDKGDILIDGGNTFFKDTMRRNEELANSGINFIGTGVSGGEEGALKGPSIMPGGQKEAYELVAPILEKISAKAEDGEPCVTYIGPNGAGHYVKMVHNGIEYGDMQLIAESYDLMKQILGLSVDEMAEIFKEWNEGELDSYLIEITADILTRKDDEGTDQPIVDVILDAAGNKGTGKWTSQSALDLGVPLPLITESVFARFISAYKEERVKASGILSKPAAFNFAGDKKELIEKIREALYFSKLMSYAQGFAQLRAASEEYGWDLPFGEIAKIWRAGCIIRAQFLQKITDAYEKNPALENLLLDEYFVEITKKYQQAVREVVAIAVQAGVPVPTFSSAIAYYDSYRSDRLPANLIQAQRDYFGAHTYERTDKEGIYHYSWYNEE

SEQ ID NO: 11968 - DNA, 1431 bp, Tropheryma whipplei
  CDS (1)..(1431)
atgcgggctgatatcggtgtatatggtcttgcggttatgggcagtaatcttgcgagaaattttgccggcaaaggtatccgggttgctattcataaccggtcatccgacagatctaattccctcgcacagcagcacagtgagtgtaattttattgttgcgaaggatgataaagattttatagattcactcagttcgcccagaactgtccttctgatggttaaggctggatctattgtggatgaagttatagctcgactctccacctttatgcaaccaggagatgtgataatcgacggtggtaattctctgtacaccgatacaatcaggcgtgaggaagaactcaaggcaagggggttgcactttatagggcttggtgtttcgggcggagaggtgggcgccctcgaaggccccagtcttatgcccggaggatctgattacgcttattcgatcgttggtcctatgctcgagaagatagccgctagggcgaatggtgagccctgtgttgcgcacataggtcataatggcgcgggacactttgtgaagatggtccacaatggcattgaatacgctgatatgcaaataattgccgagtcttatgatcttttaagacggggtttggggctctctccgacgcgtatatccgatatttttcgtgagtggaacagcggtgagcttgagtcgtatttagttggagtaacagctgacatactttctcatagagacaagagaaccggaaagccgtttgttgatattgttctcgaccaggctggtgcaaagggaaccggtgcttggacagcgcagaacgcacttgaccttggtgttcccgccggttccgtgtctgaagcagtttttgcgcgcagtctttcatcggatgaacagcgttgccaggtgcaacagaaactttctagatcacaagcatcaagtcatgaagcacccttgaaggaggcggagtttatcgatgctgtacgcaatgccctttacttggcaaagatacttgcgtactctcagggttttagaattattagtgttgcagccgccaagcatgactggggcatagacctttctgcctgtgcacgaatctggcgtgcgggctgtataatccgggcagtttttctggataaagttgcccatgagtacagtaagaatccggacctcacaagtcttatgtgttctccgggtttttctgatgaattggtaggcaggttacggtttttgagggaagttgttgcttctgcagcccgcctggctattccagcacctgttttttcatctctcttgtcatatatcgacgcgcttgcttcagatcgcttgcctgcatgtctgattcaggcgcagagagatgattttggtgcccacacttacaggcgtgtcgacgttccggggatttttcataccctttggtcatcagacctgagcgaagtgcccgcctga

SEQ ID NO: 11969 - protein, 476 aa, Tropheryma whipplei
MRADIGVYGLAVMGSNLARNFAGKGIRVAIHNRSSDRSNSLAQQHSECNFIVAKDDKDFIDSLSSPRTVLLMVKAGSIVDEVIARLSTFMQPGDVIIDGGNSLYTDTIRREEELKARGLHFIGLGVSGGEVGALEGPSLMPGGSDYAYSIVGPMLEKIAARANGEPCVAHIGHNGAGHFVKMVHNGIEYADMQIIAESYDLLRRGLGLSPTRISDIFREWNSGELESYLVGVTADILSHRDKRTGKPFVDIVLDQAGAKGTGAWTAQNALDLGVPAGSVSEAVFARSLSSDEQRCQVQQKLSRSQASSHEAPLKEAEFIDAVRNALYLAKILAYSQGFRIISVAAAKHDWGIDLSACARIWRAGCIIRAVFLDKVAHEYSKNPDLTSLMCSPGFSDELVGRLRFLREVVASAARLAIPAPVFSSLLSYIDALASDRLPACLIQAQRDDFGAHTYRRVDVPGIFHTLWSSDLSEVPA

SEQ ID NO: 11970 - DNA, 1449 bp, Neisseria gonorrhoeae
  CDS (1)..(1449)
atgaaaggcgatattggcgtaatcggtttggcggttatggggcaaaacctgattttgaatatgaacgattgcggatttaaggttgtcgcctacaaccggacaatcggtaaagtggacgaatttttaaacggtgcggcaaaagagacgggcattatcggcgcgtattccctgcaagacttggtcgataagctggcaaaaccgagaaaaatcatgatgatggttcgcgcaggttcggtggttgacgactttgtcgaacaactgcttccgctgttggaagaaggcgacatcattatcgacggcggcaatgccaattaccccgacacgacacggcggacacattaccttgccggaaaagggattttgtttgtcggcgcgggcgtatccggcggcgaagaaggcgcgcggcgcgggccgtccatcatgccgggcggggataagcgcgcttgggaagcggtcaagccgattttccaggcgattgccgccaaaacgccgcagggcgaaccgtgttgcgactgggtcggcaaggatggcgcgggacattttgtcaaaatggtgcacaacggcatcgaatacggcgatatgcagctgatttgcgaagcgtaccagtttatgaaagacggtttggggctgtcctacgacgaaatgcaccgcgtgtttgccgagtggaacaaaaccgagctggattcttatctgattgaaatcacagcggcaattttgggctataaggacgaaggcggcgaaccgctggccgagaaaatcctcgatacggcagggcaaaaaggcacgggcaaatggacgggcatcaatgccttggatttgggcattccgctgacgctgatttccgaagccgtattcgcccgctgtgtttcgtcgttcaaagaacagcgcgtgcagaccggcaggctgttcgcccgaaccgccacgcccgtcgaaggcggcaaacaagaatgggtcgaggcgttgagacaggctttgcttgcctccaaaatcatttcctacgcacaaggctttatgttgatccgcgaagcgggcgaaagttacggctggggtttggactacggcaacactgcgctgctgtggcgcgaaggctgcatcatccgcagcgcgtttttgggcaatatccgcgacgcgtatgaggccaatcccgatttggtgtttttgggtgcggatccgtatttcaaaaatattttggaaaactgcctgccggcatggcgcaaggtggttgccaaggcggtcgaatgcggcatccctatgccctgcatggcttcggcgattacgttcttggacggctatacgaccgaacgcctgcctgccaacctcttgcaggcacagcgcgactacttcggcgcgcacacttacgagcgcaccgacaaaccgcgcggcgaatttttccataccaactggacgggcaagggcggagataccgcttcgacaacctacgatatttga

SEQ ID NO: 11971 - protein, 482 aa, Neisseria gonorrhoeae
MKGDIGVIGLAVMGQNLILNMNDCGFKVVAYNRTIGKVDEFLNGAAKETGIIGAYSLQDLVDKLAKPRKIMMMVRAGSVVDDFVEQLLPLLEEGDIIIDGGNANYPDTTRRTHYLAGKGILFVGAGVSGGEEGARRGPSIMPGGDKRAWEAVKPIFQAIAAKTPQGEPCCDWVGKDGAGHFVKMVHNGIEYGDMQLICEAYQFMKDGLGLSYDEMHRVFAEWNKTELDSYLIEITAAILGYKDEGGEPLAEKILDTAGQKGTGKWTGINALDLGIPLTLISEAVFARCVSSFKEQRVQTGRLFARTATPVEGGKQEWVEALRQALLASKIISYAQGFMLIREAGESYGWGLDYGNTALLWREGCIIRSAFLGNIRDAYEANPDLVFLGADPYFKNILENCLPAWRKVVAKAVECGIPMPCMASAITFLDGYTTERLPANLLQAQRDYFGAHTYERTDKPRGEFFHTNWTGKGGDTASTTYDI

SEQ ID NO: 11972 - DNA, 1479 bp, Kluyveromyces lactis
  CDS (1)..(1479)
atgtctgaacctgccggtgatattggtttgattggtttggccgttatgggtcaaaacttgatcttgaacgctgctgaccacggtttcactgttgttgcttataacagaacagtttctaaggttgatcatttcttagcaaacgaggcaaagggtaaatctatcattggtgctcattctgtggaagaattgtgccgtaacttgaagagaccaagaagaatcattcttttggtcaaggctggtgatgctgtggatgctttcattcaacaattgttgccatttttggaaaagggagacattatcatcgatggtggtaactctcatttcccagattctaacagacgttacgatgaattgaaggaaaagggaatctactttgttggttctggtgtttctggtggtgaagaaggtgctcgttacggtccttctttgatgccaggtggtgccgaagaagcttggcctcacattaaggacatcttccaatctatttctgccaagtctgacggcgaaccatgttgtgactgggttggtccagctgggtctggtcattacgtgaagatggtccacaacggtatcgaatacggtgacatgcaattgatcactgaagcttacgatatcatgaagagaattggtggattcaccgataaggaaatcggtgaagttttctcccaatggaacaagggtgtcttggattccttcttggttgaaattacaagagacattttgctgtacgacgatgtcgatggtactcctctagtggaaaagatcttggattcagctggtcaaaagggtactggtaaatggactgccattaacgctttggatctaggtatgccagttactttgattggtgaagccgtgttcgctcgttgtttgtcctctttgaaggacgaaagagttagagcctccaagttgcttccaggccctcaaattccaaaggatgccgttaaggaaagacaacaattcgttgacgacttggaacaagctctttacgcttccaagatcatctcttacgctcaaggtttcatgttgatccgtgaagctggtaagacttacggctggaagttgaacaaccctgccatcgctttgatgtggagaggtggttgtatcatcagatccgttttcttgggtgaaattacaaaggcttatagagaaaacccagaattggaaaacttattattcaacaaattcttcgctgatgccgtcgaaaaggctcaaagcggttggagaaagactattggtttggctgtttcttacggtatcccaaccccagctttctccactgctctatcgttctacgatggttacagatctgaaagattgccagctaacttgctacaagctcaacgtgattacttcggtgctcacactttcagagtcttgccagaagctgcttccgaaaacttgccagctgaccaaaacatccacattaactggaccggtaaaggtggtaacgtttcagcttccagttaccaagcttaa

SEQ ID NO: 11973 - protein, 492 aa, Kluyveromyces lactis
MSEPAGDIGLIGLAVMGQNLILNAADHGFTVVAYNRTVSKVDHFLANEAKGKSIIGAHSVEELCRNLKRPRRIILLVKAGDAVDAFIQQLLPFLEKGDIIIDGGNSHFPDSNRRYDELKEKGIYFVGSGVSGGEEGARYGPSLMPGGAEEAWPHIKDIFQSISAKSDGEPCCDWVGPAGSGHYVKMVHNGIEYGDMQLITEAYDIMKRIGGFTDKEIGEVFSQWNKGVLDSFLVEITRDILLYDDVDGTPLVEKILDSAGQKGTGKWTAINALDLGMPVTLIGEAVFARCLSSLKDERVRASKLLPGPQIPKDAVKERQQFVDDLEQALYASKIISYAQGFMLIREAGKTYGWKLNNPAIALMWRGGCIIRSVFLGEITKAYRENPELENLLFNKFFADAVEKAQSGWRKTIGLAVSYGIPTPAFSTALSFYDGYRSERLPANLLQAQRDYFGAHTFRVLPEAASENLPADQNIHINWTGKGGNVSASSYQA

SEQ ID NO: 11974 - DNA, 1470 bp, Saccharomyces castellii
  CDS (1)..(1470)
atgtccgctgattttggtttaatcggtttggccgtcatgggtcaaaacttgatcttaaatgccgcagaccacggtttcaccgtctgtgcttacaacagaactgtctccaaagtggaacatttcctagctaacgaagccaagggtaagtccattgttggtgctacttctatcgacgactttttgtctaaattgaagagaccaagaaaggttatgcttcttgttaaggctggtgctccagttgatgctctaattaacgaattggtcccacgtctagaaaagggtgatattatcatcgatggtggtaactctcatttcccagacaccaacagacgttacgaagaattgaagcaaaagggtatcttgtttgttggttccggtgtctctggtggtgaagatggtgcccgttacggtccatctttgatgccaggtggtgcagaagaagcttggccacacattaaggatattttccaatccatctccgctaaatctgatggtgaaccatgttgtgactgggtcggtccagccggtgcaggtcattacgtcaaaatggtccataacggtattgaatacggtgacatgcaattgatttgtgaagcttatgacattatgaagcgtgtcggtcatttcactgataaggaaattggtgatgtttttgaaacctggaacaagggtgtcttggattctttcctaattgaaattaccagagatatcttgaaattcaatgacgttgatggtaagccattggttgaaaagattatggataccgctggtcaaaagggtactggtaagtggaccgctattaatgctctagatttgggtattccagtcactttgattggtgaagctgtcttctctcgttgtctatctgctttgaagtctgaaagaattagagcttccaagactctattgggtccagaagttccaaaggatttgattaaggataagaagcaatttgttgacgatttggaacaagccttatacgcttccaaaattatgtcctacgctcaaggtttcatgttaatccgtgaagctggtaagacttatggttggaaactaaacaacccagctattgccttgatgtggagaggtggttgtattattagatccgtcttcttgggtgaaattaccaaggcttacagagaagatccagaactagaaaatctattattcaacaagttcttctccgatgctgtcactaaggctcaaaccggttggagaaagtccattgctttggctaccacttacggtatcccaaccccagcattctccactgctttggccttctacgatggttacagatctgaaagattaccagctaacttgctacaagctcaaagagattacttcggtgctcacactttcagagtcttgccagaatgtgcctctgacaacttgccattagacaaggatatccacattaactggaccggtcacggtggtaacgtttcttcttctacttaccaagcttaa

SEQ ID NO: 11975 - protein, 489 aa, Saccharomyces castellii
MSADFGLIGLAVMGQNLILNAADHGFTVCAYNRTVSKVEHFLANEAKGKSIVGATSIDDFLSKLKRPRKVMLLVKAGAPVDALINELVPRLEKGDIIIDGGNSHFPDTNRRYEELKQKGILFVGSGVSGGEDGARYGPSLMPGGAEEAWPHIKDIFQSISAKSDGEPCCDWVGPAGAGHYVKMVHNGIEYGDMQLICEAYDIMKRVGHFTDKEIGDVFETWNKGVLDSFLIEITRDILKFNDVDGKPLVEKIMDTAGQKGTGKWTAINALDLGIPVTLIGEAVFSRCLSALKSERIRASKTLLGPEVPKDLIKDKKQFVDDLEQALYASKIMSYAQGFMLIREAGKTYGWKLNNPAIALMWRGGCIIRSVFLGEITKAYREDPELENLLFNKFFSDAVTKAQTGWRKSIALATTYGIPTPAFSTALAFYDGYRSERLPANLLQAQRDYFGAHTFRVLPECASDNLPLDKDIHINWTGHGGNVSSSTYQA

SEQ ID NO: 11976 - DNA, 1482 bp, Saccharomyces servazzii
  CDS (1)..(1482)
atgtctcaagaagctgtcgctgacttcggtctaattggtcttgccgtcatgggccaaaatttaatcctaaacgttgctgatcacggtttcaccgtctgtgcctacaacagaaccgtctctaaagtcgacgatttcttagccaacgaagccaagggcaaatccatcgtcggcgccaagtctatcgaagaattcatcgccaaattgaaaagaccaagaaaaatcatgctattagtcaaagccggtaaaccagtagactacatcatcaacgacctattaccacatctagaaaagggtgatatcatcatcgatggtggtaactcccatttcccagacaccaacagaagatacgaagaattgaccaagaagggcattcttttcgtcggctctggtgtctccggtggtgaagacggggcccgttacggtccttccttaatgccaggtggtgccgaagaagcttggcctcacatcaaggacatcttccaatccatctctgctaaagccgacggtgaaccttgttgtgactgggtcggccctgccggggccggtcactacgtcaagatggtccacaacggtatcgaatacggtgacatgcaattgatctgtgaagcctacgatatcatgaaacgtatcggtggcttctccgacaaagaaatctcagacgtcttcgccacctggaacaagggggtcctagattccttcttaatcgaaatcaccagagatatcctagccttcaacgacaaagatggtaaaccattagtcgaaaaaatcttagacagtgctggccaaaagggtaccggtaaatggaccgccatcaacgccctagacttaggtatgcctgtcacccttatcggtgaagccgtctttgctcgttgtctatccgctttaaagagtgaaagaatcttggcctccaaacaattagccggcccaaccatcccagccgatgccatcaaggacaagaaacaattcgtcgacgaattagaacaagccttatacgcctccaagatcatgtcctacgcccaagggttcatgttgatcagagaagccgccaagacctacggttggaaattaaataacccagctatcgctttaatgtggagaggtggttgtatcatcagatctgtcttcttaggtgaaattaccaaagcttatagagaaaacccagatttagaaaacttattattgaacaaattcttctcagatgccgtcaccaaggctcaaaccggttggagaaagaccatcggtttagctaccacctacggtatcccaaccccaaccttctctaccgctttagccttctacgatggttacagatctgaaagattaccagctaacttattacaagctcaaagagattacttcggtgctcacactttcagagtcttaccagaagaagcttgtgaaactttaccagaaggtaaggatatccacatcaactggaccggtcacggtggtaacgtctcttcttccacttatgatgcttag

SEQ ID NO: 11977 - protein, 493 aa, Saccharomyces servazzii
MSQEAVADFGLIGLAVMGQNLILNVADHGFTVCAYNRTVSKVDDFLANEAKGKSIVGAKSIEEFIAKLKRPRKIMLLVKAGKPVDYIINDLLPHLEKGDIIIDGGNSHFPDTNRRYEELTKKGILFVGSGVSGGEDGARYGPSLMPGGAEEAWPHIKDIFQSISAKADGEPCCDWVGPAGAGHYVKMVHNGIEYGDMQLICEAYDIMKRIGGFSDKEISDVFATWNKGVLDSFLIEITRDILAFNDKDGKPLVEKILDSAGQKGTGKWTAINALDLGMPVTLIGEAVFARCLSALKSERILASKQLAGPTIPADAIKDKKQFVDELEQALYASKIMSYAQGFMLIREAAKTYGWKLNNPAIALMWRGGCIIRSVFLGEITKAYRENPDLENLLLNKFFSDAVTKAQTGWRKTIGLATTYGIPTPTFSTALAFYDGYRSERLPANLLQAQRDYFGAHTFRVLPEEACETLPEGKDIHINWTGHGGNVSSSTYDA

SEQ ID NO: 11978 - DNA, 1470 bp, Saccharomyces bayanus
  CDS (1)..(1470)
atgtctgctgatttcggtttgattggtttggccgtcatgggtcaaaacttgatcttaaacgctgctgatcacggtttcactgtttgtgcttacaacagaactcaatccaaggttgaccatttcttggctaacgaagccaaaggtaagtctatcattggtgctacttccattcaagatttcatttccaagttgaagagacctagaaaggtcatgcttttggttaaagccggtgctccagtcgacgccttgatcaaggaaattgttccacttttggaaaagggcgacatcatcatcgatggtggtaactcccatttcccagactctaacagacgttacgaagaattgaagaagcacggtattcttttcgtcggttccggtgtctctggtggtgaagatggtgcccgttatggtccatctttgatgccaggtggttctgaagaagcttggccacacatcaagaacatcttccaatctatctccgcaaagtctgatggtgaaccatgttgtgaatgggtcggcccagctggtgccggtcactacgtcaaaatggtccacaacggtatcgaatatggtgacatgcaattgatttgtgaagcttacgatatcatgaagagattgggtggattcactgacaaagaaatcagtgaagttttcaccacatggaacaagggtgtccttgactctttcttgattgaaattaccagagatatcttgaaattcgacgatgtcgacggtaagccattggtggaaaaaatcatggatactgccggccaaaagggtaccggtaagtggactgccatcaacgccttggacttgggtatgccagtcaccttgatcggtgaagctgtctttgctcgttgtctatctgccttgaagaatgaaagagtcagagcttctaaggttttgccaggcccacaagttccaaaggacgccgtcaaggacagaaagcaatttgtcgatgatttggaacaagctttgtacgcttctaagatcatctcctacgctcaaggtttcatgttgatccgtgaagccgctgccacatacggatggaaactaaacaaccctgctattgctttgatgtggagaggtggttgtatcattagatctgttttcttggccgaaatcaccaaggcttatagacaagaaccagacctagaaaacttgttgttcaacaagttcttcgccgatgctgttaccaaggctcaatctggttggagaaaatccattgcattggctaccacatacggtatcccaaccccagccttttccactgctttgaccttctacgacgggtacagatctgaaagattaccagccaacttactacaagctcaacgtgattacttcggtgctcacactttcagagtcttgccagaatgtgcatccgaaaacttgccagaagacaaggatattcatatcaactggaccggtcatggtggtaacgtttcttcctcaacataccaagcttaa

SEQ ID NO: 11979 - protein, 489 aa, Saccharomyces bayanus
MSADFGLIGLAVMGQNLILNAADHGFTVCAYNRTQSKVDHFLANEAKGKSIIGATSIQDFISKLKRPRKVMLLVKAGAPVDALIKEIVPLLEKGDIIIDGGNSHFPDSNRRYEELKKHGILFVGSGVSGGEDGARYGPSLMPGGSEEAWPHIKNIFQSISAKSDGEPCCEWVGPAGAGHYVKMVHNGIEYGDMQLICEAYDIMKRLGGFTDKEISEVFTTWNKGVLDSFLIEITRDILKFDDVDGKPLVEKIMDTAGQKGTGKWTAINALDLGMPVTLIGEAVFARCLSALKNERVRASKVLPGPQVPKDAVKDRKQFVDDLEQALYASKIISYAQGFMLIREAAATYGWKLNNPAIALMWRGGCIIRSVFLAEITKAYRQEPDLENLLFNKFFADAVTKAQSGWRKSIALATTYGIPTPAFSTALTFYDGYRSERLPANLLQAQRDYFGAHTFRVLPECASENLPEDKDIHINWTGHGGNVSSSTYQA

SEQ ID NO: 11980 - DNA, 1449 bp, Vibrio parahaemolyticus
  CDS (1)..(1449)
atgaaaggtgatatcggtgtaattggcctagcagtaatgggtcaaaaccttatcctaaacatgaacgaccacggttttaaagtggtagctcacaaccgtactgctgccaaagtagacgagtttctggaaggaccagcgaaaggcacgaacatcatcggtgcatactctctagaagaactagtagagaagctagaaacgccacgtaaagtgatgctaatggttcgcgcaggtgacgttgtcgataaattcatcgacgctctagtccctctactagacaaaggcgacatcatcatcgacggtggtaacacgaactacccagatacaaaccgtcgcgttgcagcactacgtgaaaaaggcatccacttcatcggtactggcgtatctggtggcgaagaaggtgcccgttttggcccatctatcatgcctggcggcgctccagaagcttgggaagcggttaagcctatcttccaaggtatttctgcgaaaactgacgcaggcgagccatgttgtgattgggttggtaacgatggtgcaggtcacttcgtgaagatggttcacaacggcatcgagtacggcgacatgcagctgatcactgaagcttaccagttcatgaaagacggtcttggtatgtctgcagatgaaatgcaagcggtattcgctgagtggaacaacactgagctaaatagctacctagttgaaatcaccgctgacatccttggctacaaagacgaagatggtgaacctctagttgaaaaaatcctagacactgctggccaaaaaggtacaggtaaatggacgggtatcaacgcactagacctaggtattccactaacgcttatctctgagtcagtattctctcgttgcctatctgcactaaaagatcaacgtgttgaagctgagaaactgttcggtaagaccatcacgccagtagaaggtgacaagcaagagtgggttgacgcactacgtcaagcgcttctagcgtctaagatcatctcttacgctcaaggctttatgctaatgcgcgaagcatcaaacgagaatggctgggatctaaactacggtaacgttgctcttatgtggcgtggtggttgtatcatccgttctgcgttcctaggcaacatccgtgatgcatatgaagcaaacccagaactagcattcctaggctctgatgattacttcaaaggtatcctacaaagcagcctagtagcatggcgtaaagttgcagctaagtctctggaagcaggcatcccaatgccatgtacgacttctgcactaacgttcctagacggctacacaacagctcgtctacctgcgaacctactgcaagctcaacgtgactacttcggtgctcacacttacgagcgtatcgaccgtgagcgtggtgaattcttccacactaactggacgggtacaggcggtaacacagcgtctacaacttacgacgtgtaa

SEQ ID NO: 11981 - protein, 482 aa, Vibrio parahaemolyticus
MKGDIGVIGLAVMGQNLILNMNDHGFKVVAHNRTAAKVDEFLEGPAKGTNIIGAYSLEELVEKLETPRKVMLMVRAGDVVDKFIDALVPLLDKGDIIIDGGNTNYPDTNRRVAALREKGIHFIGTGVSGGEEGARFGPSIMPGGAPEAWEAVKPIFQGISAKTDAGEPCCDWVGNDGAGHFVKMVHNGIEYGDMQLITEAYQFMKDGLGMSADEMQAVFAEWNNTELNSYLVEITADILGYKDEDGEPLVEKILDTAGQKGTGKWTGINALDLGIPLTLISESVFSRCLSALKDQRVEAEKLFGKTITPVEGDKQEWVDALRQALLASKIISYAQGFMLMREASNENGWDLNYGNVALMWRGGCIIRSAFLGNIRDAYEANPELAFLGSDDYFKGILQSSLVAWRKVAAKSLEAGIPMPCTTSALTFLDGYTTARLPANLLQAQRDYFGAHTYERIDRERGEFFHTNWTGTGGNTASTTYDV

SEQ ID NO: 11982 - DNA, 975 bp, Pseudomonas syringae
  CDS (1)..(975)
atgcaacttgggattattggactgggccgcatgggcggcaacattgcacggcgactgatgctggatggtcacactacagtggtgtatgaccgcgatgaggcatcacgcggcgccttggccaatgagggctctactgccgtcgctgatctggcggaactggtgagtgcactggaaaagccccgtgcagtctgggtcatgctcccggcaggcgctccgaccgaagacaccattcagaccctcagtcagttgcttgaagccgacgacgtgatcatcgatggcggtaacaccttctacaaggacgacattcgtcgtgcgcaggaactgagcgaaaaaggcctgcactatgtcgatgtcggcacgtccggtggcgtctggggccttgaacgcggctactgcatgatgatcggtggcgacgtggcggcagtcgagcgtcttgatccgctgttcgcgtccctcgcacccggccttggttcgatcgagcgcactcgcggtcgtacctcgaccgacgaccgcgcagagcgtggctacatccactcaggccctgcaggttcggggcatttcgtgaagatgatccacaacggcatcgagtacggaatgatgcaggccttcgccgaaggcttcgacctgctcaagcagaaaaactccgagcatctgccggccgagcagcgtttcgacctcaacactgcagacattgccgaggtctggcgtcgtggcagtgtggtttcatcctggctgctcgacctgaccgccgatgccctggcgactgacccgcaactcgacgctttttccggctcggtcgccgacagtggtgaaggacgctggaccatcgaggcggcgatcgagcaggccgtaccggttccggtgctctccagcgccttgttcgcgcgcttccgctcccgtcagacaagctcgtatgcagacaagatgctgtctgccatgcgctttggatttggtggccacaaggaacccaagtaa

SEQ ID NO: 11983 - protein, 324 aa, Pseudomonas syringae
MQLGIIGLGRMGGNIARRLMLDGHTTVVYDRDEASRGALANEGSTAVADLAELVSALEKPRAVWVMLPAGAPTEDTIQTLSQLLEADDVIIDGGNTFYKDDIRRAQELSEKGLHYVDVGTSGGVWGLERGYCMMIGGDVAAVERLDPLFASLAPGLGSIERTRGRTSTDDRAERGYIHSGPAGSGHFVKMIHNGIEYGMMQAFAEGFDLLKQKNSEHLPAEQRFDLNTADIAEVWRRGSVVSSWLLDLTADALATDPQLDAFSGSVADSGEGRWTIEAAIEQAVPVPVLSSALFARFRSRQTSSYADKMLSAMRFGFGGHKEPK

SEQ ID NO: 11984 - DNA, 984 bp, Pseudomonas putida
  CDS (1)..(984)
atgcaactgggaatcatcgggctgggccgtatgggcggcaatatcgcaaggcgcctgatgcgcgccggtcaccgcaccgtggtgcacgaccgcaaccgtgatgccatcaccggcctggagggcgaaggcgcccagggtgcgcatgacctcggtgcactggtacaaaagctgaaagcgccgcgcgcggtatgggtgatgctgccggctggtgacgccaccgagcagaccatcgcccagctggccgaaatgctggagccgggcgatgcgatcatcgacggcggcaacaccttctacaaggacgacatgcgccgcgctgcagaactggccaagcgcggcctgcattatctggacgtcgggacttccggcggcgtgtggggcctggaccgcggctactgcatgatgatcggcggcgaaaaggacgtgttcgagcgcctggaaccgctgttcaaggcgctggcgccgggcgtgggcgacatcccgcgtacccatggccgcagcggcgagcaccagcgtgccgagcacggctacatccatgccggtccaccgggcgccgggcactacgtgaaaatggtgcataacggcatcgagtacggcctgatgcaggcctatgccgaaggcttcgacctgctgcgcagcaaaggcggcaacgagttgcccgaagaccagcgcttcgacctgaacgtagccgaaattgccgaagtgtggcgacgcggcagcgtggtgacctcgtggctgctcgaccttaccgccgatgcgctggtggccgaccctcagctgtcgcaattcagtggctcggtgtccgacagtggcgaaggccgctggaccatcgacgccgccgtcgagcaggcggtgccggtgccggtgttgtccagcgcactgttcgcgcgcttccgttcgcgccagcaacagggcacctacggtgacaagatcctctcggccatgcgcctgggcttcggtggccacgtcgagaagaaaggcgaatga

SEQ ID NO: 11985 - protein, 327 aa, Pseudomonas putida
MQLGIIGLGRMGGNIARRLMRAGHRTVVHDRNRDAITGLEGEGAQGAHDLGALVQKLKAPRAVWVMLPAGDATEQTIAQLAEMLEPGDAIIDGGNTFYKDDMRRAAELAKRGLHYLDVGTSGGVWGLDRGYCMMIGGEKDVFERLEPLFKALAPGVGDIPRTHGRSGEHQRAEHGYIHAGPPGAGHYVKMVHNGIEYGLMQAYAEGFDLLRSKGGNELPEDQRFDLNVAEIAEVWRRGSVVTSWLLDLTADALVADPQLSQFSGSVSDSGEGRWTIDAAVEQAVPVPVLSSALFARFRSRQQQGTYGDKILSAMRLGFGGHVEKKGE

SEQ ID NO: 11986 - DNA, 1437 bp, Lactobacillus plantarum
  CDS (1)..(1437)
atgagtaatgaaaaaccacaaattggtgtcattgggatggccgtcatgggtaagaacctggcgttgaacatcgaaagccgcggctacaaggttgcgatttttaatcggactggtgccaaaactgaaaaggtcgttaaggaccatgctgacaagcaattagtaccaagttataagatcgaagacttcgtggcttcacttgaaacgccacgacggattatcatgatggttaaggctggtaagccaaccgatgccgttatcgatgaattattaccactattagataaaggcgacgtcttgattgatggtgggaacaccaactttaatgacacgatggcacgtaacgcccgcttagataaatccggaatcaactttattggtatgggtgtttccggtggtgaattaggtgccttacaaggtccttcattgatgcctggtggtcaaaaggaagcttatgatttagttgccccaatcttggaaaagatttctgctaaagcgcctcaagacggtgcaccatgtgtgacttacatcggcccgaacggtgctggtcactacgttaagatggtccacaacgggattgaatacggtgatgaagagttaatcgatgaatcatacaatatcatgcgcaacgtcgcgggcttgtccgttgatgaaatgtccgatatttttacggactggaacaaaggcgaattgagcagttacttgatcgaaatcaccgctgacattttgtcacgtaaggatgatttaggtgcggataagactaagccaatcgttgacatgatcttagaccgtgggaacaacaaaggaactggtaagtggagttccgaagatgccttgaacgttcaagtgccacaatccgttattacggaagcggtctatgcgcgttacatctcaatgatgaagaacgaacgggttgccgcttctaagaaattagctggcccaaccgctgacgttgacttgccagccaaggaagaattggttgagaagattcgtcaagccctctacttcagtaagattatgagttatgcgcaaggcttcgaacaacttcgtttcgcttctgaacattatggttgggacttgaagttcggtgaacttgcccaaatctggcgtgctggttgtatcatccgggcccaattcttacaaaacatcacggatgcttttgataagaagcctgatttaaataacttattgatggacgactactttgccgacatcgccgccaagtatcaacaatcaacacgtgaagtgcttagcttagcaatccaagctggtgtaccggtaccatcatttagtgcggcattgtcatactacgactcataccgggccgaagtgttacctgctaacttgttgcaagcgcaacgggactactttggtgcgcatacgtatgaacggactgaccgtgaagggttataccattacagttggtacgaagaacaataa

SEQ ID NO: 11987 - protein, 478 aa, Lactobacillus plantarum
MSNEKPQIGVIGMAVMGKNLALNIESRGYKVAIFNRTGAKTEKVVKDHADKQLVPSYKIEDFVASLETPRRIIMMVKAGKPTDAVIDELLPLLDKGDVLIDGGNTNFNDTMARNARLDKSGINFIGMGVSGGELGALQGPSLMPGGQKEAYDLVAPILEKISAKAPQDGAPCVTYIGPNGAGHYVKMVHNGIEYGDEELIDESYNIMRNVAGLSVDEMSDIFTDWNKGELSSYLIEITADILSRKDDLGADKTKPIVDMILDRGNNKGTGKWSSEDALNVQVPQSVITEAVYARYISMMKNERVAASKKLAGPTADVDLPAKEELVEKIRQALYFSKIMSYAQGFEQLRFASEHYGWDLKFGELAQIWRAGCIIRAQFLQNITDAFDKKPDLNNLLMDDYFADIAAKYQQSTREVLSLAIQAGVPVPSFSAALSYYDSYRAEVLPANLLQAQRDYFGAHTYERTDREGLYHYSWYEEQ

SEQ ID NO: 11988 - DNA, 897 bp, Lactobacillus plantarum
  CDS (1)..(897)
atgaaattaggattgattggcttaggtaaaatgggaatgaacttagcgttgaacatgcaggataacgggcacacgccagtgggaatggatcttaaccccactaatcttagtaccgccagtgctcacgggttggcgacggccacggatctcaccaatttgcttgaccagttgccaacaccacggatcgtgtggatcatggtacccgctggtaaggcaaccaacagcgttatcgaacagttagcccagactttaagtgcaggtgacatcgtcctcgatggcggtaattcgcactatcaagatagtatccgccacggcgaattactggcaagtcaccacatcaacttcttagacgtcgggacgtcgggcggtcaagctggtgcacgccacgacggcaattttatgattggtggcgacctcgccactttccaagtcgtcgaaccactatttaaagcgattgccgctcccgatgggtatttgtacaccggccctgttggcagtggtcattacctgaagatggtccacaacggaattgagtatggtatgatggcagcaataggtgaaggctttgacgttttacagcatagtcagttcacttacgacaacgcggccgtcgccaaaatgtggaataacggctcagtcattcgcagctggttaatgggcttagctcaagatgcattcagcaaggatggtaatctagatgacatcaagggtgttatgcattcatccggtgaaggtcgctggaccttagacacggccctagaccaacaagtcgccaccccggtcattgcgatggccttgatgatgcgctaccgttcagaaaccgatgacacattcactggtaaagttgttgccgccctacgtaacgagtttggtggccacgctgtcgatcacgaatag

SEQ ID NO: 11989 - protein, 298 aa, Lactobacillus plantarum
MKLGLIGLGKMGMNLALNMQDNGHTPVGMDLNPTNLSTASAHGLATATDLTNLLDQLPTPRIVWIMVPAGKATNSVIEQLAQTLSAGDIVLDGGNSHYQDSIRHGELLASHHINFLDVGTSGGQAGARHDGNFMIGGDLATFQVVEPLFKAIAAPDGYLYTGPVGSGHYLKMVHNGIEYGMMAAIGEGFDVLQHSQFTYDNAAVAKMWNNGSVIRSWLMGLAQDAFSKDGNLDDIKGVMHSSGEGRWTLDTALDQQVATPVIAMALMMRYRSETDDTFTGKVVAALRNEFGGHAVDHE

SEQ ID NO: 11990 - DNA, 1422 bp, Clostridium tetani
  CDS (1)..(1422)
atgaataaacaggatattggattaattggtttatctgtaatgggaagtaatttagcattaaatatggcagataaggggtataaagttgctatatttaatcgtaccactacagtaatagatgaagtattagaaaaatataagcattctaacttatttgggaaatatagtttaaaacaattgatggactcccttgaaagaccaagaaaaattataatgatgattaaatcaggggagcctgtagatatgcttattgaacaaatattaccttatttggatgaggaagatattttaattgatggcggaaattcttattttaaggatactcaaagaagaagtaaatatttaaaagaaaaaggaataaaatttttaggtgttggaatttcaggaggggaagaaggtgcaagatttggtcctgctataatgccgggaggagattttggctcttatgaaaaagtaaaatgtatttttgaagatattgcagcaaaggtaaatggtgaaccctgttgcaattatgtaggagaaaatggagctggacattatgttaagatggtgcataatggtatagaatatgctgatatgcagttaattagtgaagcttatatgctattaaaacatttaggaaagtttaataataaagaattacatggaatttttgcaaaatggaatgaaggggaattagaaagttatttaattaaaattacttctaatatatttacagtaaaggatagagaaactaataattatcttttggatatgattttagataaggcatctcaaaagggaactggaaagtggactaatatggaagcaatagatttaggggtagatgtatccattataacaagtgctttaaatggtagatttatgtccaatttaaaagaagaaagattaagagcaagtaaaatcttaaatggtaaagtagaaagttctattaatatagaaaaagaagaatttgcagaacttgtaagacgtagtttatatttaagcaagatagcatgctatgcacaaggatttcaattattaaaagttgcttcaaagacttataactgggatttacaatatggaaatattgcaaggatttttagaggtggatgtattattcaagctagatttttaaaggatataattagtgcctatgaagaaaataataatgcttgcaatctaatgattacaaaggttttttcaaaggttataaatgaatatgataagagtttgagaaagactatatccattgcaattaatcagggaattcctgtaactgctatgagtagtgccctaggatatatggacacatatagaagttacaatttaggtgcaaatttaatacaggctcaaagggactattttggagcacatacttttcaacgcatagataaagaaggaaattttcattatgattgggtgaataactatgaaaaataa

SEQ ID NO: 11991 - protein, 473 aa, Clostridium tetani
MNKQDIGLIGLSVMGSNLALNMADKGYKVAIFNRTTTVIDEVLEKYKHSNLFGKYSLKQLMDSLERPRKIIMMIKSGEPVDMLIEQILPYLDEEDILIDGGNSYFKDTQRRSKYLKEKGIKFLGVGISGGEEGARFGPAIMPGGDFGSYEKVKCIFEDIAAKVNGEPCCNYVGENGAGHYVKMVHNGIEYADMQLISEAYMLLKHLGKFNNKELHGIFAKWNEGELESYLIKITSNIFTVKDRETNNYLLDMILDKASQKGTGKWTNMEAIDLGVDVSIITSALNGRFMSNLKEERLRASKILNGKVESSINIEKEEFAELVRRSLYLSKIACYAQGFQLLKVASKTYNWDLQYGNIARIFRGGCIIQARFLKDIISAYEENNNACNLMITKVFSKVINEYDKSLRKTISIAINQGIPVTAMSSALGYMDTYRSYNLGANLIQAQRDYFGAHTFQRIDKEGNFHYDWVNNYEK

SEQ ID NO: 11992 - DNA, 999 bp, Bradyrhizobium japonicum
  CDS (1)..(999)
atgcaactcggcatgatcggcctcggccggatgggcggcaacatcgttcgccggctgatgcgccacggccattcgaccgtggtctatgacaaggacgccaaggccgtcgccggccttgccgcagacggcgcggtaggctcggcgacgctggaggagttcgtcgcaaagctggagcggccgcgcacggcctgggtgatgctgcctgcgggacgcatcaccgagacgacgatcgacacgatcgcgggcgtgatgcaggaaggcgacgtcatcatcgacggcggcaacaccttctggcaggacgacgtccgccgcggcaaggcgctgaaggcacgcggcatccactatgtcgacgttggcacctccggcggcgtctggggtctcgaccgcggctattgcatgatgatcggcggcgagaaacaggtggtcgaccggctcgatccgatcttcgccgcgctcgcgcccggcgccggcgacattccgcgcacggaaggacgtgaggggcgcgatccccgcatcgagcagggctatatccacgccggccccgtcggcgccggccacttcgtcaagatgatccacaacggcatcgaatacggcctgatgcaggcctatgccgaagggttcgacatcctcaagaacgccaacatcgatgccttgccggcggaccatcgctacgatttcgatctcgccgacatcgcagaagtctggcggcgcggcagcgtgatcccgtcctggctgctcgatctcacctcgacggcgctcgccgacagcccggcattggcggaatattccggcttcgtcgaagattccggcgaaggccgctggaccgtgaatgcggcgatcgacgaagcggtgccggccgaagttctgaccgcggcgctctacacacgtttccgttcccgcaaggaacacaccttcgccgaaaaaattctctccgcgatgcgcgcgggtttcggcggccacaaggagccgaagcagccgggcgcttcgaagcccaaataa

SEQ ID NO: 11993 - protein, 332 aa, Bradyrhizobium japonicum
MQLGMIGLGRMGGNIVRRLMRHGHSTVVYDKDAKAVAGLAADGAVGSATLEEFVAKLERPRTAWVMLPAGRITETTIDTIAGVMQEGDVIIDGGNTFWQDDVRRGKALKARGIHYVDVGTSGGVWGLDRGYCMMIGGEKQVVDRLDPIFAALAPGAGDIPRTEGREGRDPRIEQGYIHAGPVGAGHFVKMIHNGIEYGLMQAYAEGFDILKNANIDALPADHRYDFDLADIAEVWRRGSVIPSWLLDLTSTALADSPALAEYSGFVEDSGEGRWTVNAAIDEAVPAEVLTAALYTRFRSRKEHTFAEKILSAMRAGFGGHKEPKQPGASKPK

SEQ ID NO: 11994 - DNA, 1476 bp, Bacteroides thetaiotaomicron
  CDS (1)..(1476)
atggcaaatcagaataaaacagatatcgggttgatcggtctggcagtgatgggtgagaaccttgctttgaatatggaaagcaagggctggcacgtctctgtttacaatcgtaccgtccccggagtggaagaaggagtagtagaccgcttcatgaatggtcgtgcaaaaggtaaaaacattgaaggttttacagatataaaggcttttgtggaatcaatcgccacccctcgcaagattatgatgatggtacgtgccggcagtccggtagacgaactgatggatcagcttttccctttgctttctcccggagatattctgattgacggtggtaattctaattacgaagataccaatcgccgtgtaaaattagcagaatcgaaaggcttcttgtttgtaggaagcggagtgtcgggcggtgaggaaggtgcgttgaacggtgcttccatcatgcccggaggatcggagaaagcgtggccggaagtgaagcctgtcttgcagagcatcgcggcgaaagcgccggacggaactccctgttgccagtgggtaggccctgccggatcgggacattttgtgaagatgattcacaatggtatcgaatacggtgatatgcagttgatcgccgaggcttactgggtgatgaagaatctcattgatctgacgaatgaggagatggcggacgtttttgcccgttggaatgaagggaagttgcgcagttatctgattgagattacttctaatattttgcgtcacaaggataaatccggtgggtatctgatcgataagattctcgatgctgccggacagaaggggacgggaaagtggtctgtcatcaatgcgatggagttggggatgccgttgggcttgattgccacggcggtgttcgaacgcagtctgtcggctcagaaggagttgcgtcatctggcttccaagcagttcttgtgcaagcatacattacctatatataataaggcggaattggtgaaggagatattttctgcgctttacgcttccaagctggtgtcgtatgcgcagggttttgctgtgttgcagcgggcttctgattctttcggatggaatctggatttggcttccattgcccgtatgtggcgtgggggatgtatcatccgcagtattttcctgaatgatatagctgctgcttttgaggcggcggataagccgaagcatttgttgctggctccttacttccgtgaggagatcaagtctttgctccccggatggaagaatctggtggcggaggcgatgaaggaggaattgcctgttccggctttctcttcggctttgaattatttttattcgctgacttctgacaatttacctgccaatctggtgcaggcgcaacgagattatttcggtgcgcatacgtttgagaggaaggatgagctgcgcggacagttctttcatgagaattggacggggcacggaggggagacgaagtcggggacttataatgtatga

SEQ ID NO: 11995 - protein, 491 aa, Bacteroides thetaiotaomicron
MANQNKTDIGLIGLAVMGENLALNMESKGWHVSVYNRTVPGVEEGVVDRFMNGRAKGKNIEGFTDIKAFVESIATPRKIMMMVRAGSPVDELMDQLFPLLSPGDILIDGGNSNYEDTNRRVKLAESKGFLFVGSGVSGGEEGALNGASIMPGGSEKAWPEVKPVLQSIAAKAPDGTPCCQWVGPAGSGHFVKMIHNGIEYGDMQLIAEAYWVMKNLIDLTNEEMADVFARWNEGKLRSYLIEITSNILRHKDKSGGYLIDKILDAAGQKGTGKWSVINAMELGMPLGLIATAVFERSLSAQKELRHLASKQFLCKHTLPIYNKAELVKEIFSALYASKLVSYAQGFAVLQRASDSFGWNLDLASIARMWRGGCIIRSIFLNDIAAAFEAADKPKHLLLAPYFREEIKSLLPGWKNLVAEAMKEELPVPAFSSALNYFYSLTSDNLPANLVQAQRDYFGAHTFERKDELRGQFFHENWTGHGGETKSGTYNV

SEQ ID NO: 11996 - DNA, 1398 bp, Oceanobacillus iheyensis
  CDS (1)..(1398)
atgaattctattggagtatttggactaggtgtgatgggtgcaaatcttgcgatgaacatggcaaataaaggagaaaaagttgccgtttataactatacatctgacctaacagaaaaatttaaatccaattttacaagtgataatgcagaggcacattatgacttagagcgttttgtaaattcattagaaaaaccaagaaaagtatttttaatggtaacagcaggtcccgttattgattcggttattgattccttagtacctctactagataaagatgacattatgatggacggaggaaattctaattttaatgattcgaaccgtcgttatcatcgcttaaaagaagctggtatacattttgtcagtgtaggtgtttctggtggagaagaaggagcgcttcatggaccagcacttatgccgagtggtgatgaaaaagtatatcaagaagttgcacctatcttagaaaaaatagcagcacaagttgatggtaaagcatgttgtggttatttaggtaaagaaggttctggacattatgtgaaaatggtgcataacggcattgaatatgctgatatgcagctgatcacagaggcttatcagttcttgcgtgaaagactgggtctatcagttgaagaaatcgcaactacatttcgtgagtggaatgaaggagaactagaaagctatttaatggaaataacgagtgatattttaacgcatgtcgatgaagaaacgaataagccaatggttgatgttattttagataaatccggtcaaaaaggtactgggaaatggacaagccaaaatgcattggatgtaggtgttccgttatctattattacagaatcagtatttgcacgattcttatcgggcttaaaagaagaacgtgtacgggcggatcaaatgttgtcaggtccaacgaaactagaccaagacctcgataagcaagcgtggttagaacttgtgagaaaagcactgtttatgggcaaaatatgtgcgtatgcacaagggtttcaccaatataagcaagcatctgaagcctatggttgggatttaaaactagaagaaattgcgttgatatttagaggtggatgcattatccgagctggtattctgaatgaaattagtgatgcatttaaagcagataaacaactaccgaacttattgctatcgccattcttccaagagaagatgaatgactatcaagcttcattacgtaaagttgttataaaagggatggaaagtggactttccttaccaagtttaggagcatctttaacttactatgatgggtaccgctcttctcaaagtggcgccaatatgattcaagcacagcgggactattttggtgcacatacgtatgagcgagtggataaaaaaggaactttccatacagcgtggtaa

SEQ ID NO: 11997 - protein, 465 aa, Oceanobacillus iheyensis
MNSIGVFGLGVMGANLAMNMANKGEKVAVYNYTSDLTEKFKSNFTSDNAEAHYDLERFVNSLEKPRKVFLMVTAGPVIDSVIDSLVPLLDKDDIMMDGGNSNFNDSNRRYHRLKEAGIHFVSVGVSGGEEGALHGPALMPSGDEKVYQEVAPILEKIAAQVDGKACCGYLGKEGSGHYVKMVHNGIEYADMQLITEAYQFLRERLGLSVEEIATTFREWNEGELESYLMEITSDILTHVDEETNKPMVDVILDKSGQKGTGKWTSQNALDVGVPLSIITESVFARFLSGLKEERVRADQMLSGPTKLDQDLDKQAWLELVRKALFMGKICAYAQGFHQYKQASEAYGWDLKLEEIALIFRGGCIIRAGILNEISDAFKADKQLPNLLLSPFFQEKMNDYQASLRKVVIKGMESGLSLPSLGASLTYYDGYRSSQSGANMIQAQRDYFGAHTYERVDKKGTFHTAW

SEQ ID NO: 11998 - DNA, 1407 bp, Oceanobacillus iheyensis
  CDS (1)..(1407)
atgaaacaacaaattggtgttatcggcttagccgttatgggaaaaaatatcgcacttaacatggaaagcaaaggcttttctgtagctgtttttaatcgttcttacgagaagacagagaacttcttagcgaatgaagcaagcgggaaaaaatttattggtgcaaaaacaattgaagaatttgtggattcattggaaaaaccacgtaagatcatgttgatggtaaaagctggtccagcaacggatgctacgattgaatcattgaaaccacatcttgataaaggcgatattcttatcgacggtggaaatacattatatgaagatacgattcgtcgtaataaagaattagatgagtctggaattcatttcattgggacaggtgtttctggtggcgaagagggagctttaaatggtccttctattatgccaggtggacaagcagaagcgtataaattagttgctcctatttttgaagcgatatctgcaaaagtagataaagatccatgtgtaacctatattgggccaaatggcgcggggcactttgtgaaaatggttcataatggaattgaatatggagatatgcaattaatcgcagaagcatatgatttaatgaaaaatgttctaggacttgatgcaaaagagcttcacaacgtattcaaggaatggaatgatggagaattagacagttatctgattgaaataactgcagatatcttcactaaagtggatgaagagactgggaagcctctagtggaggtaattctagataaagcaggtcaaaaagggactggaaaatggacgagtaaaaatgcacttgatttaggagtaccgcttccattaattacagagtctgtgtttgcacgctttatttcatccttaaaagatgagcgtgttcgtgcaagcaaagaattgagtggaccaacgaatgcaatgctaggtgaaagtaaagaggagcttatcgaagcaatccgtcaagcactttatatgagtaagatcgtatcttatgcgcaagggtttgctcaaatgcgagcagcttctgatgagtacgattggaatttaagttatggtgacatcgcaatgatttggcgtggcggatgtatcattcgtgcgaagttcctacaaaagatcaaagatgcctatgacagagattctcaattaccgaacttaatgctcgacccttacttcaaggaaattgtagaaggctaccagtcttcattacgaaaagttgtatctctagcggttgcacatggtattgcagttccaacgttctcaagtgcaattgcatactatgatagctatcgttcagaagatttaccagcaaatcttattcaagcacaacgtgactactttggtgcacacacgtatgagcgaaaagataaagacggcatattccactctcagtggttttaa

SEQ ID NO: 11999 - protein, 468 aa, Oceanobacillus iheyensis
MKQQIGVIGLAVMGKNIALNMESKGFSVAVFNRSYEKTENFLANEASGKKFIGAKTIEEFVDSLEKPRKIMLMVKAGPATDATIESLKPHLDKGDILIDGGNTLYEDTIRRNKELDESGIHFIGTGVSGGEEGALNGPSIMPGGQAEAYKLVAPIFEAISAKVDKDPCVTYIGPNGAGHFVKMVHNGIEYGDMQLIAEAYDLMKNVLGLDAKELHNVFKEWNDGELDSYLIEITADIFTKVDEETGKPLVEVILDKAGQKGTGKWTSKNALDLGVPLPLITESVFARFISSLKDERVRASKELSGPTNAMLGESKEELIEAIRQALYMSKIVSYAQGFAQMRAASDEYDWNLSYGDIAMIWRGGCIIRAKFLQKIKDAYDRDSQLPNLMLDPYFKEIVEGYQSSLRKVVSLAVAHGIAVPTFSSAIAYYDSYRSEDLPANLIQAQRDYFGAHTYERKDKDGIFHSQWF

SEQ ID NO: 12000 - DNA, 1443 bp, Synechococcus elongatus
  CDS (1)..(1443)
atgtcacagcaagatttcggcgtcattggcctcgccgtcatgggggaaaaccttgccctcaacgtagagcgaaatggattttccgtggcggtttataatcgcacacctgcccgcaccgaagcgttcatggccgaacgagccgcaggccgtcgcttcaaggccacctatactcttgaggaattggttgcctccctgtcacgtcctcgccgcattttggcaatggtcaaagcagggcaacctgtggatgatctgatccagcagctcaagcccctccttgaacccggtgatatcctcattgatgggggcaactccctctataccgatacggaacgccgcgttgccgaaatggagtcagcaggactttgcttctttggtatgggggtcagcggtggtgaagaaggtgcccttaatggcccaagtctgatgccgggcggtagtcgtgaagcctaccaagccctcgaacccattctcaccaaaattgcagcacaagtggatgatggcccctgtgtcacctacattggaccggggggctcggggcactttgttaagatggtgcacaacggtattgagtatggcgatatgcaactcattgccgaggcctatgacctcctaaaaaacctccttggtctcaatcaccagcaactccatgaagtcttcaagagctggaatgaaacccccgaactcaactcatttttgattgaaattactagccagattttcacctatattgacccagaaacccatctgcccctggtggatgtcattgtggatgcggcaggtcaaaagggaactggtcgctggacggtggaaagtgctcttgagatgggggtggcgattccaacaattaccgctgccgtgaatgctcgcataatgtcctccatcaaagccgaacggatggcggctgcccaagtgctccctggtcctgcggctcactttagcggcaataccgaagaattcattggcaaaattcgcgatgccctctactgctcgaaaatctgctcctatgctcaaggcatggccctgattgccaaaggctcccaagagctctttgatcaccaactgaacctgagtgagattgcccgcatctggaaagggggctgcattattcgggctggcttcctcaataagatcaagcaggcctacagcgaaaatcctcaattggccaatttgctgctggcgccggagtttcgccagaccatcctggataagcaggcggcgtggcgggaggttttggtggaagcgacccgtgcaggaattgctgtacccgcctttggtgcctccctagaatacttcgatagctatcggcgcgatcgcctaccgcagaatctcacccaagcgcagcgggacttctttggtgcccacacctatgagcgaatcgacaaaccgggaaccttccatacggagtgggtaccgattcaggaggcgggcaaagcctctgtttga

SEQ ID NO: 12001 - protein, 480 aa, Synechococcus elongatus
MSQQDFGVIGLAVMGENLALNVERNGFSVAVYNRTPARTEAFMAERAAGRRFKATYTLEELVASLSRPRRILAMVKAGQPVDDLIQQLKPLLEPGDILIDGGNSLYTDTERRVAEMESAGLCFFGMGVSGGEEGALNGPSLMPGGSREAYQALEPILTKIAAQVDDGPCVTYIGPGGSGHFVKMVHNGIEYGDMQLIAEAYDLLKNLLGLNHQQLHEVFKSWNETPELNSFLIEITSQIFTYIDPETHLPLVDVIVDAAGQKGTGRWTVESALEMGVAIPTITAAVNARIMSSIKAERMAAAQVLPGPAAHFSGNTEEFIGKIRDALYCSKICSYAQGMALIAKGSQELFDHQLNLSEIARIWKGGCIIRAGFLNKIKQAYSENPQLANLLLAPEFRQTILDKQAAWREVLVEATRAGIAVPAFGASLEYFDSYRRDRLPQNLTQAQRDFFGAHTYERIDKPGTFHTEWVPIQEAGKASV

SEQ ID NO: 12002 - DNA, 1527 bp, Shewanella oneidensis
  CDS (1)..(1527)
atgcaaaaccacagcaatcttaatgacattggcgtgattggacttggtgtgatgggtaaaaacctcgcgctaaacatcgccgacaatcaatatcgcgtcagtgtcttcgatctcgatcctgttaaagtcaacggggttttacaacaagaaaaacaagagcgtgtaggacaggaactacgtataacaggctgtgctaatctttcagaaatgttagccagcctcactaaacctcgtattctggtactctctgtccccgcaggtgcgcctgtggatggggtatgtgctgctttaatttctgccggtatcgaagctgacgatatcgttatcgatacgggtaatagtctttggacagacaccgttgagcgtgaacaacattaccaaggacagtttattttcttcagctcagccgtttcgggtggtgaagtgggggcacgttttggcccttcgttaatgccaagtggcgatcttggcgcttggcaacatgtggcaccgatttggaaggctatcgccgctaaggtcaaccctcaaactgggttgccgattgagcgttttgaaccgggtaatccagtaacagaaggcgagccttgcaccacttatattggccctgctggtgctgggcactatgtgaagatggtgcataacggcattgaatatgccgatatgcagctgatttgcgaagcttatcaattattgcatgatggccttggcatgagtgccgctgaagtgggcgaggtgtttgaacgctggaatcagggcagtttaaacagttatctcatgggcattagtgcagaggtattaaagcaagcagatccattaacaggcaaaccgttagttgagatgatcctcgataaagcgggacagaagggtacgggcctttggactgctgtgagcagtctgcaaattggttgtccggctcccaccattgccgaagccgtttatgctcgcgcggtaagcacccaaaaatccctacgtgttgagcttagtaaaaagctcgctggccctctatctccagcgatggatgaaaaccaaaaagccaacttaatcgatgccctagagagtgccctttattgcgctaaagtctgttgctacgcccaaggtttccaactgatggcgatgacggctctggagcaaaaatggcagctcgattttgctgagatcgcgaaaatctggcgtgcgggttgtattattcgtgccaccttcttgcaatcgataacccaggcttatcaagctgatgcgaacttaagttgtttattgatggccgatacttttgccagcactttatcggaaaaacaaaccgagtggcgcattgcagtggctgcggcgattatgcaagggatcccagtgccttgtattagttcggcgctcgcttattacgacagttatcgcagtgagaccctgcctgccaatttacttcaagggcaacgtgacttttttggcgcgcatacctttgaacgcttagataagcctgcaggtgagaaatatcatctagattggagcgcacaagaaagggttttaattaaactctaa

SEQ ID NO: 12003 - protein, 508 aa, Shewanella oneidensis
MQNHSNLNDIGVIGLGVMGKNLALNIADNQYRVSVFDLDPVKVNGVLQQEKQERVGQELRITGCANLSEMLASLTKPRILVLSVPAGAPVDGVCAALISAGIEADDIVIDTGNSLWTDTVEREQHYQGQFIFFSSAVSGGEVGARFGPSLMPSGDLGAWQHVAPIWKAIAAKVNPQTGLPIERFEPGNPVTEGEPCTTYIGPAGAGHYVKMVHNGIEYADMQLICEAYQLLHDGLGMSAAEVGEVFERWNQGSLNSYLMGISAEVLKQADPLTGKPLVEMILDKAGQKGTGLWTAVSSLQIGCPAPTIAEAVYARAVSTQKSLRVELSKKLAGPLSPAMDENQKANLIDALESALYCAKVCCYAQGFQLMAMTALEQKWQLDFAEIAKIWRAGCIIRATFLQSITQAYQADANLSCLLMADTFASTLSEKQTEWRIAVAAAIMQGIPVPCISSALAYYDSYRSETLPANLLQGQRDFFGAHTFERLDKPAGEKYHLDWSAQERVLIKL

SEQ ID NO: 12004 - DNA, 1473 bp, Corynebacterium efficiens
  CDS (1)..(1473)
atgcgtatgatcataactatgacaaacccagattccctcgcccagatcggtgtggtcggcctcgctgtaatggggtccaacctcgcccgcaacttcgcccgcaacggtcacaccgtcgctgtctacaaccgcagcaccgacaagaccgacaagctcatctccgattatgccaccgacggcaacttcatccccaccaagaccgtcgaggatttcgtcgccgccctggagaagccccgccgcgccatcgtcatggtgcaggccggtgccgccaccgacgccgtgatcaaccagcttgcggatgcgatggaggagggagacatcatcatcgatggtggtaacgctctctacaccgacaccgtgtgccgtgagaaggagatggcagcccgtggccgtcacttcgtcggtgccggtatctccggtggcgaggaaggtgccctcaacggcccgtccatcatgcccggtggcccgaaggaatcctgggaggctctcggcccgttgctggagtccatcgccgccaaggtggacggcgttccctgtgtgacccacatcggccctgatggagcgggccacttcgtcaagatggtccacaacggcatcgagtacgccgacatgcaggtcatcggcgaggcctaccagctgctgcgcttcggtgctggcatggagccggccgagatcgccgatgtcttcgccgagtggaacaagggcgatctggactcctacctcatcgagatcaccgccgaggtcctgcgccaggtcgacgccgagaccggcaagccgcttgtcgacgtcatcctcgacgccgcaggccagaagggcaccggccgttggacggtcaaggaggccctcgacctcggagtccctgtcaccggcatcggcgaggccgtcttcgcccgcgcactatcctcctccctcgatcagcgcaaggccgcacagggcaacctgccgaccggtgccctgaccacctttgaggagctgggtctggacaaggcggaattcgtcgaggatgtccgtcgcgcactgtacgcctccaagctggtggcctactcccagggcttcgatgagatcaaggccggttccgatgagcacaactggggtgttgacccccgcgacctggccaccatctggcgcggtggctgcatcatccgggcgaagttcctcaaccgcatcgtcgaggcctacgacaacgacccggagctgccctccctgctgctcgacccgtacttcaagggtgagctcgaggacctgatggactcctggcgccggatcgtcatctacgtcacccagctgggtctgccggcaccggtgttcacctcctccctggcctactacgactccctgcgtgccgagcgtctgccggccgccatcatccagggccagcgtgacttcttcggtgcacacacctaccaccgcatcgacaagccaggctccttccacaccctgtggtccggtgaccgcagcgagctggaggtctag

SEQ ID NO: 12005 - protein, 490 aa, Corynebacterium efficiens
MRMIITMTNPDSLAQIGVVGLAVMGSNLARNFARNGHTVAVYNRSTDKTDKLISDYATDGNFIPTKTVEDFVAALEKPRRAIVMVQAGAATDAVINQLADAMEEGDIIIDGGNALYTDTVCREKEMAARGRHFVGAGISGGEEGALNGPSIMPGGPKESWEALGPLLESIAAKVDGVPCVTHIGPDGAGHFVKMVHNGIEYADMQVIGEAYQLLRFGAGMEPAEIADVFAEWNKGDLDSYLIEITAEVLRQVDAETGKPLVDVILDAAGQKGTGRWTVKEALDLGVPVTGIGEAVFARALSSSLDQRKAAQGNLPTGALTTFEELGLDKAEFVEDVRRALYASKLVAYSQGFDEIKAGSDEHNWGVDPRDLATIWRGGCIIRAKFLNRIVEAYDNDPELPSLLLDPYFKGELEDLMDSWRRIVIYVTQLGLPAPVFTSSLAYYDSLRAERLPAAIIQGQRDFFGAHTYHRIDKPGSFHTLWSGDRSELEV

SEQ ID NO: 12006 - DNA, 1455 bp, Bifidobacterium longum
  CDS (1)..(1455)
atggccgaagctacagcaaacattggtgtgattggactggccacgatgggctccaatctggcgcgtaatctggcgcaccatggcaacacggtggcgttgttcaaccgccactactcgcgtaccgagaagctcatgaacgagcatggcaccgaaggcaacttcgtgccggccgaaacgctcgaggaattcgccgcgtccctgaagcgtccgcgtaccgccatcatcatggtcaaggccggtgctccgaccgacgcgaccatcgcgcagctggaagaggtgttcgaaccgggcgacatcatcgtcgacggtggcaactccttcttcaaggacaccatcaagcgtgagaaggaagtacgtgccaagggcttccacttcgtgggttgcggcgtgtccggtggtgaggaaggcgcgctcaacggcccgtctctgatgcccggtggcactgcggaatcctggaagaccttgggcccgattcttcagtccatcgccgccaaggtgaacggcgaaccgtgcgtgacccacatcggcaccgatggtgccggccactttgtcaagatggtgcacaacggcatcgagtatgccgatatgcaggtgattggtgaggcgtatgacattctgcgccgtggactcggcatggatgccgaggagattggcgacgtgttcgctgaatggaacaagggcgaccttgactcctacctgatcgagatcaccgctgagattctgcaccacaaggatgccgagaccggcaagccgttcgtggacgtggtcgtggatcatgccggcatgaagggtactggtacgtggaccgtgcagactggtctggaatgtggttctcctgtggctgccatcggtgaagccgtgttcgctcgtgcactgtcttcgcacggtgagctgcgtgaagacgctcagaaggaaggtctggctggaccgaacaagaccatcgatctggccggagaagacaaggccgcgttcgtcgaggacgtgcgcaaggctctgttcgcttccaaggtcgtggcctatgctcagggcctgaacgagattcaggacggtgccaaggaatacggctgggatatcaacctgtccgaagtggcccgcatttggcgtggcggctgcattattcgcgcccagttcctgctcgaccgcatcaccgaggccttcaggggcgataacccgccggcttccctgctgttcgatccgtacttcgagaagatcatcggcgaatcgcaggatgcatggcgtcgtgtaatcgtgcgtgccgtggaggccggtatcccgaccccggtgttctccagctccctggcgtactacgatggtctgcgctccaagcgcctgcctaccgctctgacccagtcccagcgtgacttcttcggtgcccacacctacggccgcgtagacaagcccggcgtgttccacacgctgtgggctgaagaaggcaagcctgaaatcgaggcgtag

SEQ ID NO: 12007 - protein, 484 aa, Bifidobacterium longum
MAEATANIGVIGLATMGSNLARNLAHHGNTVALFNRHYSRTEKLMNEHGTEGNFVPAETLEEFAASLKRPRTAIIMVKAGAPTDATIAQLEEVFEPGDIIVDGGNSFFKDTIKREKEVRAKGFHFVGCGVSGGEEGALNGPSLMPGGTAESWKTLGPILQSIAAKVNGEPCVTHIGTDGAGHFVKMVHNGIEYADMQVIGEAYDILRRGLGMDAEEIGDVFAEWNKGDLDSYLIEITAEILHHKDAETGKPFVDVVVDHAGMKGTGTWTVQTGLECGSPVAAIGEAVFARALSSHGELREDAQKEGLAGPNKTIDLAGEDKAAFVEDVRKALFASKVVAYAQGLNEIQDGAKEYGWDINLSEVARIWRGGCIIRAQFLLDRITEAFRGDNPPASLLFDPYFEKIIGESQDAWRRVIVRAVEAGIPTPVFSSSLAYYDGLRSKRLPTALTQSQRDFFGAHTYGRVDKPGVFHTLWAEEGKPEIEA

SEQ ID NO: 12008 - DNA, 1407 bp, Plasmodium falciparum
  CDS (1)..(1407)
atgtgtgatattggtttgataggtttggctgtcatgggccagaatttaagtttgaatatttcaagcaaaggttttaaaattggtgtttataataggacatatgaaagaacagaagaaacaatgaaaagagcaaaagaagagaatttggttgtttatggttataaaacagtagaagaattaataaataatttgaaaaaaccaaggaaagttattttattaatcaaagcaggtccagctgtagatgagaatattagtaatatattaaaacattttgaaaaaggagatataataattgatggtgggaatgaatggtatattaattcagaaagaagaataaaattatgtaaagaaaaagatgtagaatatttagctatgggtgtgagtggaggtgaagcaggtgcaagatatggttgttcatttatgcctggtggttctaaatatgcatatgattgtgtgaaagaaatattagaaaaatgttcagctcaagttggaaattctccttgtgttacttatataggtccaggttcctcagggaattatgtaaaaatggtacataatggaatagaatatggagatatgcaattaatatcagaaagttatgtaattatgaaacatatattaaaatatgataatcagaaattatcagaagtttttaataaatggaatgaaggtatattaaattcttacttaattgaaattactgcaaatattcttgcaaaaaaagatgacttaacaaataattatttagttgatatgatattagatattgctggagcaaaaggtacagggaaatggactatgcttgaagctaccgaaagaggtatcccttgtccaactatgtgtgctgctttagatgcacgtaatataagtgtttttaaagaattaagaactaaagcagaatctaattttaataaagataatattcttattgacccaaatgaagatttaaatgattttgaaaatgatttattaaatgctctttattgttgtaaaattatttcatatactcaaggtcttttccttttaaaacaagtttctgaagaaatgaactggaaattaaatttgggagaaattgctagaatatggagaggtggttgtattataagagctgttttcttagatcgtatagcaaatgcttataaaaataatgaaaaattagaattattattcctagataatgaattctcagatgatattaaaaataaattaccttccttaagaaaaattgttcttatggctacaaaatattccataccaattcctgccttctcagctagtttagcatattttcaaatggtaacctcacaaaatttacctcttaatttagtgcaagcccaaagggattattttggatcacacacatataggagaacagatcgtgaaggaaattatcacaccttgtggtga

SEQ ID NO: 12009 - protein, 468 aa, Plasmodium falciparum
MCDIGLIGLAVMGQNLSLNISSKGFKIGVYNRTYERTEETMKRAKEENLVVYGYKTVEELINNLKKPRKVILLIKAGPAVDENISNILKHFEKGDIIIDGGNEWYINSERRIKLCKEKDVEYLAMGVSGGEAGARYGCSFMPGGSKYAYDCVKEILEKCSAQVGNSPCVTYIGPGSSGNYVKMVHNGIEYGDMQLISESYVIMKHILKYDNQKLSEVFNKWNEGILNSYLIEITANILAKKDDLTNNYLVDMILDIAGAKGTGKWTMLEATERGIPCPTMCAALDARNISVFKELRTKAESNFNKDNILIDPNEDLNDFENDLLNALYCCKIISYTQGLFLLKQVSEEMNWKLNLGEIARIWRGGCIIRAVFLDRIANAYKNNEKLELLFLDNEFSDDIKNKLPSLRKIVLMATKYSIPIPAFSASLAYFQMVTSQNLPLNLVQAQRDYFGSHTYRRTDREGNYHTLW

SEQ ID NO: 12010 - DNA, 888 bp, Chlorobium tepidum
  CDS (1)..(888)
atgggctccaatatggtcgagcatctgcttgaacttggtcacgaagtagttgcattcgatctctcggcggaagcggtcaaagcgattgcggccaaaggggcgacggcggccagttcgttgcagcatctggtcggtgaacttgccgcgccgcgcgtcgtgtggatgatggtgcctgccggtcgtccggtcgatgcggtgatcgacggtctcacgccgtttctcagagcgggtgacatcgttatcgacggcggcaactcgcgctacaccgactcggtcgcccgagcggaaaagcttcgcaagcagggcatccggatgctcgacatcggtaccagcggcgggctggacggcgcccggcacggggcgtgcatgatggccgggggcgaccgcgaggcctatgagcacgtcgagccggtgctgcgcgacctctgcgtcgagaacggctacggctatatgggcgcgtctggctccgggcacttcgtgaagatggtgcacaacggcatcgaatacggcatgatgcaggcgatcggcgaagggttcgagctgctccgggccagcggctacgacctcgataaccagaatgtggcgcgggtctggtcgaacggttcggtcatccgtggctggctcatggatctggcgggcaaggcgttcgctcagggtaacgatctcggctggcttggcggcaaggtggccgattctggcgaggggcgctggacggtcgaggcggccatcgaactcggcgtggcggtaccgatcatctctggttcgctgttccggcgcttccagtcgcagaacgaagaacacttttctgacaaggtggttgctgcgcttcgccacgagttcggcgggcacgcctacgagaaacctggcgaaggggagggcaaagcatga

SEQ ID NO: 12011 - protein, 295 aa, Chlorobium tepidum
MGSNMVEHLLELGHEVVAFDLSAEAVKAIAAKGATAASSLQHLVGELAAPRVVWMMVPAGRPVDAVIDGLTPFLRAGDIVIDGGNSRYTDSVARAEKLRKQGIRMLDIGTSGGLDGARHGACMMAGGDREAYEHVEPVLRDLCVENGYGYMGASGSGHFVKMVHNGIEYGMMQAIGEGFELLRASGYDLDNQNVARVWSNGSVIRGWLMDLAGKAFAQGNDLGWLGGKVADSGEGRWTVEAAIELGVAVPIISGSLFRRFQSQNEEHFSDKVVAALRHEFGGHAYEKPGEGEGKA

SEQ ID NO: 12012 - DNA, 1639 bp, Arabidopsis thaliana
  CDS (62)..(1522)
accaccaacctccgtcaaaaccctaaaccactatctctctctctctcttcatatcgcaacaatggagtccgtcgctctatctcgcatcggtctcgccggtctcgcagtcatgggacaaaacctcgccttaaacatcgccgataaaggattcccaatctccgtctacaatcgaaccactcccaaagtcgacgaaaccttagatcgtgcctccaacgaaggaaaactcccagtcgctggtcaatactcgcctcgcgatttcgttctctcgatccaacggcctagatccgttatcatccttgtcaaagccggtgctcccgttgaccaaaccatcactgctctctctgaatacatggagcctggtgattgtatcatcgacggtggaaatgagtggtatcagaacacagagcgacgaatcgttgaagctgagaagaaaggattgctttatttaggtatgggagtctccggtggtgaagaaggagctcgtaatggtccttctcttatgcctggtggatctttcactgcgtataacaatgttaaagatattcttgagaaagttgctgctcaagtcgaagatggtccttgtgttacatacattggagaaggtggatctgggaattttgtgaaaatggttcataatgggattgaatatggtgatatgcagctgatttcggaggcgtatgacgtgttgaagaacgttggtggattgagtaatgatgaattggctgagatcttcacggagtggaatcgaggtgagcttgagagtttcttggttgagattacttcggatatatttagggttaaggatgattatggtgatggagagttagtggataagattttggataagactggtatgaaaggtacagggaaatggacggttcagcaggcggctgagctttctgttgcggcgcctacgattgctgcgtcgttggattgtagatacttgagtggattgaaggatgagagggagaatgctgctaaagttttggaagaagctggattgaaggaggatatcggttctgcgtctcgtggtgttgataagaagaggttgattgatgatgtgaggcaagctttgtatgcttctaagatctgtagttatgctcaagggatgaatttgcttagggctaagagtttagagaaaggttgggacttgaatttgggtgaaatggctaggatttggaaaggtgggtgtattatcagggcggttttcttggacaggatcaagaaagcttaccagagaaacacgaatttggcgagcttagtggttgatcctgattttgctaaagagatggttcagaggcaagctgcatggaggagagtggtgggtcttgctatatctgctgggattagcacaccaggaatgtgcgcaagtttagcgtatttcgacacttacaggcgtgctagattacctgcgaatcttcaggcgcagagagatctctttggagctcatacatatgagagaaccgatcgtcctggtgcataccacactgaatggactaagcttgcaaggaagagtcagtaaagcatggacacagtcccttgatttgagggctttatttcatcatagaacacgaaaacaaattgtttcagcttatttttgttgagttataataagaaatgcaatgccccttgactctcc

SEQ ID NO: 12013 - protein, 486 aa, Arabidopsis thaliana
MESVALSRIGLAGLAVMGQNLALNIADKGFPISVYNRTTPKVDETLDRASNEGKLPVAGQYSPRDFVLSIQRPRSVIILVKAGAPVDQTITALSEYMEPGDCIIDGGNEWYQNTERRIVEAEKKGLLYLGMGVSGGEEGARNGPSLMPGGSFTAYNNVKDILEKVAAQVEDGPCVTYIGEGGSGNFVKMVHNGIEYGDMQLISEAYDVLKNVGGLSNDELAEIFTEWNRGELESFLVEITSDIFRVKDDYGDGELVDKILDKTGMKGTGKWTVQQAAELSVAAPTIAASLDCRYLSGLKDERENAAKVLEEAGLKEDIGSASRGVDKKRLIDDVRQALYASKICSYAQGMNLLRAKSLEKGWDLNLGEMARIWKGGCIIRAVFLDRIKKAYQRNTNLASLVVDPDFAKEMVQRQAAWRRVVGLAISAGISTPGMCASLAYFDTYRRARLPANLQAQRDLFGAHTYERTDRPGAYHTEWTKLARKSQ

SEQ ID NO: 12014 - DNA, 1551 bp, Aspergillus oryzae
  CDS (1)..(1551): Xaa of translated CDS can stand for any naturally occuring amino acid which can be translated from respective CDS-codon
atgccgtcagaagaccagaaccaacagttcaaacgcattggcatcgttggagccgggaacatgggctccatgatggcctttgcgttctcggagctcggtcttgatgtttctatctgggacgtcaagaaagagaatgttgaccagctcttgcaatcggctaaggatattaaaggccaaggaaagatcgaaggatttgaagatattggcgaattcacccagagcttagagggtcagggagagcggaaactgttcatcttctccatcactcatggcgatcccgcggactccgttcttagtaagatcaagcatgcattgaagaaaggcgacattatcctagacggtggaaatgagaactaccgacgcacggaaaggagacagaaggagtgcgaagaaatcggcgttagttggattggaacgggtgtttccggcggatatcaatccgctcgccgtgggccgsgcttgtctcctggtggcgatgagaaggcgctggagcttgtactacctcttttggagcgctacgcagccaaggaccgcaagaccggtcaaccgtgtgtagccagagttggtcctgcgggctcggggcattttgtcaagatggtacacaacggcatcgagggtggcatgctttcggcggtcgccgaggcttggtctattcttcattacgggctagggctcaagtatgatgagatcggagacatctttgatgaatggaatcagaagggcgaactaaggaataatttcctcctcgatattggagccgacgtatgccacaggagaaaatcccccgaaggagacggcaaaggcgaaggaatcggtgagaagaacgaatacgtccttgatgatgttctcgacaaggttgtgcaagatgacgacgacaccgaaggcaccccctactggtgtgtgatggagacggccaatcgtcatgtttctgcaccgaccattgcaaccggtcattacatgcgtatcgccagtggtaatcgtgcagaacggctgcgagtggcggaaaaattgcgaatgccaaagcccaagcccattgagggcatcaaggaccgacggcttttcattgaagatctacggcgagcagtgtactgttgcttcctgtcgtccttctgtcagggtctcgaactaattgcccgcgcctctgatgacgaaggatggaatattgacctgagcaaatgtctccagatctggcgtggcggttgtattattcagtcagaagctattgccgaccttctacagcctttgcttaaaaaggacgtgcactatacaaatctgaaagacatcgacgaagtcgctcgtgcattgaaacataattttgactctctcaaacggattgtaattgactcgacagtgttcgatcaatacatcccggcgatttccgcgaccttggagtacctgaaatatgcgggtgggacgatgctaccaacgaaattcatggaagcccagatggacttattcggtgcccatgcatattacaagccaggagtacccggtgaggatccaggaccggtcaagaagggtcctcatcactatgagtggcggccagcttaa

SEQ ID NO: 12015 - protein, 516 aa, Aspergillus oryzae
  misc_feature (153)..(153): Xaa can be any naturally occuring amino acid
MPSEDQNQQFKRIGIVGAGNMGSMMAFAFSELGLDVSIWDVKKENVDQLLQSAKDIKGQGKIEGFEDIGEFTQSLEGQGERKLFIFSITHGDPADSVLSKIKHALKKGDIILDGGNENYRRTERRQKECEEIGVSWIGTGVSGGYQSARRGPXLSPGGDEKALELVLPLLERYAAKDRKTGQPCVARVGPAGSGHFVKMVHNGIEGGMLSAVAEAWSILHYGLGLKYDEIGDIFDEWNQKGELRNNFLLDIGADVCHRRKSPEGDGKGEGIGEKNEYVLDDVLDKVVQDDDDTEGTPYWCVMETANRHVSAPTIATGHYMRIASGNRAERLRVAEKLRMPKPKPIEGIKDRRLFIEDLRRAVYCCFLSSFCQGLELIARASDDEGWNIDLSKCLQIWRGGCIIQSEAIADLLQPLLKKDVHYTNLKDIDEVARALKHNFDSLKRIVIDSTVFDQYIPAISATLEYLKYAGGTMLPTKFMEAQMDLFGAHAYYKPGVPGEDPGPVKKGPHHYEWRPA

SEQ ID NO: 12016 - DNA, 1476 bp, Aspergillus oryzae
  CDS (1)..(1476)
atggctgaccaggcagttgctgacttcggtttgatcggtttggccgtcatgggccagaacctgatcatgaacgtcgccgatcacggtttcactgtttgcgcttacaaccgcacaacctccaaggttgaccgcttccttgaaaatgaggccaagggcaagtccattgtcggtgctcactccattgaggagttctgcgctaagctgaagcgtccccgccgtatcatgctcctggttatggctggaaagcccgtcgaccagttcattgagtctctcctgccccaccttgagaagggcgatatcatcattgatggtggtaactcccacttccccgacagcaaccgccgtaccaagtaccttgccgagaagggcatccgcttcgtcggtagcggtgtctctggtggtgaggagggtgcccgttacggtccctctctcatgcccggtggtaacgaggaggcctggcctttcattaaggatatcttccagagcattgccgccaagagcgaaggtgaggcttgctgcgactgggtcggtgatgagggtgccggccactacgtcaagatggtccacaacggtatcgagtatggtgacatgcagctgatctgtgaggcctatgatattctcaagcgtggtgttggcatgcccgtcaacgaaatcgccgaagtcttcgacaagtggaacaagggtgtcttggactccttcttgatcgaaatcacccgcgatgtcctccgcttcaacgatgacgacggcactcccctcgttgagaagatccttgacaaggccggccagaagggaaccggcaagtggaccgccatcaacgctcttgaccttggtatgcctgtcaccctgatcggtgaggctgtcttctctcgttgcctcagtgcccttaaggacgagcgtgtccgcgctagcagcctcctcccaggccccactcctcaattcaccggtgacaagcaggctttcgtcgatgatctggagcaggccctttatgcttctaagatcatctcctatgcccagggcttcatgctcatgcaggaggctgccaaggagtacggctggaagcttaacaagccttccatcgcccttatgtggcgtggtggctgcatcatccgctctgtcttcctgaaggacatcaccaacgcctaccgccagaaccccgaccttgagaacctcctcttcgacaagttcttcaacgaagccatcgccaaggcccagaacggctggagaaacgttgtcagcaagggtgctctctggggtatccctactcccgctttcagcactgctctcagcttctacgacggataccgcactcgggacctccccgccaacctgctgcaggctcagcgtgactacttcggtgcccacaccttccgcgtcaagcccgagcacgccaacgagacctaccctgagggcaaggacatccacgtcaactggactggacgtggtggtaatgtgtccgcctctacctacattgcttaa

SEQ ID NO: 12017 - protein, 491 aa, Aspergillus oryzae
MADQAVADFGLIGLAVMGQNLIMNVADHGFTVCAYNRTTSKVDRFLENEAKGKSIVGAHSIEEFCAKLKRPRRIMLLVMAGKPVDQFIESLLPHLEKGDIIIDGGNSHFPDSNRRTKYLAEKGIRFVGSGVSGGEEGARYGPSLMPGGNEEAWPFIKDIFQSIAAKSEGEACCDWVGDEGAGHYVKMVHNGIEYGDMQLICEAYDILKRGVGMPVNEIAEVFDKWNKGVLDSFLIEITRDVLRFNDDDGTPLVEKILDKAGQKGTGKWTAINALDLGMPVTLIGEAVFSRCLSALKDERVRASSLLPGPTPQFTGDKQAFVDDLEQALYASKIISYAQGFMLMQEAAKEYGWKLNKPSIALMWRGGCIIRSVFLKDITNAYRQNPDLENLLFDKFFNEAIAKAQNGWRNVVSKGALWGIPTPAFSTALSFYDGYRTRDLPANLLQAQRDYFGAHTFRVKPEHANETYPEGKDIHVNWTGRGGNVSASTYIA

SEQ ID NO: 12018 - DNA, 942 bp, Xanthomonas campestris
  CDS (1)..(942)
atggaactgggtatggtgggactgggccgcatgggcgccaacatggccgagcggctggtgcgcggcgggcatcgcgtgcatgggttcgatctgggcgctgcggcacgcaccagtgcgcaatccaagggcatccagacaaccgatgcgctggtcacgctggtctccgcactgccgagtccgcgcgtggtgtggctgatggtgccggccggcaagatcgtcgacgacacgctggcgcagctgctgccgttgctgcaggccggcgacatcgtcatcgacggcggtaattcgtattacaaggattcgcagcgccgcgccgcgcagctgcaatccagcggcattgcgtttgtcgattgcggcaccagcgggggcgtgtggggcttgcaggaaggctacagcctgatggtgggcggcgacgaagcggccgtgaccacgttgcatccggtgctggccacgttggcaccggcgccggacaagggctggggacgggtgggcccgagcggtgccggccacttcaccaagatggtccacaacggcatcgagtacggaatgatgcaggcctatgcggaaggcttcgcgctgctgcagcacaagaccgatttcgcgctggacctgcaccaggtcgccgagatctggcgcgatggcagcgtggtgcgttcgtggctgctggacctcaccgccgatgcgctggcgcacaacccgaccatgggcggcattgcgccgtatgtggccgattccggcgaaggccgttggacggtggcagaggccatcgacctggaagtctccgcgccggtgatcaccttgtcgctgatggagcggttgcggtcgcgcgacaaggattcgttcaccgataaattgctggcggcgatgcgcaatcagttcggtgggcatgcggtgctgaccaccacgccaaccccgacgccgatcggcagcaaggacgcctga

SEQ ID NO: 12019 - protein, 313 aa, Xanthomonas campestris
MELGMVGLGRMGANMAERLVRGGHRVHGFDLGAAARTSAQSKGIQTTDALVTLVSALPSPRVVWLMVPAGKIVDDTLAQLLPLLQAGDIVIDGGNSYYKDSQRRAAQLQSSGIAFVDCGTSGGVWGLQEGYSLMVGGDEAAVTTLHPVLATLAPAPDKGWGRVGPSGAGHFTKMVHNGIEYGMMQAYAEGFALLQHKTDFALDLHQVAEIWRDGSVVRSWLLDLTADALAHNPTMGGIAPYVADSGEGRWTVAEAIDLEVSAPVITLSLMERLRSRDKDSFTDKLLAAMRNQFGGHAVLTTTPTPTPIGSKDA

SEQ ID NO: 12020 - DNA, 942 bp, Xanthomonas axonopodis
  CDS (1)..(942)
atggaactgggtatggtgggactgggccgcatgggcgccaacatggccgagcgcttggtcaatggtgggcatcgcgtgcatggctacgatccgggcgcgaacgcgcgcaccagcgcgcaagccaagggcatcgtcaccgccgatgcgctggcagcgctggtgtccgcactgccgagcccgcgcgtggtgtggttgatggtgccggccggcaagatcgtcgatgacacgctggcgcagctgctgcccttgctgcaggccggcgacatcgtcatcgatggcggcaattcgtactacaaggattcgcagcggcgtgcggcattgctgcaggccagtggcatcgcgtttgtcgattgcggcaccagcggtggcatctggggtctgcaggaaggctatagcctgatggtgggtggcgacgaagcggcggtgacggggttgcatccgatcctggcaacgctcgcgccggcgccggacaagggctggggacgggttggcccgagcggtgcaggccacttcaccaagatggtccacaacggcatcgaatacggaatgatgcaggcctatgcggaaggcttcgcgctgatgcagcacaaggccgattttgcgctggatctgcaccaggttgccgaaatctggcgcgatggcagcgtggtgcgttcgtggttgctggatctgacggccgacgcgttgacgcataacccgaccatggccggcatcgcgccgttcgtggccgattcgggcgaaggccgctggacggttgcagaagcgatcgatctggaagtctctgcaccggtcatcacgttgtcgctgatggagcggctgcgctcgcgcgacaaggattcgtttaccgacaagctgctcgcggcgatgcgcaatcagttcggcggccacgcggtgatgaccacgacctcggcagcgccgacgatcggtagcaaggacgcgtaa

SEQ ID NO: 12021 - protein, 313 aa, Xanthomonas axonopodis
MELGMVGLGRMGANMAERLVNGGHRVHGYDPGANARTSAQAKGIVTADALAALVSALPSPRVVWLMVPAGKIVDDTLAQLLPLLQAGDIVIDGGNSYYKDSQRRAALLQASGIAFVDCGTSGGIWGLQEGYSLMVGGDEAAVTGLHPILATLAPAPDKGWGRVGPSGAGHFTKMVHNGIEYGMMQAYAEGFALMQHKADFALDLHQVAEIWRDGSVVRSWLLDLTADALTHNPTMAGIAPFVADSGEGRWTVAEAIDLEVSAPVITLSLMERLRSRDKDSFTDKLLAAMRNQFGGHAVMTTTSAAPTIGSKDA

SEQ ID NO: 12022 - DNA, 1404 bp, Thermoanaerobacter tengcongensis
  CDS (1)..(1404)
atgaatgatgtgggtttaataggattggcggtaatgggacaaaattttgccttgaacatggcaaggaaaggttatagagtttcggtttataataggacccctgagagaacaaagaagtttgttgaggaaaaagttagagacgaatcaatttttccgttttatactatagaagagtttgtgaaaagtttaaaaaaacctagaaaaataattctgatgataaaggctggaaaggctgtagatgacatgattgctgaaattcttccatatctggagctaggggaccttatagtagacagtgggaattcgcattttgctgatactgctagaaggctagaatatttatcgcaaaaaaacattttgtttctcggaatgggtatttctggaggagagtacggggctttacatggaccctcattaatgccaggtggtacaaaagaggcttatgacttaataaaagatattcttttaaaggctgcagcaaagacggaagatggaccttgctgtacatatgtgggaaagggttcagcaggtcattttgtgaaaatggttcataatggtattgaatatgctattatgcagttaattgctgaagtatatgattttatgaaaaaagtattgaatatgactaatgaacaaataggcgatgtctttgaaaaatggaataagggagaacttaattcctatttaatggaaatttcttataagattatgagatataaagacaaggagacaggaggatttttgatagactacattttggataaagcagaacaaaagggtactgggaaatggactgctcaaacttctttggatttaggggttcctacgccaacattgaatttggcggtagaagccagaattatttctcactataaagaagagagaaagattttatcgaaattatattcgaaagaaaagaatataatctctgtgaataaagaagaaatgatagagcatttaaagaaagcactgctttttggagtatttatgtctttctctcaaggcttatggctaattgacgaagcatccaagcaatataattatggaatagaccttagcgaaatattaagaatttggaaaggaggctgtattataagggccgaaattctagactttttgagggatatcattagagaaaatgaggaagatgcaaatcttttgcatagtgataaggctatagactttattaaagataaattaaattccatctaccaagttacagaaattgggaaaaattacagaatacctcttatgacaatgaattctgcacttgattattattttgctttaacagaagagaatctcccagcaaacattattcaagctcaacgggacttttttggagctcatacttacgaaagaattgacagagaagggatatttcatacagagtgggaaagataa

SEQ ID NO: 12023 - protein, 467 aa, Thermoanaerobacter tengcongensis
MNDVGLIGLAVMGQNFALNMARKGYRVSVYNRTPERTKKFVEEKVRDESIFPFYTIEEFVKSLKKPRKIILMIKAGKAVDDMIAEILPYLELGDLIVDSGNSHFADTARRLEYLSQKNILFLGMGISGGEYGALHGPSLMPGGTKEAYDLIKDILLKAAAKTEDGPCCTYVGKGSAGHFVKMVHNGIEYAIMQLIAEVYDFMKKVLNMTNEQIGDVFEKWNKGELNSYLMEISYKIMRYKDKETGGFLIDYILDKAEQKGTGKWTAQTSLDLGVPTPTLNLAVEARIISHYKEERKILSKLYSKEKNIISVNKEEMIEHLKKALLFGVFMSFSQGLWLIDEASKQYNYGIDLSEILRIWKGGCIIRAEILDFLRDIIRENEEDANLLHSDKAIDFIKDKLNSIYQVTEIGKNYRIPLMTMNSALDYYFALTEENLPANIIQAQRDFFGAHTYERIDREGIFHTEWER

SEQ ID NO: 12024 - DNA, 2241 bp, Chlamydomonas reinhardtii
  CDS (73)..(1545)
actcaaaacattacattgttgagaggccacttacaacccttccgctgtcttcgcagcaagggaaacgcaccgatggctgtcgccgaaatcggtctggttggcctggcggtcatgggccagaacttggccctgaacatcgcggagaagggctttcccatttcggtctacaaccgtagctatgacaagactgaggccgcggtgaagcgcgctcagaaggagggcctgggcgagaagctgcacggctacgagcaagtcaaggactttgtgcagagcctgcagaggccccggcgcgtcatcatcctggtgaaggccggcgcgcccgtggaccagaccattgaccaactgtgcgagttcatggagcctggtgacatcatcattgacggcggcaacgagtggtacgagaacacggagaagcgcatggccaaggttgccgccaagggcatcctgtacatgggcatgggcgtgtccggcggcgaggagggcgcccgcaggggtccctccatgatgcccggcggcagccctgaggcgtacagccacatcaagagtgtggtggagaaggtggcggcacaggtggacgacggcccctgcgtgatgtacattggtggcggcggcgcgggcaacttcgtcaagatggtgcacaacggcatcgagtacggcgacatgcagctcatcagcgaggcctacgacgtgctgaagacgctgggcggcctcaacaacgaggagctggcggcggtgttcaaggagtggaatgacgccgagctcaagtcattcctggtggagatcacggccatcattgtgaacaagaaggacgaccaggcgcccggatatctggtggaccagattgtggaccagaccggctccaagggcacaggcaagtggacggtgcagcaggcggctgagctggcggtggcggcgcccaccatggcctcggcactggacgcgcgctacatgagtgcgctcaagtcggagcgcgtggccgcctccaagtcgttcacaagctgtgtcacgcccggccctgttgcgggtgtggacaaggcgcagctgatcaacgacgtgcgcgcggcgctgtacgccagcaagatctgctcgtacgcgcagggcatgaacattatcaaggccaagagcgtggagatgaagtggaacgtcgacctgggcggcctggcgcgcatctggaagggtggctgcatcatccgcgcgcagttcctggaccgcatccgcgtcgcctacgagcgcaaccccgagctgccctcgctgctggtggaccccgacttcgccaaggagctcaccgctgccgaggcgtcctggcgccgcgtggccgcgctgtccatcacgcacggcgtgcccatcccctccatgacctcctccctgggctactttgacacctaccgccgcgagcgcctgcccgccaacctggtgcaggcgcagcgcgacttcttcggctcgcacacctaccagcgcttcgacaaggagggctggtaccacaccgtgtgggacgagaccttcggctccgccgactccatcaccaccagcggctacgtggtgtaaggcgaggcagcggggtggtgttgcgaagggcagagccactgctggtggcggcgtattgtcgtagcagacgtggcggtggtggttactggtcaaggcttacgcatctggacctgtcgcagggtcttgtgttgttatgcaaggtgaagaagagttgcgctggcgctgtgccgcttgtaccgtatgtgtttggtgctgttggaacggggccggcgtgattgcgcttgagcatttcaggcggccgccggctccaggagagcagtgtgatgtgcgtgctcgcgagggtcgtcggactgagaagggctatgggcggcatgcgtcgtgcccgatgccccagggtgtcggggcgcatgcaactggctgtagcgcttcaagccaggctggtcgacccctcacgtggctctcgagtggtttcggtagttcaactaccccgatgatgctattatcagttatgttccagggctcaattgggcgcctggtggtaccgtaccggtatgcatacattgtttctgggcagcggagaagtagtgcagttacggaggcaagtatttcttaggtcctaggaataactgcggggctgacccctatcgctcagtcccctgcgtgtttgtcccagcgcgtaatgcccaatgctcgaagatgagattgccacgaatatggctgtgtaaagctttgggactgaaaaaaaaaaaaaaaaaa

SEQ ID NO: 12025 - protein, 490 aa, Chlamydomonas reinhardtii
MAVAEIGLVGLAVMGQNLALNIAEKGFPISVYNRSYDKTEAAVKRAQKEGLGEKLHGYEQVKDFVQSLQRPRRVIILVKAGAPVDQTIDQLCEFMEPGDIIIDGGNEWYENTEKRMAKVAAKGILYMGMGVSGGEEGARRGPSMMPGGSPEAYSHIKSVVEKVAAQVDDGPCVMYIGGGGAGNFVKMVHNGIEYGDMQLISEAYDVLKTLGGLNNEELAAVFKEWNDAELKSFLVEITAIIVNKKDDQAPGYLVDQIVDQTGSKGTGKWTVQQAAELAVAAPTMASALDARYMSALKSERVAASKSFTSCVTPGPVAGVDKAQLINDVRAALYASKICSYAQGMNIIKAKSVEMKWNVDLGGLARIWKGGCIIRAQFLDRIRVAYERNPELPSLLVDPDFAKELTAAEASWRRVAALSITHGVPIPSMTSSLGYFDTYRRERLPANLVQAQRDFFGSHTYQRFDKEGWYHTVWDETFGSADSITTSGYVV

SEQ ID NO: 12026 - DNA, 1654 bp, Phytophthora infestans
  CDS (44)..(1513)
agctcagctccttcaccaactttctcctttctatctttccaccatggctgacctctcggacatcggacttttcggcctggccgttatgggccagaacttcgcgctcaacatggcgtcgcacggcttcaaggtgtcggtgtgcaaccgctcgcctgacaaagtggacgccactgtgcagcgcgccaaggacgagggcaacctcccgcttgtgggcttcaaggacatgaaggagtttgtggcctcgctcgcgcgcccccgtaaggttgtcatcctcgtggtggccggcaagcctgtggacttgaccatcgccgcgctctcggagttcatggagcctggtgacatcatcgtggacggcggtaacgagtggttccccaacagtgttcgtcgtgccagcgagctggagcccaagggcatccacttcgtgggcatgggcgtgtctggcggtgaggagggcgcccgcaacggcccttcgcttatgcctggtggccccaaggaggccttcgacgctctcgagcccattatcaccaagtgtgccgcccaggtggacgacggtgcctgcactacgtaccttggccccatcggttcgggcaactacgttaagatggtccacaacggcatcgagtacggtgacatgcagctgatcgccgaggcttacgacatcctcaagatcgctggtggcctcacgaacgatgagctggccagcgtctttgacgagtggaacaagggcgagctcgagtcgttcctcattgagatcacggctcagattttcgccaaaaaggacgatctgacggacgatggctacgtcgttgacaagatcctagacaagactggcatgaagggcactggtcgctggaccgtgcaggaggctgctgagcgctccatcgccgcccccaccatcactgcgtctctggacgctcgttacctaagcgcccgcaaggacgagcgcgtgttcgcctccaagatcctgtcgggtccgtctgagatccctgctgtggacaagcagcagctcatcgacgacgtgcgtcaggctctgtacgcctccaagatctgctcgtacgctcagggcctgaacctcatccgtgaggctggtgtccaaatgggctggaacgttgacttgggtgagtgtgctcgcatctggaagggcggctgcatcatccgtgccaagttcttggaccgtatcaagtcggcttacactaaggacgcgtcattgatctcgctgctggtggatccggacttcgccgccgagctgcaggctcgccagtattcgtggcgtcgcgtggtgtccctggctgtggctagtggcatccctgcgccctcgttctcgggctcgctcaactactacgacacgttccgtcgtgagcgtctgcccgccaacctgactcaggcccagcgtgacttcttcggcggccacacctatgagcgcacggaccgtgagggtctgtaccactgcgcctggtccgccgctcaccacagcattggtgacgtctcggagcgtatccgtggcaacctgtaagcgtctctagagacgcgaacagaggaaaaagtacggtagttatctgtgcggctccacaaaagctgccatttgcaggccccatgagtttgatatgatcagaatgccagcctagtctttttaacaattaaaaaaaaaaaaaaa

SEQ ID NO: 12027 - protein, 489 aa, Phytophthora infestans
MADLSDIGLFGLAVMGQNFALNMASHGFKVSVCNRSPDKVDATVQRAKDEGNLPLVGFKDMKEFVASLARPRKVVILVVAGKPVDLTIAALSEFMEPGDIIVDGGNEWFPNSVRRASELEPKGIHFVGMGVSGGEEGARNGPSLMPGGPKEAFDALEPIITKCAAQVDDGACTTYLGPIGSGNYVKMVHNGIEYGDMQLIAEAYDILKIAGGLTNDELASVFDEWNKGELESFLIEITAQIFAKKDDLTDDGYVVDKILDKTGMKGTGRWTVQEAAERSIAAPTITASLDARYLSARKDERVFASKILSGPSEIPAVDKQQLIDDVRQALYASKICSYAQGLNLIREAGVQMGWNVDLGECARIWKGGCIIRAKFLDRIKSAYTKDASLISLLVDPDFAAELQARQYSWRRVVSLAVASGIPAPSFSGSLNYYDTFRRERLPANLTQAQRDFFGGHTYERTDREGLYHCAWSAAHHSIGDVSERIRGNL

SEQ ID NO: 12028 - DNA, 1377 bp, Encephalitozoon cuniculi GB
  CDS (1)..(1377)
atgcctcaaaccccgaaaatggagatcggcctaattggcttgggagtgatgggacatagtcttgcattgaacattgtctcaaggggatacaggctgcatgttttcaacaggacatcctcgaagacggacgaccttgtgagggagaggagagacatctgcccccattattccgtggaggacctggttgtgggcatcaagacttctccgagggtcattcttctgatgctgacctctggaaaagtggtggatgtctttctcgaggagctcagcagatacctgggcaaggacgatgttgtcattgacgggggaaactcctcatacaaagacaccatcagaagaaatagatacaagtttggattcgtcgggtgtgggatttctggaggagaagagggagccaggtacgggccgtccatcatggtcgggtgtgacaaggattcctgggaaaaggtccaaggatttcttacggatatttctgcagtcgaggtctctggaagcaagcgctgctgcgtatggcttggggagggaggggccggacactttgtcaagatggttcataacggaatcgagtacggggacatggcaataatctccgagacatatctagtcctgaagtccctggggttgagcaacatggagatatcctcactgtttgacagttggaacggaatggagtctgaaagctatctccttagaatctcgtgctcgatcttgagaatggagaacgagagaggaagcgtgcttgaccagatagcagacgtctcggggcagaagggcactggaatggaagcagtggtgtcgtcaatggagatggggcagcccattccagcaataatggaggcagttgcatccaggatggtatcatatgcaaagaagaaaaggtgctggctctccgaaaggttagagggtgggaagggaaggagggagatgtctctggatgcggccagaagggggttttaccttgcaagaatggtttcgtgcgtgcagggattcaacctgctgatgagagccaggaagaagcatgggtggccatacaccatcgaagatatctcgcaagtgtggagcaatggatgcatcctcaggggaaagctgttggacgtggttaggagcatggggaaggagagacaggatgattttgagcttacgtctgaatttgtgtctctgtgcaacgaatactaccaagacctcaaggaaatggttctgtactctactgagtgcgaggtgccaactccaacgatctcgtcttgcctaatgtaccttaacgggatgaagaaggaggagggaggggggaacatgattcaggcaatgagggactatttcggggcccacatggtgacgatgaaaggagaggatgaggctgtgcatgtacggtggaactag

SEQ ID NO: 12029 - protein, 458 aa, Encephalitozoon cuniculi GB
MPQTPKMEIGLIGLGVMGHSLALNIVSRGYRLHVFNRTSSKTDDLVRERRDICPHYSVEDLVVGIKTSPRVILLMLTSGKVVDVFLEELSRYLGKDDVVIDGGNSSYKDTIRRNRYKFGFVGCGISGGEEGARYGPSIMVGCDKDSWEKVQGFLTDISAVEVSGSKRCCVWLGEGGAGHFVKMVHNGIEYGDMAIISETYLVLKSLGLSNMEISSLFDSWNGMESESYLLRISCSILRMENERGSVLDQIADVSGQKGTGMEAVVSSMEMGQPIPAIMEAVASRMVSYAKKKRCWLSERLEGGKGRREMSLDAARRGFYLARMVSCVQGFNLLMRARKKHGWPYTIEDISQVWSNGCILRGKLLDVVRSMGKERQDDFELTSEFVSLCNEYYQDLKEMVLYSTECEVPTPTISSCLMYLNGMKKEEGGGNMIQAMRDYFGAHMVTMKGEDEAVHVRWN

SEQ ID NO: 12030 - DNA, 1597 bp, Dictyostelium discoideum
  CDS (64)..(1545)
tttataataataaaaataaataaaaataaaataaaaaaaataaaaataaataaataaataaaaatgacagaagcaaaaggtgatattggtttaattggtttagccgttatgggtgaaaatttagtattaaatatggaaagtcgtggattcacatgttcagtctataatagaactacatccaaagttgacgaatttgttcaaggtagaggtaaaggaaagaaattcattggttgtcactcattagaaactttagttcaatcattaaaaaccccacgtagagttatgttgatggttaaagctggtgaagtcgttgatcatttcattcaactcttattaccattattagaaaagggtgatatcatcattgatggtggtaattcattatataccgattcagatcgtcgtacaaaggatttagatgccaagggtatccttttcattggtaccggtgtttctggtggtgaagaaggtgctctcctcggtccatcaatcatgccaggtggtaacccaaaggcatgggaacatgttaaaccaatcttccaagcaatctctgccaaagttcaaccaggtgatcaaccatgttgtgattgggttggtgatggtggtgctggtcattacgtcaagatggtacacaatggtatcgaatatggtgatatgcaattgatcagtgaagcctatttcatcctcaaacattacctcggtctcagcaatgatgaattacaaaaaacttttgccaaatggaacactggtgatcttgacagctatttaatcgaaatcactgccgatattttcgcaaagaaatgtgaaaaggatccaaacacctacgttgtcgatacaattttagattctgccggtcaaaaaggtactggtaaatggactgctatcaatgctttagatgtcggtatcccattaactttggttgccgaaagtgttttcgccagatgtgtatcttctttcaaagaggaaagagttaaagcttcaaccattctcgctggtccaaatccaaacgaagccaacaagaaattcacaggtgacaaagaacaagttatcgaagccgttagacaagctttattcgcttcaaaattggtttcatacgctcaaggtttcaccatgatgaaagctgccgccaaagaatataaatggaacctcaactatggtaatatcgccctcttatggagaggtggttgtatcattcgttcaactttcctcggtgaaatcaagggagcctttgataagaatccacaacttgacaatcttttaaccgattgttggttcagagataaattagctgccgctcaagatggttggagacaagttgcctcaatttcagtactccacggtatcccaactccagctttcacctctgccctctcctactatgacagttatcgttgtgctaaactctctgccaatctcgttcaagctcaaagagattactttggtgctcataccttccagttacttgatgatccaaaaggtgctccagttcatgtaaattggactggtagaggtggttcaactcattctactacttatagtatttaaaaaaaaaaattataaaaaaataaaaaaataaaaaaaattaaaaaatttaaaa

SEQ ID NO: 12031 - protein, 493 aa, Dictyostelium discoideum
MTEAKGDIGLIGLAVMGENLVLNMESRGFTCSVYNRTTSKVDEFVQGRGKGKKFIGCHSLETLVQSLKTPRRVMLMVKAGEVVDHFIQLLLPLLEKGDIIIDGGNSLYTDSDRRTKDLDAKGILFIGTGVSGGEEGALLGPSIMPGGNPKAWEHVKPIFQAISAKVQPGDQPCCDWVGDGGAGHYVKMVHNGIEYGDMQLISEAYFILKHYLGLSNDELQKTFAKWNTGDLDSYLIEITADIFAKKCEKDPNTYVVDTILDSAGQKGTGKWTAINALDVGIPLTLVAESVFARCVSSFKEERVKASTILAGPNPNEANKKFTGDKEQVIEAVRQALFASKLVSYAQGFTMMKAAAKEYKWNLNYGNIALLWRGGCIIRSTFLGEIKGAFDKNPQLDNLLTDCWFRDKLAAAQDGWRQVASISVLHGIPTPAFTSALSYYDSYRCAKLSANLVQAQRDYFGAHTFQLLDDPKGAPVHVNWTGRGGSTHSTTYSI

SEQ ID NO: 12032 - DNA, 2180 bp, Mus musculus
  CDS (63)..(1514)
gcctcggagcgctcggtccttcgtgtttctttctcctcgactctgcttcgtctgcctccgccatggcccaagctgacattgcactgatcggactggctgtcatgggccagaacttaattttgaacatgaatgatcatggatttgtggtctgtgctttcaataggacagtctccaaagtcgatgacttcttggccaacgaggcgaagggcaccaaggtggttggtgcacagtccttaaaggacatggtctccaaactaaagaagccccgccgggtcatcctgcttgtgaaggccgggcaagccgtggatgatttcatcgagaaattagtacccttgttggacacgggtgacatcatcatcgatggaggaaattctgaataccgggacacgacaagaagatgccgggacctcaaggccaagggcatcttgtttgtggggagcggagtcagtggtggtgaggaaggggctcggtacgggccgtcactcatgccaggagggaacaaagaggcttggccccacatcaaggcgatcttccaagccatcgctgcaaaagtgggaaccggagaaccctgctgtgactgggtgggagatgagggggcggggcactttgtgaagatggtgcacaacgggatagagtatggagacatgcagctcatctgtgaggcttaccatttgatgaaggatgttctgggcatgcggcatgaggagatggctcaggcatttgaagaatggaacaagacagagctggactcattcctgattgaaatcactgctaacattctcaagtaccgggacactgacggcaaagagctgttgccaaagatccgggacagtgctgggcagaagggcactgggaagtggaccgccatctcggcgctggagtacggcatgcccgtcaccctcattggagaagctgtctttgctcggtgcttgtcctctctgaaggaggagcgggttcaggccagccaaaagctgaagggtcctaaggtggtccagctggaaggcagtaagaagtcattcctggaggacatccgtaaggccctctatgcttccaagatcatctcctacgcccaaggctttatgctgctcagacaggcagccactgagtttggctggaccctcaattatggcgccattgccctgatgtggagagggggctgcatcatccgaagtgtgttcctgggaaaaattaaagatgcatttgagcgaaacccagaacttcagaacctactgctagatgacttctttaagtcagcagttgacaactgccaggactcctggcggcgggtgatcagcactggggtgcaagcaggcattcccatgccctgcttcactactgccctctccttctatgatgggtacagacacgagatgctgccagcaaacctcatccaggctcaacgggattactttggggctcacacctatgaactcttaaccaaaccgggagaatttatccacaccaactggacgggccacgggggcagtgtgtcatcctcttcatacaatgcctagtaggcctgtggcttgccctccctcccagcaataggacagccccgtggcgctcagcaccccccctttgccctagttcctgctcttagccaagtgttggctgtgattgctgaagaagtcaccgaggtctatagtttctgaaccaccacatgctccacctccgtctctgtgctgcccaggacctgaccctgtgctgccactgcgtgacctgaccctgtgcgccactgcgtgaccactccctgactgagccgtgccatgtggaccagacaagctgcagctcttagctcacagagggggtgggtgtgtgggatcgtacaacctggacgtggaccatgcgtgtgggctctgctgtcctccagtcagtgaagtgtatatggttacactctctgggtgtgcctggcagaacgatctgcactgagttcactattgcaaattgatttgttttcctttagccttgttcacttttaactccggctttttttaaagactccaaataaaacaggacaggtagtgagtaaatctggagggaggtgcagagccgaggagtcggtgggcagaggctctcctgtcgggtatttcttactggcacagtaggtacctggatgttcacagagcatccgccccgtcccacttgtaataaacttttagactggtaaaaaaaaaaaaaaa

SEQ ID NO: 12033 - protein, 483 aa, Mus musculus
MAQADIALIGLAVMGQNLILNMNDHGFVVCAFNRTVSKVDDFLANEAKGTKVVGAQSLKDMVSKLKKPRRVILLVKAGQAVDDFIEKLVPLLDTGDIIIDGGNSEYRDTTRRCRDLKAKGILFVGSGVSGGEEGARYGPSLMPGGNKEAWPHIKAIFQAIAAKVGTGEPCCDWVGDEGAGHFVKMVHNGIEYGDMQLICEAYHLMKDVLGMRHEEMAQAFEEWNKTELDSFLIEITANILKYRDTDGKELLPKIRDSAGQKGTGKWTAISALEYGMPVTLIGEAVFARCLSSLKEERVQASQKLKGPKVVQLEGSKKSFLEDIRKALYASKIISYAQGFMLLRQAATEFGWTLNYGAIALMWRGGCIIRSVFLGKIKDAFERNPELQNLLLDDFFKSAVDNCQDSWRRVISTGVQAGIPMPCFTTALSFYDGYRHEMLPANLIQAQRDYFGAHTYELLTKPGEFIHTNWTGHGGSVSSSSYNA

SEQ ID NO: 12034 - DNA, 930 bp, Mus musculus
  CDS (1)..(930)
atggcccaagctgacattgcactgatcggactggctgtcatgggccagaacttaattttgaacatgaatgatcatggatttgtggtctgtgctttcaataggacagtctccaaagtcgatgacttcttggccaacgaggcgaagggcaccaaggtggttggtgcacagtccttaaaggacatggtctccaaactaaagaagccccgccgggtcatcctgcttgtgaaggccgggcaagccgtggatgatttcatcgagaaattagtacccttgttggacacgggtgacatcatcatcgatggaggaaattctgaataccgggacacgacaagaagatgccgggacctcaaggccaagggcatcttgtttgtggggagcggagtcagtggtggtgaggaaggggctcggtacgggccgtcactcatgccaggagggaacaaagaggcttggccccacatcaaggcgatcttccaagccatcgctgcaaaagtgggaaccggagaaccctgctgtgactgggtgggagatgagggggcggggcactttgtgaagatggtgcacaacgggatagagtatggagacatgcagctcatctgtgaggcttaccatttgatgaaggatgttctgggcatgcggcatgaggagatggctcaggcatttgaagaatggaacaagacagagctggactcattcctgattgaaatcactgctaacattctcaagtaccgggacactgacggcaaagagctgttgccaaagatccgggacagtgctgggcagaagggcactgggaagtggaccgccatctcggcgctggagtacggcatgcccgtcaccctcattggagaagctgtctttgctcggtgcttgtcctctctgaaggaggagagggggctgcatcatccgaagtgtgttcctgggaaaaattaa

SEQ ID NO: 12035 - protein, 309 aa, Mus musculus
MAQADIALIGLAVMGQNLILNMNDHGFVVCAFNRTVSKVDDFLANEAKGTKVVGAQSLKDMVSKLKKPRRVILLVKAGQAVDDFIEKLVPLLDTGDIIIDGGNSEYRDTTRRCRDLKAKGILFVGSGVSGGEEGARYGPSLMPGGNKEAWPHIKAIFQAIAAKVGTGEPCCDWVGDEGAGHFVKMVHNGIEYGDMQLICEAYHLMKDVLGMRHEEMAQAFEEWNKTELDSFLIEITANILKYRDTDGKELLPKIRDSAGQKGTGKWTAISALEYGMPVTLIGEAVFARCLSSLKEERGLHHPKCVPGKN

SEQ ID NO: 12036 - DNA, 1431 bp, Rhizobium meliloti
  CDS (1)..(1431)
atgtcacaggcggaaatcggcctaatcggtctcggagtcatgggctcgaacctggcgctcaacatcgctgaaaaaggcaacaggatcgccgttttcaaccgcacggtcgacgcgacacgcaaattctacgctgaggccggcgcactcaaggaccagatcgtcccctgcgaaacgatcgaagaattcgtcgccgccatccgcccgccgcgtccgatcattatcatgatcaaggccggtgatccggtcgaccagcagatggaggccctgaagccccatctcgccaagggcgacatcatgatcgatgcgggcaacgccaatttccgcgacacgatgcgccgtttcgatgcgctgaaggactcgggtctcaccttcatcggcatgggcgtctccggtggcgaggaaggcgcgcgccacgggccctcgatcatggtcggcggcacggaagaatcctatcggcgcgtcgagaaggttctgacctcgatcgctgcgaaatatgatagcgacccctgcgtcgcctggctcggcgagaacggggcggggcacttcgtcaagacgatccacaacggcatcgaatatgccgatatgcagatgatcgccgagatttacgggatcctgcgtgacggattgaagatgacggcacaggagatcggcgaggtcttcggcgcctggaacaagggccggctcaactcctacctgatcgaaatcaccgagaaggtcttgaaggccgccgatccgctgaccggcaagcccatcgtcgatatgatcctcgacaaggccggtcagaagggcaccggcaaatggtcggtgatcgaggcgcagaacatgggcgtgcctgcgaccgcaatcgaagcggcggtcgcagcgcgcagcatctcctcggcgaaggaagagcgggaagccgccgaaaaggttctcggtctgccgccggtcggcgaaatcaaggtggccgacagggacggcttcatcaaggacctggaaaacgcgctgctcgccgccaagatcggcgcctatgcgcaaggcttcgcagtgatggcggcggcgtcgaaggagttcggctggaacctgccgatgccgacgatcgcaaagatctggcgcgccggctgcattatccgctcgcagttcctcgacgagatcaccaccgcctttaccaaagcaccggatgccgcgaacctgatcgtcacccccgccttcgccgccatggtcaaggagagcgacggcgcgttgcgacgggtggtttcgacggccgtcctcggcggtctgccggtgcctgcgctggcctcggcgctcggctatttcgacagctaccgccgcggccgcggcacggccaacgtcatccaggcgcagcgcgacttcttcggcgcccacggtttcgaccgtgtcgatggcgcagacagccatcacggtccatggggcagcggtctgaacgcttga

SEQ ID NO: 12037 - protein, 476 aa, Rhizobium meliloti
MSQAEIGLIGLGVMGSNLALNIAEKGNRIAVFNRTVDATRKFYAEAGALKDQIVPCETIEEFVAAIRPPRPIIIMIKAGDPVDQQMEALKPHLAKGDIMIDAGNANFRDTMRRFDALKDSGLTFIGMGVSGGEEGARHGPSIMVGGTEESYRRVEKVLTSIAAKYDSDPCVAWLGENGAGHFVKTIHNGIEYADMQMIAEIYGILRDGLKMTAQEIGEVFGAWNKGRLNSYLIEITEKVLKAADPLTGKPIVDMILDKAGQKGTGKWSVIEAQNMGVPATAIEAAVAARSISSAKEEREAAEKVLGLPPVGEIKVADRDGFIKDLENALLAAKIGAYAQGFAVMAAASKEFGWNLPMPTIAKIWRAGCIIRSQFLDEITTAFTKAPDAANLIVTPAFAAMVKESDGALRRVVSTAVLGGLPVPALASALGYFDSYRRGRGTANVIQAQRDFFGAHGFDRVDGADSHHGPWGSGLNA

SEQ ID NO: 12038 - DNA, 1440 bp, Streptomyces coelicolor
  CDS (1)..(1440)
atgagcactacagcgcagatcggcgtcacgggtctcgcggtcatgggccgcaacctcgcccgcaacttcgcccgcaacggctacacggtcgcggtgcacaaccggaccgcgtcgcgcacgcacgcgctggtggaggagttcgggagcgagggcgatttcgtggcgaccgagaccgccaaggagttcgtggccgcgctggagcgcccgcgacgcctggtgatcatggtgaaggcgggtgacccgaccgacgcggtgatccgggagttcgccccgctcctcgagcccggggacatgatcatcgacgggggcaacgcgcacttcgcggacacccggcgccgggagcgcgaactgcgcgagcagggcatccatttcgtgggcaccggcatctcgggcggcgaggagggcgcgctgcacgggcccagcatcatgccgggcggctcgaaggagtcgtacgagtctctgggcccgatgctggagaagatctcggcgaaggccgcggacgaggcgccctgtgtgacgcacgtcggtcccgacggcgcaggtcacttcgtcaagatggtgcacaacggcatcgagtacgccgacatgcagttgatcggcgaggcgtaccagctgctgcgcgacgtcgccgggtactcccccgcgcagatcgcggagatcttccgcgcctggaacaccggccgcctggactcgtacctgatcgagatcacggcggaggtgctgtcgcacgtggacggggcgacgggcaagccgttcgtggacgtggtggtcgaccaggcggagcagaagggcaccggccgctggacggtgcagatcgcgctggacctgggcgtgccggtgtcgggcatcgcggaggccgtcttcgcgcgctccctgtcggggcacgcggcgctgcgtgacgcctcgcgcggcctggccggcccgcaggcgtccccgctcggcgagtcggaggcggccgccttcgccgaccgcgtcgagcaggcgctgtacgcctcgaagatcgtgtcgtacacgcagggcttccacgagatcgccgcgggcagcgaggagtacgactgggacatcgacctcggcgccgtctcggcgatttggcgcggcggctgcatcatccgggcggccttcctggaccgcatccgggcggcctacgacgcccggccggacctgccgagcctgctgtcggacgagacgttcgcccaggagatcgccgccgcgcaggacgactggcgcgaggtcctggtcgccgcgacccggcagggcgtgccgacgccgggcttcgccgccgccctcgcctactacgacgccctgcgcgccgagcggctccccgccgcgctgacccaggggcagcgggacttcttcggggcgcacacgtaccgcaggacggaccgggacggcgccttccacacgctgtggggcggtgaccggtccgaggtcaccgcgtag

SEQ ID NO: 12039 - protein, 479 aa, Streptomyces coelicolor
MSTTAQIGVTGLAVMGRNLARNFARNGYTVAVHNRTASRTHALVEEFGSEGDFVATETAKEFVAALERPRRLVIMVKAGDPTDAVIREFAPLLEPGDMIIDGGNAHFADTRRRERELREQGIHFVGTGISGGEEGALHGPSIMPGGSKESYESLGPMLEKISAKAADEAPCVTHVGPDGAGHFVKMVHNGIEYADMQLIGEAYQLLRDVAGYSPAQIAEIFRAWNTGRLDSYLIEITAEVLSHVDGATGKPFVDVVVDQAEQKGTGRWTVQIALDLGVPVSGIAEAVFARSLSGHAALRDASRGLAGPQASPLGESEAAAFADRVEQALYASKIVSYTQGFHEIAAGSEEYDWDIDLGAVSAIWRGGCIIRAAFLDRIRAAYDARPDLPSLLSDETFAQEIAAAQDDWREVLVAATRQGVPTPGFAAALAYYDALRAERLPAALTQGQRDFFGAHTYRRTDRDGAFHTLWGGDRSEVTA

SEQ ID NO: 12040 - DNA, 1643 bp, Spinacia oleracea
  CDS (85)..(1536)
ggcacgagattgaacccacatcgttaaattttctgggttttcatttgatttctgatcaaccaattttccgagcaggaataagcaatggctcctcctacaaggattggtcttgctggtctggctgtgatgggtcaaaatcttgcactaaacattgctgaaaaaggattccccatttctgtttacaaccgtacaacctcaaaggttgatgagaccgttgaacgagctaaacaagaaggaaatcttcctctgtatgggtttcatgaccctgaatcctttgtgaattcaatccagaaaccccgtgtcataatcatgcttgttaaggctggggctccagttgatgcaaccatcaaaactttgtctgcctatttggagaaaggagactgcatcatcgatggtggcaatgagtggtatgagaataccgagaggagagagaaagcaatggaggaaaagggactgctctacctcggaatgggagtttcaggaggtgaagagggtgcaagaaatggaccctctatgatgcctggtggttcattcgatgcttacaaaaacatcgaggatattctaaccaaggttgccgcacaggttgatagtggcccttgtgtaacctatattggcaaaggaggttctggcaattttgttaaaatgattcacaacggaattgaatatggtgacatgcagttgattgcagaggcttatgatgtgctgaaatcagttggaaagctctctaatgaagagttgaaggaagtttttgcagagtggaacagaggagagcttcttagcttcttgattgaaatcacagcagatatttttggaattaaggatgacaaaggtgaaggatatttggtagacaaagtgttggataaaaccggtatgaagggtacaggaaaatggacagttcaacaagctgctgagttatctgttgctgcccctaccattgcatcatctttggactcgagatttctgagcggtctaaaagatgaaagagttgaagctgccaaggtgttcaaagctggaggggttgaggatacactctctgaccaagttgttgataaaaagaaattgatagatgatgttagacaagccctttatgctgcgaaaatatgtagctatgcacaaggaatgaacttgattcgtgcaaaaagtgttgagaaagagtgggatttgaaactcggggagctagctaggatctggaagggtggatgcatcatccgtgctatgtttctggaccggattaagaaggcttatgacaggaacccaaacctctcaaacctacttattgacccagaattttcaaaggagatgattgagcgtcaatctgcttggcgtagggttgtctgccttgctatcggtgctggtatcagcacccctggtatgtcatcaagtcttgcttattttgattcatataggagggaaaggttgcctgctaatttggtgcaggctcaaagagattattttggagcccatacctatgagagaattgatattcctggtgctttccataccgagtggttcaaactcgctaaatccaagatctaaggcggagattgatttgtggtcactctcttaattatttactctaataatcagcttgtggctgccacatttgagttatgcattttattcaatgatttttcctcgtgccg

SEQ ID NO: 12041 - protein, 483 aa, Spinacia oleracea
MAPPTRIGLAGLAVMGQNLALNIAEKGFPISVYNRTTSKVDETVERAKQEGNLPLYGFHDPESFVNSIQKPRVIIMLVKAGAPVDATIKTLSAYLEKGDCIIDGGNEWYENTERREKAMEEKGLLYLGMGVSGGEEGARNGPSMMPGGSFDAYKNIEDILTKVAAQVDSGPCVTYIGKGGSGNFVKMIHNGIEYGDMQLIAEAYDVLKSVGKLSNEELKEVFAEWNRGELLSFLIEITADIFGIKDDKGEGYLVDKVLDKTGMKGTGKWTVQQAAELSVAAPTIASSLDSRFLSGLKDERVEAAKVFKAGGVEDTLSDQVVDKKKLIDDVRQALYAAKICSYAQGMNLIRAKSVEKEWDLKLGELARIWKGGCIIRAMFLDRIKKAYDRNPNLSNLLIDPEFSKEMIERQSAWRRVVCLAIGAGISTPGMSSSLAYFDSYRRERLPANLVQAQRDYFGAHTYERIDIPGAFHTEWFKLAKSKI

SEQ ID NO: 12042 - DNA, 2054 bp, Spinacia oleracea
  CDS (217)..(1830)
gcacgagcaaaaaccctccgcaaaccccccatttccctccctcctcgttgcagcacgacagtcgacaccatctctttctctctcctccttcaacaatggcggctgttcgctctgcaattctgaaatacatgagggtgccagtagcccaaaacacttactctccatcttcgatttcatcttccatcaactccttcttctctcgccgcaacttttccgatgaggtccgaggttccttcctcgacgagtccgtcctttctctctcctccatttatacatcttccccttctttctctctcctcaccaactccccttccacactcttcctcctccactttctctctcttctcaacaatggcggcttctcaaatcggtctcgtcggcctcgccgtaatgggccaaaacctcgccctcaacatcgccgagaaaggcttccctatttccgtctacaatcgcacagcctccaaggtcgatgaaaccctagaccgcgccaagtcagaaggcgatctcccgctctctggccactacactcctcgcgatttcgtcctctccatagaacgccccagatccatcgttatcctcgtcaaagccggctcccccgttgatcaaactatcgcttctcttgcctcctttatggaacctggtgacactatcatcgacggaggtaacgagtggtaccaaaacacagagcgtcgtttatctgacgctcactccaacggcctcctctacctcggtatgggcgtctctggtggcgaagaaggcgctcgttttggcccctcgctcatgcccggcggagatttccaggcgtacgacaatatccaacacattttgaagaaggttgctgctcaagtcgatgatgggccttgtgttacatacatcggagaaggtgggtccgggaatttcgtgaagatggtgcacaatgggattgagtatggtgatatgcagctgatttcggaggcttatgatgtgttgaagaatgtgggtggattgagcaatgaggaattgggtcagatttttgatgagtggaataagagtgagcttgagagctttttggttgagattactgcggatatctttaaggtgaaggatgatttagcggatggaggtttggttgataagattttggataagactgggatgaaaggtactggcaaatggactgttcaacaagctgctgaactctctgttgctgctcctaccattgctgcttctttggattgcaggtatctaagtgggttgaaagaggagagagaaaatgcagccaagatattggaagctgcagggatgaaggaagaggttaatgcgattagaggtggggttgataagaagaggttgattgatgatgtgaggcaagcgttgtatgcttcaaagatctgtagttatgctcaagggatgaatttattgagggcgaagagtgctgagatgggttgggatttgaatttaggggagttggcgaggatttggaaaggtgggtgtattattagggcagttttcttggacagcattaagcaggcatatcagaggaaccccaacttagctagtttggtggttgatcctgagtttgctaaggagatggtacagaggcaagcagcttggagaagggttgtgggtttggcagtctctgctgggataagtacacctggaatgtgcgccagtcttgcttatttcgatacttacaggcgtgccagacttccagctaaccttgttcaagctcagagggactactttggcgctcatacctatgagagggttgatctccctggctcttaccacactgagtggtcgaagcttgctcgtaagagtgaccccaatgttgctgctgccctccactgagctacgcctttttcccttcccctgtgttttcttaccatgtatttctgttgtttccaattgaaattgggattttgtgcctccaacaatgatccctttttaggcataggaattgttacagtattgttttagctcattagaaatggtagcgggaactgatgttaataagagcatgtctttcggaatatcaatacaaagaggtgttgtgtgaactaaatctcgtgccg

SEQ ID NO: 12043 - protein, 537 aa, Spinacia oleracea
MRSEVPSSTSPSFLSPPFIHLPLLSLSSPTPLPHSSSSTFSLFSTMAASQIGLVGLAVMGQNLALNIAEKGFPISVYNRTASKVDETLDRAKSEGDLPLSGHYTPRDFVLSIERPRSIVILVKAGSPVDQTIASLASFMEPGDTIIDGGNEWYQNTERRLSDAHSNGLLYLGMGVSGGEEGARFGPSLMPGGDFQAYDNIQHILKKVAAQVDDGPCVTYIGEGGSGNFVKMVHNGIEYGDMQLISEAYDVLKNVGGLSNEELGQIFDEWNKSELESFLVEITADIFKVKDDLADGGLVDKILDKTGMKGTGKWTVQQAAELSVAAPTIAASLDCRYLSGLKEERENAAKILEAAGMKEEVNAIRGGVDKKRLIDDVRQALYASKICSYAQGMNLLRAKSAEMGWDLNLGELARIWKGGCIIRAVFLDSIKQAYQRNPNLASLVVDPEFAKEMVQRQAAWRRVVGLAVSAGISTPGMCASLAYFDTYRRARLPANLVQAQRDYFGAHTYERVDLPGSYHTEWSKLARKSDPNVAAALH

SEQ ID NO: 12044 - DNA, 1017 bp, Rhizobium loti
  CDS (1)..(1017)
atgcagatcggaatgatgggactgggccggatgggcgccaacatggtgcggcgcctgatgcgagacggccatgaatgcgtcgtctacgacatcaacccggcaagcgtcgcggctctggtcagcgacggcgcgctcggcgcggcctccctgacggaattcgtcggcaagctcgccaagccgcgctgtgtctggctgatgctgccggcggcgatcaccggcaagattatcgatcaggtctcggccctgatggaacccggcgacatcgtcatcgacggcggcaattcctactatcacgacgccgtcaaccaggcggccaaactggccgccaagggcatccatcttgtcgatgttggcaccagcggcggtgtctggggcctggagcgcggctactgcctgatgatcggcggtcccgacgtagcggtgcagcacctcgattcgatcttcgccacgctagcgcccggcgccgatgccggcgcgccggctcccgacaaggccgccggaaccgcgcccttcggctacctgcattgcgggccgagcggcgccggccatttcgtcaagatggtgcacaacggcatcgagtatggcgtcatggccgcctatgccgaaggcatgaacatcttgaagtcggccaatgccggcaagcggcaacgcacggccgacgccgagaccagcccgctggaaaacccgcaatattatcagttcgacatcgacctcccgcaggtggccgaggtctggcggcatggcagcgtcatcggctcctggctgctcgatctcaccgccggcgcgctgaagagcgatccgggcctggcccagttcggcggccgcgtctcggattccggcgaaggacgctggacgctgaaggcggcgatcgacaccggcgtgccggcgccggtgctgtcctcggcgctgttcgaccgcttctcctcgcaaggcgaatccgaattcgccgacaagctgttgtccgccatgcgctatgccttcggcggccatgtcgaaaagccgaaggccggcaagtga

SEQ ID NO: 12045 - protein, 338 aa, Rhizobium loti
MQIGMMGLGRMGANMVRRLMRDGHECVVYDINPASVAALVSDGALGAASLTEFVGKLAKPRCVWLMLPAAITGKIIDQVSALMEPGDIVIDGGNSYYHDAVNQAAKLAAKGIHLVDVGTSGGVWGLERGYCLMIGGPDVAVQHLDSIFATLAPGADAGAPAPDKAAGTAPFGYLHCGPSGAGHFVKMVHNGIEYGVMAAYAEGMNILKSANAGKRQRTADAETSPLENPQYYQFDIDLPQVAEVWRHGSVIGSWLLDLTAGALKSDPGLAQFGGRVSDSGEGRWTLKAAIDTGVPAPVLSSALFDRFSSQGESEFADKLLSAMRYAFGGHVEKPKAGK

SEQ ID NO: 12046 - DNA, 1428 bp, Rhizobium loti
  CDS (1)..(1428)
atggaaaaagccgaaatcggcctgatcggccttggcacgatgggctccaacctggcgctgaacatcgccgaacacggacaccgcatcgccgtcttcaatcgcaccagggcacgtaccgacgctttcgtcgagaatgccggcgcgctgaaggacatggtggtgccctgctacagcctggaagaacttgccgccgcgatccggccgccgcgcccgatcatcatcatggtgctggccggcaagccggtcgatgagcagatcgaagccttgcgtggcgtgctgtccggcaacgacatcgtcatcgatgccggcaacgccaatttccgcgatacgatgcggcgcttctccgaactgtccggttccgggctgaccttcatcggcatgggcgtgtccggcggcgaggagggcgcgcgccatggtccgtcgatcatggtcggcggcacggaggattcgtggaagcgggtcgagaaagtgctgaccgccatctccgccaagttcaaggacgagccctgtgccgcctggctcggcaccgatggcgccgggcatttcgtcaagaccatccacaacggcatcgaatatgccgacatgcagatgattgccgagatctacggcatcctgcgtgatgggctcggcatggggccgaaggacatcggcacggtgttctccaactggaacaagggccggctcaactcctacctgatcgagatcaccgccaaggtgctggccgccgacgatcccaagaccggcaagccggtggtcgacattatcctcgaccgcgccggccagaagggcaccggcaaatggtccgtcatcgaggcgcagcagctcggcattccggcgacagcgatcgaggcggccgtggcggcccgcgtgctgtcgtcgatcaaggacgagcggctggcggccgagaaagcctacggtaacatcggggtatcgaagatttccggcgacaaggatgcgctgctgaaagatctcgaactggcgctgttcgccggcaagatcgcggcctatgcgcagggcttcgcggtgatgagcggcgcctcgaaggagttcaactggaacctgccgatgccgaccatcgcccggatctggcgcgccggctgcatcatccgctcgcagatgctggatacgatggccgaggccttcagcagcggcggcgcttcgaccaatcttttgatggcgccggctttcatcagcttgatgcaggaagcgcatccgtcgctgcggcgcatcgtggcaaaggcttccgaggccggcgcgccggtgccggcgctgtcttcggcacttgcctatttcgacagctatcgccagggccgcggcacttcgaacctgatccaggcacagcgcgacttcttcggcgcgcatggcttcgaacgcatcgacgagcagggtgccttccacggcccgtggggcagcggcgccgccggttag

SEQ ID NO: 12047 - protein, 475 aa, Rhizobium loti
MEKAEIGLIGLGTMGSNLALNIAEHGHRIAVFNRTRARTDAFVENAGALKDMVVPCYSLEELAAAIRPPRPIIIMVLAGKPVDEQIEALRGVLSGNDIVIDAGNANFRDTMRRFSELSGSGLTFIGMGVSGGEEGARHGPSIMVGGTEDSWKRVEKVLTAISAKFKDEPCAAWLGTDGAGHFVKTIHNGIEYADMQMIAEIYGILRDGLGMGPKDIGTVFSNWNKGRLNSYLIEITAKVLAADDPKTGKPVVDIILDRAGQKGTGKWSVIEAQQLGIPATAIEAAVAARVLSSIKDERLAAEKAYGNIGVSKISGDKDALLKDLELALFAGKIAAYAQGFAVMSGASKEFNWNLPMPTIARIWRAGCIIRSQMLDTMAEAFSSGGASTNLLMAPAFISLMQEAHPSLRRIVAKASEAGAPVPALSSALAYFDSYRQGRGTSNLIQAQRDFFGAHGFERIDEQGAFHGPWGSGAAG

SEQ ID NO: 12048 - DNA, 1455 bp, Pasteurella multocida
  CDS (1)..(1455)
atgtcagtaaaaggtgacatcggcgttatcggcttagcggtaatgggtcaaaacttaattttaaatatgaatgatcacggctttaaagtagttgcatttaaccgtacgacttcgaaagtcgatgagtttttgcaaggtgcggcaaaaggcacgaatattattggtgcgtattcgttggaagatcttgccaataaattggagaaaccgcgtaaagtgatgctgatggtgcgtgccggtgaagtcgtggatcaattcattgaggcattattaccacacttagaagaaggcgacatcattattgatggtggtaacacgaattacccagatacaaaccgccgtgtcgcgtatttacgtgaaaaagggatccgttttattggaacgggcgtatctggtggtgaagaaggggcacgtttcggaccttctattatgccgggcggtgatgaatctgcatgggaacacgtgaaaccaattttacaagcgatttcagccaaaacagataaaggcgaagcttgttgtgattgggttggtcgtgatggtgctgggcatttcgtcaaaatggtgcataacgggattgaatacggcgatatgcaattaatttgcgaagcgtatcaattcttaaaagaaggcgtaggcttatctgatgacgaattagaagcaactttcaaagcgtggcgtaacaccgaattagatagctatttaattgatatcacagcggatattcttggctataaagatgaagatggcagccgtttagtcgacaaaattttggataccgcaggtcaaaaaggaacaggtaaatggacggggattaatgcccttgatttcggcattccattgactttaatcacggaatctgtctttgcccgttgcgtctcgtctttcaaagaacagcgtgtgcaagcctctcgcctattcaataaagtggtcggcaaagtagaaggcgacaaagcagcttgggttgaagcggtgcgtaaagccttattagcctccaaaattatttcttatgctcaaggttttatgctgattcgtgaagcgtcagaaaactttggctggcacattaactacggcggtacagcattattatggcgtgaaggttgtattatccgtagccgtttcttaggtaatatccgggatgcttatgaagccaatccggatctgattttcttaggttcagatgcctacttcaaaggtatcttagaaaatagcttaggcgaatggcgtaaagtggtggcgaagtcgatcgaagtgggtattccaatgccttgtatggcgtctgcgatcactttcttagacagctatacgagtgaacgtttaccagcgaacttactccaagcacaacgtgactatttcggtgcacatacttatgaacgtacggataaaccacgtggtgagttcttccataccaattggacaggtcgtggtggtgatgctgcatcgaccacttatgatgtgtaa

SEQ ID NO: 12049 - protein, 484 aa, Pasteurella multocida
MSVKGDIGVIGLAVMGQNLILNMNDHGFKVVAFNRTTSKVDEFLQGAAKGTNIIGAYSLEDLANKLEKPRKVMLMVRAGEVVDQFIEALLPHLEEGDIIIDGGNTNYPDTNRRVAYLREKGIRFIGTGVSGGEEGARFGPSIMPGGDESAWEHVKPILQAISAKTDKGEACCDWVGRDGAGHFVKMVHNGIEYGDMQLICEAYQFLKEGVGLSDDELEATFKAWRNTELDSYLIDITADILGYKDEDGSRLVDKILDTAGQKGTGKWTGINALDFGIPLTLITESVFARCVSSFKEQRVQASRLFNKVVGKVEGDKAAWVEAVRKALLASKIISYAQGFMLIREASENFGWHINYGGTALLWREGCIIRSRFLGNIRDAYEANPDLIFLGSDAYFKGILENSLGEWRKVVAKSIEVGIPMPCMASAITFLDSYTSERLPANLLQAQRDYFGAHTYERTDKPRGEFFHTNWTGRGGDAASTTYDV

SEQ ID NO: 12050 - DNA, 1407 bp, Escherichia coli
  CDS (1)..(1407)
atgtccaagcaacagatcggcgtcatcggtatggctgtgatggggcgcaacttggctctaagcatcgagagccgtggttataccgtatccgtctataatcgctcgcgtgaaaaaactgaagaggttgttgccgaaaacccaggtaagaaactggtcccttattacacggttaaagagttcgtcgagtctcttgaaactccacgccgtatcctgttaatggtcaaagcgggtgctggcactgatgctgcgattaattccctgaagccctatctagataaaggcgacatcatcattgatggcggtaataccttctttcaggacacaattcgtcgtaaccgtgaactttccgcggaaggctttaactttatcggggccggggtttcaggtggtgaagagggcgcgctgaaaggcccatctatcatgcctggtggccagaaagatgcgtatgaaatggttgtgccaatcctgaccaagattgccgcgatagctgaagatggtgaaccgtgcgtgacgtatattggtgcggatggtgcaggtcattacgtgaagatggtgcacaacggtatcgaatatggcgatatgcaattgatagctgaagcctattctctgctgaaaggtgccctaaatctgtctaatgaagagttagcctctatctttaatgaatggaatgaaggcgagctgagcagctatctgattgacatcactaaggatatcttcaacaaaaaagatgaagagggtaaatacttggttgatgtgattttggacgaagctgcgaacaaaggtacaggcaaatggaccagccagagctctcttgatctaggcgaaccgctgtcgttgatcaccgaatccgtatttgcccgctacatctcctctctgaaagaccagcgtgttgcggcctctaaagtgctgtctggcccgcaggctaaactggctagtgataaagctgagtttgttgagaaagtacgccgtgccttgtacctaggcaaaattgtctcttatgcccaaggcttttctcaacttcgtgccgcatcagagcaatacaactgggatttgaactacggtgaaatcgcgaaaattttccgcgcaggctgcattattcgtgcacagttcctccagaaaatcaccgacgcttatgctgaaaacaaagatattgcaaacctgctgcttgctccgtatttcaaacatatcgctgatgaatatcaacaagccctccgtgatgtagtgtcttatgctgtgcagaacggtattccggtaccgactttctccgccgctgtagcttactacgacagctaccgttctgcggttctgccggctaacttgatccaagcacagcgtgattatttcggtgcgcacacgtataaacgcattgataaagaaggtgtttttcatacagaatggctagaataa

SEQ ID NO: 12051 - protein, 468 aa, Escherichia coli
MSKQQIGVIGMAVMGRNLALSIESRGYTVSVYNRSREKTEEVVAENPGKKLVPYYTVKEFVESLETPRRILLMVKAGAGTDAAINSLKPYLDKGDIIIDGGNTFFQDTIRRNRELSAEGFNFIGAGVSGGEEGALKGPSIMPGGQKDAYEMVVPILTKIAAIAEDGEPCVTYIGADGAGHYVKMVHNGIEYGDMQLIAEAYSLLKGALNLSNEELASIFNEWNEGELSSYLIDITKDIFNKKDEEGKYLVDVILDEAANKGTGKWTSQSSLDLGEPLSLITESVFARYISSLKDQRVAASKVLSGPQAKLASDKAEFVEKVRRALYLGKIVSYAQGFSQLRAASEQYNWDLNYGEIAKIFRAGCIIRAQFLQKITDAYAENKDIANLLLAPYFKHIADEYQQALRDVVSYAVQNGIPVPTFSAAVAYYDSYRSAVLPANLIQAQRDYFGAHTYKRIDKEGVFHTEWLE

SEQ ID NO: 12052 - DNA, 1842 bp, Arabidopsis thaliana
  CDS (62)..(1525)
accaccaacctccgtcaaaaccctaaaccactatctctctctctctcttcatatcgcaacaatggagtccgtcgctctatctcgcataggtctcgccggtctcgcagtcatgggacaaaacctcgccttaaacatcgccgataaaggattcccaatctccgtctacaatcgaaccacttccaaagtcgacgaaaccttagatcgtgcctccaacgaaggaaaactcccagtcgctggtcaatactcgcctcgcgatttcgttctctcgatccaacggcctagatccgttatcatccttgtcaaagccggtgctcccgttgaccaaaccatctctgctctctctgaatacatggagcctggtgattgtatcatcgacggtggaaatgagtggtatcagaacacagagcgacgaatcgttgaagctgagaagaaaggattgctttatttaggtatgggagtctccggtggtgaagaaggagctcgtaatggtccttctcttatgcctggtggatctttcactgcgtataacaatgttaaagatattcttgagaaagttgctgctcaagtcgaagatggtccttgtgttacatacattggagaaggtggatctgggaattttgtgaaaatggttcataatgggattgaatatggtgatatgcagctgatttcggaggcgtatgacgtgttgaagaacgttggtggattgagtaatgatgaattggctgagatcttcacggagtggaatcgaggtgagcttgagagtttcttggttgagattacttcggatatatttagggttaaggatgattatggtgatggagagttagtggataagattttggataagactggtatgaaaggtacagggaaatggacggttcagcaggcggctgagctttctgttgcggcgcctacgattgctgcgtcgttggattgtagatacttgagtggattgaaggatgagagggagaatgctgctaaagttttggaagaagctggattgaaggaggatatcggttctgcgtctcgtggtgttgataagaagaggttgattgatgatgtgaggcaagctttgtatgcttctaagatctgtagttatgctcaagggatgaatttgcttagggctaagagtttagagaaaggttgggacttgaatttgggtgaaatggctaggatttggaaaggtgggtgtattatcagggcggttttcttggacaggatcaagaaagcttaccagagaaacccgaatttggcgagcttagtggttgatcctgattttgctaaagagatggttcagaggcaagctgcatggaggagagtggtgggtcttgctatatctgctgggattagcacaccaggaatgtgcgcaagtttagcgtatttcgacacttacaggcgtgctagattacctgcgaatctggttcaggcgcagagagatctctttggagctcatacatatgagagaaccgatcgtcctggtgcataccacactgaatggactaagcttgcaaggaagagtcagtaaagcatggacacagtcccttgatttgaggttattctctctctctctctctcacactctgtttttgtgcttattctgaattcaatgtttccatgttgttgtgtagggctttatttcatcatagaacacgaaaacaaattgtttcagcttatttttgttgagttataataagaaatgcaatgccccttgactctctgtatctgtctgttgatgatatctggagagtttcctttattttctcttatgtatggcttggttcatttttcgaatttgaatttgatatctatgttgaaattttggaagctgaagtcttcataatt

SEQ ID NO: 12053 - protein, 487 aa, Arabidopsis thaliana
MESVALSRIGLAGLAVMGQNLALNIADKGFPISVYNRTTSKVDETLDRASNEGKLPVAGQYSPRDFVLSIQRPRSVIILVKAGAPVDQTISALSEYMEPGDCIIDGGNEWYQNTERRIVEAEKKGLLYLGMGVSGGEEGARNGPSLMPGGSFTAYNNVKDILEKVAAQVEDGPCVTYIGEGGSGNFVKMVHNGIEYGDMQLISEAYDVLKNVGGLSNDELAEIFTEWNRGELESFLVEITSDIFRVKDDYGDGELVDKILDKTGMKGTGKWTVQQAAELSVAAPTIAASLDCRYLSGLKDERENAAKVLEEAGLKEDIGSASRGVDKKRLIDDVRQALYASKICSYAQGMNLLRAKSLEKGWDLNLGEMARIWKGGCIIRAVFLDRIKKAYQRNPNLASLVVDPDFAKEMVQRQAAWRRVVGLAISAGISTPGMCASLAYFDTYRRARLPANLVQAQRDLFGAHTYERTDRPGAYHTEWTKLARKSQ

SEQ ID NO: 12054 - DNA, 1929 bp, Arabidopsis thaliana
  CDS (280)..(1740)
ctcaaatccatctccgcgatacgaacaggtttgtttctccgatcatactctctctctttttgttttttccccaatcaattttggtttggtatctgattgttccaatcacttttcgatataaatgatgtgtaccgaaatttcagaaaaaattatttaacttttatgtgatccagcatttttgtgtgattccgttgaaaattcccattatgttgtttagatcggtgttttaagtaatcgaatcttcgctcttgttgttagtagagaagaagacttagaaaaatggctgttcaacctacaagaataggtctagctggacttgctgtgatgggtcagaacctagctctcaacattgcagagaaaggcttcccaatctctgtttacaacagaactacttccaaagttgatgagaccgtcgaacgagccaaaaaggaaggcaatcttcctctttacggcttccatgaccccgagtcttttgtcaagtccattcagaagccacgcgttattatcatgcttgttaaggctggttctcccgttgaccagaccatcaagaccctctctgcttatttggagaaaggtgactgtattgtcgatggtggtaatgaatggtatgagaacactgagaggagagaaaaagccgtggcggagaacggtttcctctaccttggaatgggagtttctggtggtgaagaaggtgctcgtaatggcccatctatgatgcctggaggctcttatgaagcctacaagaatatcgaagacattgttctcaaggttgctgctcaggttagggatagtggtccctgtgtgacttatatcggtaagggcgggtctggaaactttgtcaaaatggtccacaatgggatcgagtacggtgatatgcagctgattgcagaagcttatgacgtcctcaagtctgttggtaaattatcgaatgaggagcttcacagtgtcttctctgactggaacaaaggtgagcttgagagtttcttggtagagatcacagcagatattttcgggatcaaggacgataagggagatgggcatttggttgacaaggtcttggacaaaaccggcatgaaaggcacaggaaagtggaccgtgcagcaagctgctgagctatctgttcctgctcccaccattgaatcctctcttgatgcgaggttccttagcgggcttaaagatgaacgtgtgcaagcagctaaagtcttcaaggcaggtgggtttggagatatcttgaccgatcagaaagttgacaagaaacagctagtcgatgacgtgaggaaggctctttacgcatccaaaatctgcagctacgcacaaggcatgaaccttatccgtgccaagagcatagaaaaggggtggggattgaagctaggtgagttagctagaatctggaaaggaggctgcatcatcagagcaatcttcctagacaggatcaagcaagcttatgacaggaacgcagagctagctaacctcttggtggatccagagtttgcgaaagagataatcgagagacagtccgcgtggagaagagtcgtctgcttagctatcaactcgggtatcagcacaccgggtatgtctgcgagtctagcctactttgattcttacaggagagagagattgccggcaaatctagtccaagcacagagagactactttggtgctcatacatatgaaaggactgatgtggaaggatctttccacaccgagtggttcaagattgcaagacaatctaagatctgagatctctcatcctcttgtattcttcttctccttcaataataagttccacacagtatgtttctttcctcaatgtgtgagataccttggcttatttatgattgtagaactgagtttctcatctttgtgtttctttttcttaaaaagattaaaactgaagtctttggttataattttttacttttggtttca

SEQ ID NO: 12055 - protein, 486 aa, Arabidopsis thaliana
MAVQPTRIGLAGLAVMGQNLALNIAEKGFPISVYNRTTSKVDETVERAKKEGNLPLYGFHDPESFVKSIQKPRVIIMLVKAGSPVDQTIKTLSAYLEKGDCIVDGGNEWYENTERREKAVAENGFLYLGMGVSGGEEGARNGPSMMPGGSYEAYKNIEDIVLKVAAQVRDSGPCVTYIGKGGSGNFVKMVHNGIEYGDMQLIAEAYDVLKSVGKLSNEELHSVFSDWNKGELESFLVEITADIFGIKDDKGDGHLVDKVLDKTGMKGTGKWTVQQAAELSVPAPTIESSLDARFLSGLKDERVQAAKVFKAGGFGDILTDQKVDKKQLVDDVRKALYASKICSYAQGMNLIRAKSIEKGWGLKLGELARIWKGGCIIRAIFLDRIKQAYDRNAELANLLVDPEFAKEIIERQSAWRRVVCLAINSGISTPGMSASLAYFDSYRRERLPANLVQAQRDYFGAHTYERTDVEGSFHTEWFKIARQSKI

SEQ ID NO: 12056 - DNA, 912 bp, Methylobacillus flagellatum
  CDS (1)..(912)
atgaaacttgcaattatcggcttgggaaaaatgggcggcaacatggcacgccgtctccttaaacatggcatcgaagtcgtaggcttcgactttaatcaggatgcggtcaaccagatttccctgactaacggcatgattcctgccagctctgtcgaggatgctgtctccaagctgtcgggggaaccccggaaaattgtgtggatcatgctgcctagcggcgacatcaccgaaaaccagatcaaggaccttgtccccttgttgagcaaaggcgacatcatcgttgatggcggaaactcgaattacaaacatagtcagcgccgcggcgcttggctggccgagcacggcattgaattcattgactgtggtacctccggcggcatctggggcctagataatggctactgtctgatgtatggcgggagcaaggatgctgccgatgccgtggtgcccatcatgcaggcgctcgcacatgcagatcgcggctgggcgcatgtcggaccagtcggctccggccacttcaccaagatgatccacaacgggattgagtacggcatgatgcaggcatttgccgaaggcctcgacctgctcaagggcaaggaagagttcaaccttgacctcgcgcagatcacggagctttggcgccatggttctgtcgtccgcagctggctactcgacctgacagcggaagcgctggcgcacgatcaggagttgtccgcgattgcaccatacgttgcagattccggcgaaggccgctggacagtggtcgaggctgttgaccagggtgttgccgcccctgtgctgaccctggcattgcaaatgcgcttcgccagccaggaggatactggctacagctacaagctgctatccatgatgcgcaacgcctttggcggacatgccgtcaaaaccaagtaa

SEQ ID NO: 12057 - protein, 303 aa, Methylobacillus flagellatum
MKLAIIGLGKMGGNMARRLLKHGIEVVGFDFNQDAVNQISLTNGMIPASSVEDAVSKLSGEPRKIVWIMLPSGDITENQIKDLVPLLSKGDIIVDGGNSNYKHSQRRGAWLAEHGIEFIDCGTSGGIWGLDNGYCLMYGGSKDAADAVVPIMQALAHADRGWAHVGPVGSGHFTKMIHNGIEYGMMQAFAEGLDLLKGKEEFNLDLAQITELWRHGSVVRSWLLDLTAEALAHDQELSAIAPYVADSGEGRWTVVEAVDQGVAAPVLTLALQMRFASQEDTGYSYKLLSMMRNAFGGHAVKTK

SEQ ID NO: 12058 - DNA, 1440 bp, Leishmania major
  CDS (1)..(1440)
atgtcgaacgacctcggcattatcggtctcggcgtcatgggcgcgaatctcgccctgaacatcgccgagaagggatttaaagttgccgtcttcaaccgcacctacgcgaagacgacgtcgtttctcaaggagcatgagagcgagaaatttgccgccaacctgaatggatacgggaccatgaaggagttcgctgcgtccctcaagaagccgcgccgcgcgttcattctcgtccaggccggcgccgctactgactctacaatcgagcagctcaaggaagtgttcgagaacggcgacatcataatcgacactggtaatgcgaacttcaaggaccaggacaagcgcgcggctcagttggagagccagggtctccgcttcctcggcatgggcatctccggtggtgaggagggtgcgcgcaaggggccggccttcttcccgggtggcacaccaagcgtgtgggaggaggtgcgcccgatcgtggaggcggctgcggccaaggctgaggacggacgcccgtgcgtgactttcaacggcaagggcggcgctggctcctgcgtgaagatgtatcacaacgctggggagtacgccgtgctgcagatctggggtgaggcgtacagcgccctgcttgccttcggcttcgacaacgatcagatcgccgacgtgttcgagtcgtggaaggcggatggcttccttaaatcctacatgctcgacatctccgttgccgcttgccgagcgagggaggcaacaggcaactatttgtcagagaaggtcaaggaccgcatcggctccaagggcaccggcctctggtctgcccaggaggctctggagattggtgtgccagcgccctcgctcaacatggccgtcatctcacgccagatgaccatgtacaaaggggagcgcatcgccaactgcaaggcgtttcctaacttccctcgtggcccttctgaggaagccacggacaagtccccgaactcccccgaagcgaagaagctgtaccacgccgtcagcctttgtatcatcgcgagctacgcgcagatgttccagtgcttgcgcgagctggacaaggtgtatggattcggcctgaacctgcccgccacgatcgccaccttccgcgccggctgcattctgcagggctacctgctagggcctatgaccaaggccttcgaggagaacccgaacctgcccaacctgatggacgccttcaccaaggagatagcggcgggccttgatgactgccgtcagattctcgccaagctcacagagaacacggcagtgtcactgccggtcatgatggcctcactgtcctacatcaacgccatgtacacggagactcttccgtacggacagctggtgtcgttgcagcgcgacgtctttggccgccacggctacgagcgcacggacaaggacggtcgtgagtcgttcgaatggcccgcactgcagtag

SEQ ID NO: 12059 - protein, 479 aa, Leishmania major
MSNDLGIIGLGVMGANLALNIAEKGFKVAVFNRTYAKTTSFLKEHESEKFAANLNGYGTMKEFAASLKKPRRAFILVQAGAATDSTIEQLKEVFENGDIIIDTGNANFKDQDKRAAQLESQGLRFLGMGISGGEEGARKGPAFFPGGTPSVWEEVRPIVEAAAAKAEDGRPCVTFNGKGGAGSCVKMYHNAGEYAVLQIWGEAYSALLAFGFDNDQIADVFESWKADGFLKSYMLDISVAACRAREATGNYLSEKVKDRIGSKGTGLWSAQEALEIGVPAPSLNMAVISRQMTMYKGERIANCKAFPNFPRGPSEEATDKSPNSPEAKKLYHAVSLCIIASYAQMFQCLRELDKVYGFGLNLPATIATFRAGCILQGYLLGPMTKAFEENPNLPNLMDAFTKEIAAGLDDCRQILAKLTENTAVSLPVMMASLSYINAMYTETLPYGQLVSLQRDVFGRHGYERTDKDGRESFEWPALQ

SEQ ID NO: 12060 - DNA, 1809 bp, Arabidopsis thaliana
  CDS (125)..(1588)
ggctccatcgacgagtccgtcattttcacagtataaatatctccacccactctctctcatcactcccactacctcatttttctctctctacctaaccaatcctaagctcatctctctatctccaatggagtccgccgcactatcccgaatcggtctcgccggactcgccgtgatgggccaaaacctcgccttaaacatcgccgagaaaggtttcccaatctcagtctacaatcgaaccacttccaaagtcgacgaaaccctagatcgagccgccgtcgaaggaaacctcccagtctccggccaatactctccccgcgatttcgtcctctcgatccaacggcctagatctctcatcatcctcgtcaaagctggagctcccgttgaccaaacaatcgacgccttctccgaatacatggagccaggagattgcatcatcgacggtggaaacgaatggtatcagaacacagagcgacggatctccgaagctgagcaaaaaggattgctctatttaggtatgggagtctccggcggcgaagaaggagctcgtaacggtccttcgttaatgcctggtggatcatttcaagcttatgataacatcaaagatattttggagaaagtcgcagctcaagttgaagatggaccttgtgttacttacatcggagaaggtggatctggaaatttcgtgaagatggttcataatgggattgagtatggagatatgcaattgatctctgaagcttatgatgtgttgaagaacgttggtggattaagcaacgaggagcttgctgagattttcactgagtggaattcaggtgagcttgagagtttcttggttgagataacttctgatatatttagggttaaggatgagtttggtgatggagagttagttgataagattttggataagactggtatgaaaggtactgggaaatggacggtgcagcaagcggcggagctgtctgttgcagctccgacgattgctgcttcgttggattgtaggtatttgagtgggttgaaagatgagagggagaatgcagcgaaagtgttgagggaagctggattgaaagaagagattggttctgcgtcgagtggaatcgataagaagagattggttgatgatgttaggcaagctttgtatgcttccaagatttgtagttatgctcaagggatgaatttgcttagagctaagagtttagagaagagttggaacttgaattttggtgaattggctaggatttggaaaggtggttgtattataagagcggttttcttggataggatcaagaaagcttaccagaggaacccggacttggctagtcttgtggttgatcctgagtttgctaaagagatggttcagagacaagctgcttggagaagagttgttggtttggctgtttctgctgggattagcacgcctggaatgtgtgctagtcttgcgtatttcgatacttatagacgtgctagattgccggcgaatctggttcaggcgcagagagatctctttggagctcacacttatgagagaaccgatcgtcctggtgcgtaccatactgaatggactaagcttgccaggaagaaccattgaaaaatccctttctgtttttgtaaaagccctatttgtcttgcttatttttgagcaattggaaatgggatttcaaaccacattgtttaacacgagtattttgttcagatttcagaataagaaatgcagcagcaccttgatttttgtttttgtttctgaacatctttgcttttaaatttgtaaaacatatctcccctgtctttaatagatcgaatgtctagacg

SEQ ID NO: 12061 - protein, 487 aa, Arabidopsis thaliana
MESAALSRIGLAGLAVMGQNLALNIAEKGFPISVYNRTTSKVDETLDRAAVEGNLPVSGQYSPRDFVLSIQRPRSLIILVKAGAPVDQTIDAFSEYMEPGDCIIDGGNEWYQNTERRISEAEQKGLLYLGMGVSGGEEGARNGPSLMPGGSFQAYDNIKDILEKVAAQVEDGPCVTYIGEGGSGNFVKMVHNGIEYGDMQLISEAYDVLKNVGGLSNEELAEIFTEWNSGELESFLVEITSDIFRVKDEFGDGELVDKILDKTGMKGTGKWTVQQAAELSVAAPTIAASLDCRYLSGLKDERENAAKVLREAGLKEEIGSASSGIDKKRLVDDVRQALYASKICSYAQGMNLLRAKSLEKSWNLNFGELARIWKGGCIIRAVFLDRIKKAYQRNPDLASLVVDPEFAKEMVQRQAAWRRVVGLAVSAGISTPGMCASLAYFDTYRRARLPANLVQAQRDLFGAHTYERTDRPGAYHTEWTKLARKNH

SEQ ID NO: 12062 - DNA, 3158 bp, Laminaria digitata
  CDS (68)..(1660)
ctcaaccgagcttgacaatctcgataagtgctaaggatcgagagaggttctacgcgactcatccaagatgtccgcttccgcgctgtccgacgttggcctctatggcttggcggtcatgggacagaacttcgcgctcaacatggcgagccacggcttctccgtgtctgtgagcaaccggtcgcccgagaaggttgacgctaccgttgcgcgcgccaaggaggagggcaacctccccttgaggggcttcaaggaccccaagagcttcgtggactccctctcgaaacctcgcaagatcgtcctgctcgttcaggccggcgccgccgtagacgccaccatcgccacgctttccgagctcttggaggaaggagacatcctcgtcgacggtggcaacgagtggttccccaactcgcagcgccgcgcgaaggagctggagccgaagaagatcatgttcgtcggcatgggtgtctccggcggagaggaaggcgcgcgcaacggcccctcgcttatgcccggtgggcctagggaggcgtacgacgcgctttcgcccatcatttcgaagtgtgctgctcaggtcgacggaccgtgcacaacttacctgggcagcatcggctcaggaaactacgtgaagatggtccacaacggcatcgagtacggagacatgcagctcattgccgaggtgtacgacgtactcaagcacgtggctggcttgaccaacgacgagctttcggctacgttcacggactggaaccagggagagctccagagctttttgatcgagatcacggccgtgattttttcgaggaaggacgacctcacgtccagcggccacgtcgtagacaagatcctcgacaagacaggcatgaagggcactgggcgatggacggtccaggaagccgccgaacgcagcaccgccgcgcctaccatggccgccgcactcgatgcccgctacatgagcggccgcaagggcgagcgtgttgaagctgccaagactctcaagggacccagcacgatcccccaggtgcctaaggcgcagctgatcgaggacatgaaggccgccctttactgctccaagatctgctcatacgcacagggcatgaacctcatcaaggccgcatccgagcacttcgagtggggcgtggacctcggagagtgtgcccgtatctggaagggcggctgcatcatccgggctgcgttccttgacgacatcaagaacgcctatatcaagaacgccgacctcgacaaccttcttgtcgaccccttcatcacctctcagatcttggagcgccaggcggcctggaggcgtgtggtgaccctctgcgtggcaagcggcatcgctgcccctgccatgaccgcgtctctgtcctacttcgactcctaccgccgcgctcgcttgccagccaaccttgttcaggctcagcgcgacttcttcggagcgcacacgtacgagcgcgtggacaaggagggagtcttccactgcctctgggacgacacccacaaggaaatcgcgacatcgccggcgcatggcgggcgaactctaataggatcgctcccaaacttgttccgtcctttgtgtatggggtgtctaaattggagcagcacggtcgtgtctgtagcatactgcggtatgaagtattacatagggagcctgagttttacgtaggcgttagcgtttttttgtgcaatatttgtgcaatacgcatgtttttgtagtcgcttgggtaatcgatggtgtagttgcactagttgtggattacagatggcctcgagtccacgttacagtaccagtgctactttactttgactgagaacagccaaattgcttgcttcgagctacgcaatggtgatcgctgactccaaccggacgagctgttgagactgattgaaccatctctgtagggaaatggattcggtcaagagcaaccgtgtattggtagccagtttacggtagaaataagtaaagacaagggttactgttatgcgtgttgagcttgccttggaaaccaaacaagtaaaaattacacattcctgcacacttttgtcgcgtttgagggaggaagggcatgccaaaatatcggggatgattttcctgcaccccaattttgcttaagggccggggggggggggatggtgatagtcgatttagtcccgaggtaatagtcgtttagtcccgagagacttttcgtctcgtcggtatgtaggtcagacgtcacgaattaaagtaaatataaaaaaaaaaaaaaaaaacctcgtgccgaattcggcgactcgtggccaatcggccagggcccggagtctaccccctacaagggggatgctggatggtcaacgtgtactttccgcccaactacccttctgttgcccccgacctccggttcaacacccccatccggcactgcaacatcaacgcccacgggagggtatgccactccctcctcgaccggtcgtggacgccaagcacgtccgtgtcgtccatcttgggctgcgtgtacggactgctgctctatcctgaccacgacgaccccctagattcaaccctgacgctgcagatgtatgattccaacggggaatacgaggcggccatcatcgagcacgtcatggcccacgccagcaagccgcggaaggtgtgggcgacggagctggaggccgagggtatgtcggaggaggacaggttggccccgtgcttgaggactctggacgaagccgagaaggctctcaagttggcaacttggacgaggcaaggcaggaagcgtgggtggcgtcggtcttggcagctggcggacccgcgcccatcacggtagccccttccatcacaaaaaagcagcacgaagctcacctcccggccctggaggtcgcccgcgcctccgcgtgcatggtggttgcctgggcggcgctgaaggagcctatcccaaagctggacgaagccgagggcatcgtggcaaaagcgcgccgccacaacggcgaaagctcggacgccagcgcttgcctcgcgaaggtggcccaacttcgctggaagaggtgcacgccgttcccggctggggattgccaggctcagggacgccatcgcacggcaaacgtcctatttgcatatggcagacatcaagtcgggcgccatggaggaggcgaggaaagacctacttgctcttcagaccgagctcgag

SEQ ID NO: 12063 - protein, 530 aa, Laminaria digitata
MSASALSDVGLYGLAVMGQNFALNMASHGFSVSVSNRSPEKVDATVARAKEEGNLPLRGFKDPKSFVDSLSKPRKIVLLVQAGAAVDATIATLSELLEEGDILVDGGNEWFPNSQRRAKELEPKKIMFVGMGVSGGEEGARNGPSLMPGGPREAYDALSPIISKCAAQVDGPCTTYLGSIGSGNYVKMVHNGIEYGDMQLIAEVYDVLKHVAGLTNDELSATFTDWNQGELQSFLIEITAVIFSRKDDLTSSGHVVDKILDKTGMKGTGRWTVQEAAERSTAAPTMAAALDARYMSGRKGERVEAAKTLKGPSTIPQVPKAQLIEDMKAALYCSKICSYAQGMNLIKAASEHFEWGVDLGECARIWKGGCIIRAAFLDDIKNAYIKNADLDNLLVDPFITSQILERQAAWRRVVTLCVASGIAAPAMTASLSYFDSYRRARLPANLVQAQRDFFGAHTYERVDKEGVFHCLWDDTHKEIATSPAHGGRTLIGSLPNLFRPLCMGCLNWSSTVVSVAYCGMKYYIGSLSFT

SEQ ID NO: 12064 - DNA, 1422 bp, Buchnera aphidicola
  CDS (1)..(1422)
atgttaaagcaacaagttggtgttataggaatggcagtaatgggaagaaatttagcattaaacattgaaagtaagaagtatacggtatctatttttaatagaactcaatctgtaaccgaagaagttatcaataataacaaagaaaaaaaaatttttccatatttttctattaaagattttgtaaattcattaagaaaacctagatgtattttactcatggtaaaatcagggcaacctacagatgaaactattcaatttattcttccttatttaaataaaggagatatattgattgatggtggaaataccttttataaagactctattagaagaagtaatgatttaatgaaatgtggcattaattttatcggaatgggtgtatctggaggcgagttaggagcattaaatggtccatctattatgccaggtggatccagggaagcatatgatctagtttcttctatgttaaagaaaatatctgcgaaatttaaaaatgaaccatgtgttagttatattggtccaaatggcgctggtcattatgttaaaatgattcacaatggtattgaatatggtgatatgcaattaatatcagaatcatattttatattaaaaaatgtattgaatatgaaaaatgaggaattatctaatacattttctcaatggaataaaggtgagttaaatagttatttaattgaaataacaaaaaatatttttcttaaaaaagaaaaagatggtattcattatttaatagattctatattagatcacgcagaagataaaggcaccggtaaatggattagtcaagatgctttagaacttcatgaaccgctctcactcattactgaatctgttttcgcaagatatttgtcttctcttaaagatcaacgtcttattgcatcaaaaattttaaaaggtccgattttaaaatgtatatcttctcagaataaagaactttttgttgaagaagtacgaagagctttatatttaggtaaaataatttcctatgcacaaggtttctctcaattaaaaaaagcttcagaaaaatattcttggaatttacaatatggtaaaattgctaagatttttagagctggttgtattattcgcgctgattttttagaaagaataactgatgcatttaaaagtaacaatgtaactaacttgttattgacaccttatttttcagaaatatctaataaatatgaaaaatctttacgttatattacctcatatgcaataaaatacggtattcctgttcctacttttgcatccgctatatcatattacgataattatcgaacaatgtcttcgtctgcaaatttaattcaagctcaaagagattattttggagcacatacttatagaagaactgataaaaaaggatattttcatacgaattggttaactaaaaaagagctttaa

SEQ ID NO: 12065 - protein, 473 aa, Buchnera aphidicola
MLKQQVGVIGMAVMGRNLALNIESKKYTVSIFNRTQSVTEEVINNNKEKKIFPYFSIKDFVNSLRKPRCILLMVKSGQPTDETIQFILPYLNKGDILIDGGNTFYKDSIRRSNDLMKCGINFIGMGVSGGELGALNGPSIMPGGSREAYDLVSSMLKKISAKFKNEPCVSYIGPNGAGHYVKMIHNGIEYGDMQLISESYFILKNVLNMKNEELSNTFSQWNKGELNSYLIEITKNIFLKKEKDGIHYLIDSILDHAEDKGTGKWISQDALELHEPLSLITESVFARYLSSLKDQRLIASKILKGPILKCISSQNKELFVEEVRRALYLGKIISYAQGFSQLKKASEKYSWNLQYGKIAKIFRAGCIIRADFLERITDAFKSNNVTNLLLTPYFSEISNKYEKSLRYITSYAIKYGIPVPTFASAISYYDNYRTMSSSANLIQAQRDYFGAHTYRRTDKKGYFHTNWLTKKEL

SEQ ID NO: 12066 - DNA, 1407 bp, Buchnera aphidicola
  CDS (1)..(1407)
atggctaagcaacaaattggtgttataggtatggcggtaatgggacgtaatttagcattaaatatggaacgaaatcaatatacagtatctatatttaatcgatcattagatattactgagaagattatattaaataatcctaacaaaaatttatttccatttttttctataaaagattttgttctttctttaatagtacctagatgtattgtattaatgataaaatcaggagtagctactgacgatacgattaaatcgctaattccttatttaagcaaaggagatattattattgatggtggaaatacattttataaagatactattcaacgtggttatgaattattaaaaataggagtaaatttaattggagctggtttttcaggaggagaaaaaggtgcattatatggtccgtcaatcatgccaggtggtcgtcaagaagcttataattatgtatcacctattttaaaaaaaatagcttcaaattctgaaggaataccatgtgttacgtatattggtcctgatggatctggtcattatgttaaaatggttcataatggtattgaatatggtgatatgcaactgatagctgaatcttattttattttaaaaacattgttgcgactagacaatcaaagcatttcaaaaatttttgatatttggaatcaaggagaattaaacagttatttaattgatatcactaaagatattttaattaaaaaggatgatcagaataattatttaatagattgtatattagacgaaggaagtagcaaaggaacaggtacttggaccactaaaagtgctttagatctgaatgaaccgttaactctaattactgaatcagttttttttaggtatttatcttcattaaaatctcaacgtttattagcgtctaagatattgtgtggtcctaaagatttttttatagttttgaatcgcgatgattttattgaaaaaattcgacaggctttatatttaggaaaaataatttcatatgctcaaggattttcacaattaaatagtgcatctcaaaaatataattggaatttaaagttaggtgaaatttctagaatttttcaatcaggatgtattattcgagcaaaattacttaaaaatattactcaagaatattctagtaataataattttgttaatttattacttacaccttatttcagagaaattgctaatacatatcatagttcgttacgtgaaatcgtgtctatttcagttaaatatggaattcctatacctgctttgtcatctgctatttcatattttgatagttatagatcggcattcttaccttctaatttaattcaggcacaacgagatttttttggagcacacacgtataaaagaattgataaatcaggaatttttcacactaattggtattcttaa

SEQ ID NO: 12067 - protein, 468 aa, Buchnera aphidicola
MAKQQIGVIGMAVMGRNLALNMERNQYTVSIFNRSLDITEKIILNNPNKNLFPFFSIKDFVLSLIVPRCIVLMIKSGVATDDTIKSLIPYLSKGDIIIDGGNTFYKDTIQRGYELLKIGVNLIGAGFSGGEKGALYGPSIMPGGRQEAYNYVSPILKKIASNSEGIPCVTYIGPDGSGHYVKMVHNGIEYGDMQLIAESYFILKTLLRLDNQSISKIFDIWNQGELNSYLIDITKDILIKKDDQNNYLIDCILDEGSSKGTGTWTTKSALDLNEPLTLITESVFFRYLSSLKSQRLLASKILCGPKDFFIVLNRDDFIEKIRQALYLGKIISYAQGFSQLNSASQKYNWNLKLGEISRIFQSGCIIRAKLLKNITQEYSSNNNFVNLLLTPYFREIANTYHSSLREIVSISVKYGIPIPALSSAISYFDSYRSAFLPSNLIQAQRDFFGAHTYKRIDKSGIFHTNWYS

SEQ ID NO: 12068 - DNA, 1610 bp, Candida albicans
  CDS (29)..(1582)
aaatataaaaataaatcaaaaaaggaaaatgaaaaattttaatgccttatcaagattatcaatcttgtcaaaacaattatcgttcaataatactaacagttctattgctagaggtgatatcggtttaattggtttagccgttatgggtcaaaacttgattcttaacatggccgaccatggttacactgttgttgcttacaacagaaccactgccaaagttgatcgtttcttagaaaacgaagctaaaggtaaatccatcctcggtgctcactccatcaaggaattggttgatcaattaaagagaccaagaagaattatgcttttggtcaaagctggtgctccagttgatgaattcattaaccaattattgccatacttggaagaaggtgatatcatcattgacggtggtaactcccatttcccagattctaacagaagatacgaagaattggccaagaaaggtattttgtttgttggttccggtgtttctggtggtgaagaaggtgctagaactggtccatctttgatgccaggtggtaacgaaaaagcttggccacacattaaagagatcttccaagatgttgccgccaagagtgatggtgaaccatgttgtgactgggttggtgatgccggtgctggtcattacgtcaagatggtccacaatggtattgaatatggtgatatgcaattgatttgtgaagcttacgatcttatgaagagagttggtaaatttgaagacaaagaaattggtgacgtgtttgccacatggaacaaaggtgttttggattctttcttgattgaaatcaccagagacattttatactacaatgacccaactgacggtaaaccattggttgaaaaaatcttggatactgctggtcaaaaaggtactggtaaatggactgctgtcaatgcccttgatttgggtatcccagttactttgattggtgaagctgtcttttctagatgtctttctgccatgaaagccgaaagagttgaagcctctaaagccttgaaaggtccacaagttactggtgaatctccaattactgacaaaaaacaatttattgatgatttagaacaagctttgtatgcttccaagattatctcctacacccaaggtttcatgttgatgaaccaagctgctaaggattacggctggaaattgaacaatgctggtattgccttgatgtggagaggtggttgtattatcagatcagttttcttggctgaaattactgctgcttacagaaagaaaccagacttggaaaacttgttgctttacccattctttaacgacgctatcactaaagctcaatctggatggagagcttctgttggtaaggctattcaatatggtattccaactccagctttctctactgctttggctttctacgatggtttaagatctgaaagattaccagctaacttgttacaagctcaaagagattactttggtgctcatactttcaaggtcttgccaggtcaagaaaatgaattgttgaagaaagatgaatggattcacattaactggactggtagaggtggtgatgtttcttcaactacttacgatgcttagagaaaatagtgttaacatgaatttttga

SEQ ID NO: 12069 - protein, 517 aa, Candida albicans
MKNFNALSRLSILSKQLSFNNTNSSIARGDIGLIGLAVMGQNLILNMADHGYTVVAYNRTTAKVDRFLENEAKGKSILGAHSIKELVDQLKRPRRIMLLVKAGAPVDEFINQLLPYLEEGDIIIDGGNSHFPDSNRRYEELAKKGILFVGSGVSGGEEGARTGPSLMPGGNEKAWPHIKEIFQDVAAKSDGEPCCDWVGDAGAGHYVKMVHNGIEYGDMQLICEAYDLMKRVGKFEDKEIGDVFATWNKGVLDSFLIEITRDILYYNDPTDGKPLVEKILDTAGQKGTGKWTAVNALDLGIPVTLIGEAVFSRCLSAMKAERVEASKALKGPQVTGESPITDKKQFIDDLEQALYASKIISYTQGFMLMNQAAKDYGWKLNNAGIALMWRGGCIIRSVFLAEITAAYRKKPDLENLLLYPFFNDAITKAQSGWRASVGKAIQYGIPTPAFSTALAFYDGLRSERLPANLLQAQRDYFGAHTFKVLPGQENELLKKDEWIHINWTGRGGDVSSTTYDA

SEQ ID NO: 12070 - DNA, 1923 bp, Ceratitis capitata
  CDS (222)..(1667)
agttatcgcgcgattgccaacaagttcggtacgggaactaaagtgagctgtgaagaaacgagtgtctagaagctagtttgttcaagcggtgaataaactttgtgcgaaaaaacgtttgtagtgatcgacaaaagtgtggaataaaagggcaaagggaacgttttagaacgtaaagtaaaggcatattttagaaatacaagcaaagcaataacaaaataatcatgtcagctaaagcggatattgcactgatcggtttggccgttatgggtcagaatctcgtattgaatatgaatgataaaggctttgtggtttgcgcctacaatcgcacggtcgagaaggtcaatcaatttctaaagaacgaggccaagggtacaaatgtgatcggtgccacatcgctgcaggatatggtgaacaaattgaagttgccacgcaaaattatgcttttggtcaaggccggtagcgctgtggatgatttcattcagcaattggtgccactattatcgcccggtgatgttattatcgatggtggtaactccgagtaccaggataccgcacgccgttgcgatgaattgcgcgccaagaagatattgtatgttggctctggtgtgagtggtggcgaagagggtgcacgtcatggtccatctcttatgcctggtggtcatcccgaagcgtggccacttatccaacccattttccaatctatctgcgcgaaggcagacaaagaaccctgctgtgagtgggtgggtgaaggcggcgccggacactttgttaaaatggtacacaatggcatcgagtatggtgatatgcagttgatttgcgaagcttatcaaattatgaaagcgcttggactctcacaagctgagatggctactgagtttgagaaatggaatagtgaagaattggattctttccttatcgaaatcacacgtgatattctcaattatcaagacgatagaggctacttgttggaacgtattcgtgatacagccggtcagaagggtactggaaagtggaccgcaatctctgcactacaatatggtgtgcctgttacgctaatcggtgaggcggtattctcacgttgtctctctgcattgaaggatgaacgtgtagcggctagcaaacaattgaagggaccaaatgttaatgccaaagtcgaggatttgccaaaattcttgaatcacattaaacatgccctttactgctcgaaaatcgtgtcctacgcacaaggtttcatgctgatgcgtgaggcagccaaggagaacaactggaacttgaattatggtggtattgcattgatgtggcgtggtggttgtatcattcgcagtgtcttcttgggcaacatcaaggacgcttacacccgcaacccacaactttcgaacttattgttggatgatttcttcaagaaggctatcgaggttggacaaaactcttggcgccaggtggtggccaatgcattcctctggggtattcctgtaccagctctctcaaccgccctctccttctacgatggctaccgtacagagaaattgcccgccaacttgttgcaagcgcagcgtgattatttcggcgcacacacctatgaactcttgggcgctgagggcaaatttgtgcataccaattggaccggcactggtggcaatgtctctgcaagtacataccaggcgtaaggtcgttatgtacatatgtagatacatacaaatcatgaagaaaataccgaaaatattcaggttccccaaaagggcattccacttatttagaaattaattagaacttaattttatattcaagcgtttgtgagtacttgaagatatgtacatacgtatgtacatacatatgtagatataaataaatggtgtaaataaagcaaataattacgcaaatgggtattaaacgaatgaaatacttaaaaaaaaaaaaaaaaaa

SEQ ID NO: 12071 - protein, 481 aa, Ceratitis capitata
MSAKADIALIGLAVMGQNLVLNMNDKGFVVCAYNRTVEKVNQFLKNEAKGTNVIGATSLQDMVNKLKLPRKIMLLVKAGSAVDDFIQQLVPLLSPGDVIIDGGNSEYQDTARRCDELRAKKILYVGSGVSGGEEGARHGPSLMPGGHPEAWPLIQPIFQSICAKADKEPCCEWVGEGGAGHFVKMVHNGIEYGDMQLICEAYQIMKALGLSQAEMATEFEKWNSEELDSFLIEITRDILNYQDDRGYLLERIRDTAGQKGTGKWTAISALQYGVPVTLIGEAVFSRCLSALKDERVAASKQLKGPNVNAKVEDLPKFLNHIKHALYCSKIVSYAQGFMLMREAAKENNWNLNYGGIALMWRGGCIIRSVFLGNIKDAYTRNPQLSNLLLDDFFKKAIEVGQNSWRQVVANAFLWGIPVPALSTALSFYDGYRTEKLPANLLQAQRDYFGAHTYELLGAEGKFVHTNWTGTGGNVSASTYQA

SEQ ID NO: 12072 - DNA, 1594 bp, Cunninghamella elegans
  CDS (28)..(1485)
gaattcgcggccggtcgacaaacaatcatggttgaagctgttgctgatattggtcttattggtttagccgttatgggtcaaaacttgattttgaacatgaacgaccacggttttgttgtttgtgcttataaccgtactacttctaaagttgatgacttcttagctaatgaagctaaaggtactaatgttgttggtgctcactctgttgaagaactctgtgccaaattaaaacgccctagaaaggtcatgttacttgttaaggctggttctgccgttgatgctttcattgatcaacttttacctcatttagaagaaggtgatattatcattgatggtggtaattctcatttccctgattctatccgtcgtactaaggaattagaagctaaaggtattcttttcgttggttccggtgtttctggtggtgaagaaggtgctcgttatggtccttctttaatgcctggtggtaattctaaagcttgggaacatattcaacctatcttccaagctatcgctgctaaggctcccgatggtgcttcttgttgtgaatgggtaggtgaaactggtgctggtcattatgttaagatggtacacaacggtattgaatatggcgatatgcaattgatcactgaagtttatcaaattttacatgaaggtcttggtttaagtcacgatgaaatggctgatatctttgaagaatggaacaagggagatttagattccttcttaattgaaattacacgtgatatccttagattcaaggatactgatggtcaaccattagttaccaagattcgtgatacagctggtcaaaaaggtactggtaaatggactgctattgattctttagatcgtggtatccctgtcactttaattggtgaagccgtttattcccgttgtttatcttctcttaaagatgaacgtgttcgtgcttccaagatcttacaaggtccctcttcatccaaattcactggtgataagaaaaccttcattgctcaattaggacaagctctttatgctgccaagattgtttcttatgctcaaggttatatgttaatgcgtcaagctgctaaggattatgaatggaagttaaataatgctggtattgctttaatgtggcgtggtggatgtatcatccgttccgtcttcttaggaaagattcgtgatgcttacaccaagaaccctgaattagaaaatttattattcgatgatttcttcaaggatgctactgctaaggcccaagatgcttggagaaacgttactgctcaagctgtgcttatgggtatccctacccctgctttatctactgctttgaacttctatgatggtcttcgtcatgaaatcttacctgctaacttacttcaagctcaacgtgattactttggtgctcacacttatgaattattacatactcctggtaaatgggtacacactaactggactggtcgtggtggtaatgtttctgcttctacctatgatgcttaaaaaaataataatacaaaaatcatcatcctttctaatgaaatattattagtaattttaatttaataagatattattaataagaaaaaaaaaaaaaaaaaaaaaaaaaaaa

SEQ ID NO: 12073 - protein, 485 aa, Cunninghamella elegans
MVEAVADIGLIGLAVMGQNLILNMNDHGFVVCAYNRTTSKVDDFLANEAKGTNVVGAHSVEELCAKLKRPRKVMLLVKAGSAVDAFIDQLLPHLEEGDIIIDGGNSHFPDSIRRTKELEAKGILFVGSGVSGGEEGARYGPSLMPGGNSKAWEHIQPIFQAIAAKAPDGASCCEWVGETGAGHYVKMVHNGIEYGDMQLITEVYQILHEGLGLSHDEMADIFEEWNKGDLDSFLIEITRDILRFKDTDGQPLVTKIRDTAGQKGTGKWTAIDSLDRGIPVTLIGEAVYSRCLSSLKDERVRASKILQGPSSSKFTGDKKTFIAQLGQALYAAKIVSYAQGYMLMRQAAKDYEWKLNNAGIALMWRGGCIIRSVFLGKIRDAYTKNPELENLLFDDFFKDATAKAQDAWRNVTAQAVLMGIPTPALSTALNFYDGLRHEILPANLLQAQRDYFGAHTYELLHTPGKWVHTNWTGRGGNVSASTYDA

SEQ ID NO: 12074 - DNA, 1419 bp, Lactococcus lactis
  CDS (1)..(1419)
atggcacaagcaaactttggtgttgtcggaatggctgtaatgggtaaaaaccttgcactcaatgttgagtcacgtggttataccgttgctatctacaaccgtacgacttcaaaaactgaagaagtttttaaagaacatcaagataaaaatcttgttttcacaaaaacacttgaagaatttgtcggaagtcttgaaaaaccacgtcgtatcatgctcatggttcaagcgggagctgctactgatgcaaccatcaaatcactcttaccacttttggacataggcgacatcttgattgatggtgggaatactcatttcccagatacaatgcgtcgtaatgctgaacttgctgactcaggaatcaacttcattggtactggtgtttcaggtggagaaaaaggagcgctcttgggcccttctatgatgcctggtggacaaaaagaagcttatgatttagtagctccaatttttgaacaaatcgcagctaaagctcctcaagacggtaaaccatgtgttgcttatatgggagccaatggtgcgggacattacgttaaaatggttcataacggaattgagtatggcgacatgcaattgattgctgaatcttatgaccttttgaaacgtattcttggacttagcaacgcagaaattcaagccatttttgaagaatggaatgaaggcgaacttgatagctacctcatcgaaatcacaaaagaagtattgaaacgtaaagatgatgaaggcgaaggctatatcgttgataaaattcttgataaagcaggaaataaaggaactggtaaatggacttcagaatctgcccttgaccttggtgtaccacttccattgattacagaatcagtatttgctcgttacatttcaacctataaagatgaacgtgttaaagcaagcaaagttttgtctggcccagctcttgatttctcaggcgataaaaaagaagtaatcgaaaaaatccgcaaagcactttatttctcaaaaattatgagttatgctcaaggatttgctcaacttcgcaaagcttctgaagaatttgattgggacttgccatacggtacaattgctcaaatttggcgtgctggatgtatcatccgtgcagaattcctccaaaacattactgatgctttcgataaagatagcgaacttgaaaacctcttgcttgatgactactttgtagacatcacaaaacgttatcaagaagctgttcgtgatgtggtttcacttgctgttcaagcaggaactccaattccaacattcacctcagcaattagctactacgatagctatcgctctgaaaatcttcctgcaaacttgattcaagctcaacgtgactatttcggtgctcacacttatgaacggactgataaagcaggaattttccattacgactggtatacagaagattaa

SEQ ID NO: 12075 - protein, 472 aa, Lactococcus lactis
MAQANFGVVGMAVMGKNLALNVESRGYTVAIYNRTTSKTEEVFKEHQDKNLVFTKTLEEFVGSLEKPRRIMLMVQAGAATDATIKSLLPLLDIGDILIDGGNTHFPDTMRRNAELADSGINFIGTGVSGGEKGALLGPSMMPGGQKEAYDLVAPIFEQIAAKAPQDGKPCVAYMGANGAGHYVKMVHNGIEYGDMQLIAESYDLLKRILGLSNAEIQAIFEEWNEGELDSYLIEITKEVLKRKDDEGEGYIVDKILDKAGNKGTGKWTSESALDLGVPLPLITESVFARYISTYKDERVKASKVLSGPALDFSGDKKEVIEKIRKALYFSKIMSYAQGFAQLRKASEEFDWDLPYGTIAQIWRAGCIIRAEFLQNITDAFDKDSELENLLLDDYFVDITKRYQEAVRDVVSLAVQAGTPIPTFTSAISYYDSYRSENLPANLIQAQRDYFGAHTYERTDKAGIFHYDWYTED

SEQ ID NO: 12076 - DNA, 1407 bp, Shigella flexneri
  CDS (1)..(1407)
atgtcaaagcaacagatcggcgtagtcggtatggcagtgatggggcgcaaccttgcgctcaacatcgaaagtcgtggttataccgtctctattttcaaccgctcccgcgaaaagacggaagaagtgattgctgaaaatccaggcaagaaactggctccttactatacggtgaaagagtttgttgaatctctggaaacgcctcgtcgcatcctgttaatggtgaaagcaggtgcaggcacggatgctgcgattgattccctgaaaccatatctcgataaaggtgacatcatcattgatggtggtaataccttcttccaggacaccattcgtcgtaatcgtgagctttcagcagagggctttaacttcatcggtaccggtgtttccggcggtgaagagggcgcgctgaaaggtccttctattatgcctggcgggcagaaagaggcttatgagctggttgcgcctatcctgactaaaatcgctgccgtggcagaagacggcgagccatgcgttacttatattggtgccgacggcgcaggccattatgtgaagatggttcacaatggtattgaatacggagatatgcagctcattgctgaagcgtattctctgctcaaaggtggcctgaatctatctaatgaagaactggcccagactttcaccgagtggaataacggtgaacttagcagctacctgatcgacatcactaaagatatcttcaccaaaaaagatgaagacggtaactacctggttgatgtgattctggatgaagcagcaaacaaaggcaccggtaaatggaccagccagagcgcgctggatctcggcgaaccgctgtcgctgattaccgagtctgtgtttgcacgttatatctcttctctgaaagatcagcgcgttgccgcatctaaagttctctctggtccgcaagctcagtcagcaggcgacaaggctgagttcatcgaaaaagttcgcagtgcgctgtatctgggcaaaatcgtttcttacgctcagggcttctctcagctgcgtgctgcgtctgaagaatacaattgggatctgaactacggcgaaatcgcgaagattttccgtgctggctgcatcatccgtgcgcagttcctgcagaaaatcaccgatgcttatgccgaaaatccgcagatcgctaacctgctgctggccccgtacttcaagcaaattgccgatgactaccagcaggcgctgcgcgatgtcgtcgcttatgcagtacagaacggtatcccggttccgaccttcgccgctgcggttgcctattacgatagctaccgtgccgcggttctgcctgcgaacctgatccaggcacagcgtgactatttcggggcgcatacttataagcgcattgataaagaaggtgtgttccatactgaatggctggattaa

SEQ ID NO: 12077 - protein, 468 aa, Shigella flexneri
MSKQQIGVVGMAVMGRNLALNIESRGYTVSIFNRSREKTEEVIAENPGKKLAPYYTVKEFVESLETPRRILLMVKAGAGTDAAIDSLKPYLDKGDIIIDGGNTFFQDTIRRNRELSAEGFNFIGTGVSGGEEGALKGPSIMPGGQKEAYELVAPILTKIAAVAEDGEPCVTYIGADGAGHYVKMVHNGIEYGDMQLIAEAYSLLKGGLNLSNEELAQTFTEWNNGELSSYLIDITKDIFTKKDEDGNYLVDVILDEAANKGTGKWTSQSALDLGEPLSLITESVFARYISSLKDQRVAASKVLSGPQAQSAGDKAEFIEKVRSALYLGKIVSYAQGFSQLRAASEEYNWDLNYGEIAKIFRAGCIIRAQFLQKITDAYAENPQIANLLLAPYFKQIADDYQQALRDVVAYAVQNGIPVPTFAAAVAYYDSYRAAVLPANLIQAQRDYFGAHTYKRIDKEGVFHTEWLD

SEQ ID NO: 12078 - DNA, 1425 bp, Staphylococcus epidermidis
  CDS (19)..(1425)
acaagagaggtaagtaatatgacacaacaaattggagtagtgggtttagcagtaatggggaaaaacctagcttggaatattgaatcacgtggttatagtgtttctgtttataaccgatcaagacaaaaaactgatgaaatggttaaagaatcgcctggaagagaaatttacccaacatactcattagaagaatttgtagaatctttagagaaacctcgtaagattttattaatggtaaaagctggacctgcaacagatgccactatagatggtttattacctttattagacgatgatgatattttaattgatggtggtaatactaattaccaagatacgattcgtcgaaataaagctttagctgaaagtagtattaactttattggtatgggagtttctggtggagaaatcggcgcactcacgggcccttctttaatgccaggtggtcaaaaagatgcttataacaaagtcagcgatatcttggacgcaattgctgctaaggcacaagatggtgcttcatgtgtaacttacattggccctaatggtgcaggacattatgttaagatggtacacaatggtatcgaatatgcagatatgcaattaattgctgaaagttatgcaatgatgaaagatttattaggcatgtcacataaagaaatttctcaaacttttaaagaatggaatgctggagaacttgaaagttatttaatagaaattacaggtgatattttcaataaattagatgatgacaatgaagcacttgtagaaaaaatattagatactgcaggtcaaaaaggcacaggtaaatggacttcaattaacgcactagaattaggtgttcctttaacaatcattacagaatctgtatttgcgagattcatctcatcaattaaagaagaacgtgttactgcttctaaatctttaaaaggacctaaagcacattttgaaggcgataaaaaaacattcttagaaaaaatacgtaaggcactttatatgagtaaaatatgctcatatgcacaaggtttcgctcaaatgagaaaagccagtgaagataatgagtggaatttgaaattaggcgaattagcaatgatttggcgtgaaggttgtattattcgtgcacaattcctacaaaaaattaaagatgcctacgataataatgaaaacttacaaaacttattattagacccttacttcaaaaacattgttatggaatatcaagatgcactacgtgaagtagtagctactagcgtgtacaatggcgtgccaacacctggtttttcagcaagtataaattattatgatagttatcgctcagaggatttacctgcaaacttaattcaagcacaacgtgattactttggcgcacatacttatgaacgtaaagaccgtgaaggtattttccatacacaatgggtagaagaataa

SEQ ID NO: 12079 - protein, 468 aa, Staphylococcus epidermidis
MTQQIGVVGLAVMGKNLAWNIESRGYSVSVYNRSRQKTDEMVKESPGREIYPTYSLEEFVESLEKPRKILLMVKAGPATDATIDGLLPLLDDDDILIDGGNTNYQDTIRRNKALAESSINFIGMGVSGGEIGALTGPSLMPGGQKDAYNKVSDILDAIAAKAQDGASCVTYIGPNGAGHYVKMVHNGIEYADMQLIAESYAMMKDLLGMSHKEISQTFKEWNAGELESYLIEITGDIFNKLDDDNEALVEKILDTAGQKGTGKWTSINALELGVPLTIITESVFARFISSIKEERVTASKSLKGPKAHFEGDKKTFLEKIRKALYMSKICSYAQGFAQMRKASEDNEWNLKLGELAMIWREGCIIRAQFLQKIKDAYDNNENLQNLLLDPYFKNIVMEYQDALREVVATSVYNGVPTPGFSASINYYDSYRSEDLPANLIQAQRDYFGAHTYERKDREGIFHTQWVEE

SEQ ID NO: 12080 - DNA, 2156 bp, Trypanosoma brucei brucei
  CDS (140)..(1579)
ttttatacatatatttactaccacataaattgttgatatcattacgaagtggcctgtggtgcaaacaacaggaaacacctgtggaaaggcataaaaataactgttgttactttcaggaaggggaaaaagacggaagatcatgtcaatggatgtcggtgttgtcggcctcggggtgatgggtgcgaacctggccttgaacattgcggagaaagggtttaaagttgctgtgttcaaccgtacgtactctaagagcgaggaattcatgaaagcgaatgcctctgctccatttgcgggtaatttgaaggcgtttgaaactatggaggcatttgcagcgtcactcaagaaacctcgaaaggccctcatcctggtgcaggcgggcgcggctacggactcaacaaccgaacaacttaagaaagtgtttgagaagggagatatcctcgttgataccggtaacgcgcattttaaggatcagggacgccgcgcccagcagctggaggcggcaggtctccggtttcttgggatgggcatatccgggggcgaggagggtgcacgcaaagggccagcctttttccctggagggacgcttagtgtgtgggaggaaatacgaccaattgttgaggccgccgcagctaaggcagatgatggccggccctgtgtgacgatgaacggcagcggcggcgcgggatcatgcgtgaagatgtaccacaattcgggtgaatacgccattttgcaaatctggggtgaggtttttgacatccttcgggcaatgggactgaacaacgatgaagttgctgccgttcttgaagattggaaatcaaagaacttcttgaagtcttatatgctcgatatctcaattgcagccgcgcgggcaaaggataaggatggaagttatcttacggagcacgtgatggatcgtattggatcgaagggcaccggcttatggtccgcccaagaggctctcgagattggagtccctgcgcccagtttgaacatggctgtcgtatcgcggcagttcacaatgtataaaactgagcgtcaagcgaatgccagcaatgcacccggtattactcaatcccctggatacactctcaaaaacaaaagccccagtgggcccgaaattaagcagctctacgactctgtgtgcattgccattatctcatgctacgctcaaatgtttcagtgcctgcgtgagatggacaaggtgcataacttcggactcaatcttccagctaccattgcaactttccgcgccggttgcattttgcagggctaccttttaaaacccatgactgaggcattcgaaaagaatcccaacattagcaatctcatgtgtgcattccaaaccgagatcagggcaggactacagaattaccgcgatatggtggcacttatcacatcaaagttggaagtgtccattcctgtgctgtcagcctccctcaattacgttactgcgatgtttacgccaacactcaagtatgggcaacttgtgtcgttgcagcgggatgtgttcggtcggcacggctacgaaagggtggataaagacggccgcgaatcattccaatggcctgagttgcaataacatactttgcctcatattctcttcgtcctttcctctgttctattaacagaaatctacgatgtgacatggagcgattgtgtgatacgggggttgatcggatgtacacgcgcgtattttcatacacaatttgtcgtgcaacaacctcgtggaacaaccgaaagggaaaaggagagagacaaaaggtgtcgaagggggaacggaaaaaatgtgcgtgtgggcaaggcggatgtgcaaaaggtagctgaatagcggaaggggagaggagggttgtggtttattgttatactggtgcaaaagttgggagggagaagagtgacactggggttctttctttttcttttttcaatgctctgaagcaccttccgccttctcacttcgccgatgtcgtgcacatcataaaccccttttgagtaattaactttttattttgccgtgggaaagatctgtgtggcgctgatttttcttttaccattacaatttattatattattttgaaaaaaaaaacgcctggtgaattttctaacgacatgtttgtttagtttgtctttttccaacactatttggagtactttgttta

SEQ ID NO: 12081 - protein, 479 aa, Trypanosoma brucei brucei
MSMDVGVVGLGVMGANLALNIAEKGFKVAVFNRTYSKSEEFMKANASAPFAGNLKAFETMEAFAASLKKPRKALILVQAGAATDSTTEQLKKVFEKGDILVDTGNAHFKDQGRRAQQLEAAGLRFLGMGISGGEEGARKGPAFFPGGTLSVWEEIRPIVEAAAAKADDGRPCVTMNGSGGAGSCVKMYHNSGEYAILQIWGEVFDILRAMGLNNDEVAAVLEDWKSKNFLKSYMLDISIAAARAKDKDGSYLTEHVMDRIGSKGTGLWSAQEALEIGVPAPSLNMAVVSRQFTMYKTERQANASNAPGITQSPGYTLKNKSPSGPEIKQLYDSVCIAIISCYAQMFQCLREMDKVHNFGLNLPATIATFRAGCILQGYLLKPMTEAFEKNPNISNLMCAFQTEIRAGLQNYRDMVALITSKLEVSIPVLSASLNYVTAMFTPTLKYGQLVSLQRDVFGRHGYERVDKDGRESFQWPELQ

SEQ ID NO: 12082 - DNA, 1878 bp, Brachydanio rerio
  CDS (76)..(1527)
ttcagcagagaccgaataacagcagtcaaaaccctcatcgaaactctcatttttgaacggaaccaaacttcaacaatggctcaagcagatattgctctcattggtctggctgtgatgggtcagaatctgatcctgaacatgaatgaccatggatttgtggtctgtgcattcaacagaaccgtctccaaagtccatgacttcttaaacaatgaagccaaaggcactaaggtgatcggggccgaatcgcttgaagacatggtgtcaaaactcaaaaaacctcgccgcatcatcctgctggtcaaggcaggacaggctgttgatgacttcatcgataaactggttcctcttcttgagcctggagacatcatcattgatggtggaaattcagagtacagagatacaacgagacgttgtaagagcctgaaggagaagaatcttctgtttgtgggtagtggagtaagtggaggagaagatggggcacgttacggaccctcgctgatgcccggaggacataaagatgcctggccacacttaaaagacatttttcagagcattgctgccaaagtgggcaccggagagccgtgctgcgactgggttggagatgaaggagcgggtcattttgttaaaatggtccacaacggtattgaatacggggacatgcagctgatctgtgaggcctatcatctgatgaaggacgtgctttgtatgaaccatgatgaaatggctcaggtcttcgaacagtggaataagacagagctggactccttcctcatcgagatcacagccaacatcctaaaattcaaggacgcagacggcactaacctgctgcccaaaattagagacagcgccgggcagaagggcacagggaaatggacggctatctctgctctggaatacggcacacctgtcacactgatcggggaagctgtctttgccagatgcctctcgtctctgaaggatgaaagagttcaggccagtaagagcctcagcggccctcagggtgtcaagttcactggaaacaaagaacagttccttgaagacattagaaaggccttgtatgcctctaagatcatttcgtatgctcaaggcttcatgctgctgcgtcaggctgcgctggagttcggctggtctctgaattatggtgctattgctctgatgtggagaggaggctgcatcatccgcagtgttttcttgggaaagatcaaggaagcgtttgaccggaacccagagctgcagagtttgttgctggacagcttcttcagtaaggctgtacaggattgtcaggactcgtggcgtagggttgtgagtacaggtgtgcagcagggaatccccatgcccagtttcaccaccgcactgtccttctatgacgggtacagacacgagatgctcccagcaaacctgctgcaggcacagagagactactttggtgcgcacacgtatgagctgctatcaaaccctgggactttcatccacactaactggacaggacacggtgggaaagtgtcatcttcatcctataatgcctaaaatcaagaagccaccattggtaaaacagcagacaacatcccctcttgatgaaggaccagagcagctgatcacattcctgcagaagagctggagttcttactgaatgagtgttcaaacacacatttctatttatactagatcatagtatacacactatttgtacactttcgttcttgtagttttaaggtgcactgttgcaaacacactatcttcgagtgtgtgagatttttcctgctgtaaaccagtcatactttgcccccggagttcacagcgttaaccctggattacggtgactattgcactgcattaggctaaataaagatttcaatccctaaaaaaaaaaaaaaaaaa

SEQ ID NO: 12083 - protein, 483 aa, Brachydanio rerio
MAQADIALIGLAVMGQNLILNMNDHGFVVCAFNRTVSKVHDFLNNEAKGTKVIGAESLEDMVSKLKKPRRIILLVKAGQAVDDFIDKLVPLLEPGDIIIDGGNSEYRDTTRRCKSLKEKNLLFVGSGVSGGEDGARYGPSLMPGGHKDAWPHLKDIFQSIAAKVGTGEPCCDWVGDEGAGHFVKMVHNGIEYGDMQLICEAYHLMKDVLCMNHDEMAQVFEQWNKTELDSFLIEITANILKFKDADGTNLLPKIRDSAGQKGTGKWTAISALEYGTPVTLIGEAVFARCLSSLKDERVQASKSLSGPQGVKFTGNKEQFLEDIRKALYASKIISYAQGFMLLRQAALEFGWSLNYGAIALMWRGGCIIRSVFLGKIKEAFDRNPELQSLLLDSFFSKAVQDCQDSWRRVVSTGVQQGIPMPSFTTALSFYDGYRHEMLPANLLQAQRDYFGAHTYELLSNPGTFIHTNWTGHGGKVSSSSYNA

SEQ ID NO: 12084 - DNA, 25 bp, Artificial sequence
  Primer sequence
atgtcaaaggcagtaggtgatttag

SEQ ID NO: 12085 - DNA, 25 bp, Artificial sequence
  Primer sequence
ttaagcttggtaggttgaggaagat

SEQ ID NO: 12086 - DNA, 1851 bp, Saccharomyces cerevisiae; identical to SEQ ID NO: 161
  CDS (1)..(1851)

SEQ ID NO: 12087 - protein, 616 aa, Saccharomyces cerevisiae; identical to SEQ ID NO: 162

SEQ ID NO: 12088 - DNA, 1575 bp, Homo sapiens (man); identical to SEQ ID NO: 163
  CDS (1)..(1575)

SEQ ID NO: 12089 - protein, 524 aa, Homo sapiens (man); identical to SEQ ID NO: 164

SEQ ID NO: 12090 - DNA, 1764 bp, Kluyveromyces marxianus var. lactis, Candida sphaerica; identical to SEQ ID NO: 165
  CDS (1)..(1764)

SEQ ID NO: 12091 - protein, 587 aa, Kluyveromyces marxianus var. lactis, Candida sphaerica; identical to SEQ ID NO: 166

SEQ ID NO: 12092 - DNA, 2655 bp, Saccharomyces cerevisiae; identical to SEQ ID NO: 167
  CDS (1)..(2655)

SEQ ID NO: 12093 - protein, 884 aa, Saccharomyces cerevisiae; identical to SEQ ID NO: 168

SEQ ID NO: 12094 - DNA, 1491 bp, Homo sapiens (man); identical to SEQ ID NO: 169
  CDS (1)..(1491)

SEQ ID NO: 12095 - protein, 496 aa, Homo sapiens (man); identical to SEQ ID NO: 170

SEQ ID NO: 12096 - DNA, 1770 bp, Arabidopsis thaliana (mouse-ear cress); identical to SEQ ID NO: 171
  CDS (108)..(1589)

SEQ ID NO: 12097 - protein, 493 aa, Arabidopsis thaliana (mouse-ear cress); identical to SEQ ID NO: 172

SEQ ID NO: 12098 - DNA, 1449 bp, Bacillus subtilis; identical to SEQ ID NO: 173
  CDS (1)..(1449)

SEQ ID NO: 12099 - protein, 482 aa, Bacillus subtilis; identical to SEQ ID NO: 174

SEQ ID NO: 12100 - DNA, 1644 bp, Arabidopsis thaliana (mouse-ear cress); identical to SEQ ID NO: 175
  CDS (1)..(1644)

SEQ ID NO: 12101 - protein, 547 aa, Arabidopsis thaliana (mouse-ear cress); identical to SEQ ID NO: 176

SEQ ID NO: 12102 - DNA, 1395 bp, Bacillus subtilis; identical to SEQ ID NO: 177
  CDS (1)..(1395)

SEQ ID NO: 12103 - protein, 464 aa, Bacillus subtilis; identical to SEQ ID NO: 178

SEQ ID NO: 12104 - DNA, 1527 bp, Arabidopsis thaliana (mouse-ear cress); identical to SEQ ID NO: 179
  CDS (1)..(1527)

SEQ ID NO: 12105 - protein, 508 aa, Arabidopsis thaliana (mouse-ear cress); identical to SEQ ID NO: 180

SEQ ID NO: 12106 - DNA, 1566 bp, Arabidopsis thaliana (mouse-ear cress); identical to SEQ ID NO: 181
  CDS (1)..(1566)

SEQ ID NO: 12107 - protein, 521 aa, Arabidopsis thaliana (mouse-ear cress); identical to SEQ ID NO: 182

SEQ ID NO: 12108 - DNA, 1536 bp, Arabidopsis thaliana (mouse-ear cress); identical to SEQ ID NO: 183
  CDS (1)..(1536)

SEQ ID NO: 12109 - protein, 511 aa, Arabidopsis thaliana (mouse-ear cress); identical to SEQ ID NO: 184

SEQ ID NO: 12110 - DNA, 1410 bp, Clostridium acetobutylicum; identical to SEQ ID NO: 185
  CDS (1)..(1410)

SEQ ID NO: 12111 - protein, 469 aa, Clostridium acetobutylicum; identical to SEQ ID NO: 186

SEQ ID NO: 12112 - DNA, 2234 bp, Saccharomyces cerevisiae; identical to SEQ ID NO: 187
  CDS (1)..(1845)

SEQ ID NO: 12113 - protein, 614 aa, Saccharomyces cerevisiae; identical to SEQ ID NO: 188

SEQ ID NO: 12114 - DNA, 2890 bp, Saccharomyces cerevisiae; identical to SEQ ID NO: 189
  CDS (818)..(2443)

SEQ ID NO: 12115 - protein, 541 aa, Saccharomyces cerevisiae; identical to SEQ ID NO: 190

SEQ ID NO: 12116 - DNA, 1602 bp, Emericella nidulans, Aspergillus nidulans; identical to SEQ ID NO: 191
  CDS (1)..(1602)

SEQ ID NO: 12117 - protein, 533 aa, Emericella nidulans, Aspergillus nidulans; identical to SEQ ID NO: 192

SEQ ID NO: 12118 - DNA, 1704 bp, Kluyveromyces marxianus var. lactis, Candida sphaerica; identical to SEQ ID NO: 193
  CDS (1)..(1704)

SEQ ID NO: 12119 - protein, 567 aa, Kluyveromyces marxianus var. lactis, Candida sphaerica; identical to SEQ ID NO: 194

SEQ ID NO: 12120 - DNA, 2211 bp, Saccharomyces cerevisiae; identical to SEQ ID NO: 195
  misc_feature (2)..(4): n is a, c, g, or t
  misc_feature (6)..(7): n is a, c, g, or t
  CDS (508)..(2211)

SEQ ID NO: 12121 - protein, 567 aa, Saccharomyces cerevisiae; identical to SEQ ID NO: 196

SEQ ID NO: 12122 - DNA, 2160 bp, Saccharomyces cerevisiae; identical to SEQ ID NO: 197
  CDS (216)..(1928)

SEQ ID NO: 12123 - protein, 570 aa, Saccharomyces cerevisiae; identical to SEQ ID NO: 198

SEQ ID NO: 12124 - DNA, 2037 bp, Saccharomyces cerevisiae; identical to SEQ ID NO: 199
  CDS (157)..(1869)

SEQ ID NO: 12125 - protein, 570 aa, Saccharomyces cerevisiae; identical to SEQ ID NO: 200

SEQ ID NO: 12126 - DNA, 3025 bp, Saccharomyces cerevisiae; identical to SEQ ID NO: 201
  CDS (510)..(2288)

SEQ ID NO: 12127 - protein, 592 aa, Saccharomyces cerevisiae; identical to SEQ ID NO: 202

SEQ ID NO: 12128 - DNA, 1641 bp, Saccharomyces cerevisiae; identical to SEQ ID NO: 203
  CDS (1)..(1641)

SEQ ID NO: 12129 - protein, 546 aa, Saccharomyces cerevisiae; identical to SEQ ID NO: 204

SEQ ID NO: 12130 - DNA, 1695 bp, Saccharomyces cerevisiae; identical to SEQ ID NO: 205
  CDS (1)..(1695)

SEQ ID NO: 12131 - protein, 564 aa, Saccharomyces cerevisiae; identical to SEQ ID NO: 206

SEQ ID NO: 12132 - DNA, 3277 bp, Saccharomyces cerevisiae; identical to SEQ ID NO: 207
  CDS (802)..(2505)

SEQ ID NO: 12133 - protein, 567 aa, Saccharomyces cerevisiae; identical to SEQ ID NO: 208

SEQ ID NO: 12134 - DNA, 1710 bp, Saccharomyces cerevisiae; identical to SEQ ID NO: 209
  CDS (1)..(1710)

SEQ ID NO: 12135 - protein, 569 aa, Saccharomyces cerevisiae; identical to SEQ ID NO: 210

SEQ ID NO: 12136 - DNA, 1701 bp, Kluyveromyces marxianus var. lactis, Candida sphaerica; identical to SEQ ID NO: 211
  CDS (1)..(1701)

SEQ ID NO: 12137 - protein, 566 aa, Kluyveromyces marxianus var. lactis, Candida sphaerica; identical to SEQ ID NO: 212

SEQ ID NO: 12138 - DNA, 1809 bp, Saccharomyces cerevisiae; identical to SEQ ID NO: 213
  CDS (1)..(1809)

SEQ ID NO: 12139 - protein, 602 aa, Saccharomyces cerevisiae; identical to SEQ ID NO: 214

SEQ ID NO: 12140 - DNA, 2064 bp, Saccharomyces cerevisiae; identical to SEQ ID NO: 215
  CDS (290)..(1912)

SEQ ID NO: 12141 - protein, 540 aa, Saccharomyces cerevisiae; identical to SEQ ID NO: 216

SEQ ID NO: 12142 - DNA, 3323 bp, Saccharomyces cerevisiae; identical to SEQ ID NO: 217
  CDS (1189)..(2883)

SEQ ID NO: 12143 - protein, 564 aa, Saccharomyces cerevisiae; identical to SEQ ID NO: 218

SEQ ID NO: 12144 - DNA, 3143 bp, Saccharomyces cerevisiae; identical to SEQ ID NO: 219
  CDS (962)..(2686)

SEQ ID NO: 12145 - protein, 574 aa, Saccharomyces cerevisiae; identical to SEQ ID NO: 220

SEQ ID NO: 12146 - DNA, 4409 bp, Saccharomyces cerevisiae; identical to SEQ ID NO: 221
  CDS (1233)..(3524)

SEQ ID NO: 12147 - protein, 763 aa, Saccharomyces cerevisiae; identical to SEQ ID NO: 222

SEQ ID NO: 12148 - DNA, 1704 bp, Saccharomyces cerevisiae; identical to SEQ ID NO: 223
  CDS (1)..(1704)

SEQ ID NO: 12149 - protein, 567 aa, Saccharomyces cerevisiae; identical to SEQ ID NO: 224

SEQ ID NO: 12150 - DNA, 1830 bp, Saccharomyces cerevisiae; identical to SEQ ID NO: 225
  CDS (1)..(1830)

SEQ ID NO: 12151 - protein, 609 aa, Saccharomyces cerevisiae; identical to SEQ ID NO: 226

SEQ ID NO: 12152 - DNA, 1710 bp, Saccharomyces cerevisiae; identical to SEQ ID NO: 227
  CDS (1)..(1710)

SEQ ID NO: 12153 - protein, 569 aa, Saccharomyces cerevisiae; identical to SEQ ID NO: 228

SEQ ID NO: 12154 - DNA, 2020 bp, Beta vulgaris (beet); identical to SEQ ID NO: 229
  CDS (190)..(1662)

SEQ ID NO: 12155 - protein, 490 aa, Beta vulgaris (beet); identical to SEQ ID NO: 230

SEQ ID NO: 12156 - DNA, 2340 bp, Schizosaccharomyces pombe; identical to SEQ ID NO: 231
  CDS (55)..(1722)

SEQ ID NO: 12157 - protein, 555 aa, Schizosaccharomyces pombe; identical to SEQ ID NO: 232

SEQ ID NO: 12158 - DNA, 1674 bp, Schizosaccharomyces pombe; identical to SEQ ID NO: 233
  CDS (1)..(1674)

SEQ ID NO: 12159 - protein, 557 aa, Schizosaccharomyces pombe; identical to SEQ ID NO: 234

SEQ ID NO: 12160 - DNA, 1596 bp, Schizosaccharomyces pombe; identical to SEQ ID NO: 235
  CDS (1)..(1596)

SEQ ID NO: 12161 - protein, 531 aa, Schizosaccharomyces pombe; identical to SEQ ID NO: 236

SEQ ID NO: 12162 - DNA, 1800 bp, Schizosaccharomyces pombe; identical to SEQ ID NO: 237
  CDS (50)..(1657)

SEQ ID NO: 12163 - protein, 535 aa, Schizosaccharomyces pombe; identical to SEQ ID NO: 238

SEQ ID NO: 12164 - DNA, 1641 bp, Schizosaccharomyces pombe; identical to SEQ ID NO: 239
  CDS (1)..(1641)

SEQ ID NO: 12165 - protein, 546 aa, Schizosaccharomyces pombe; identical to SEQ ID NO: 240

SEQ ID NO: 12166 - DNA, 1913 bp, Schizosaccharomyces pombe; identical to SEQ ID NO: 241
  CDS (240)..(1913)

SEQ ID NO: 12167 - protein, 557 aa, Schizosaccharomyces pombe; identical to SEQ ID NO: 242

SEQ ID NO: 12168 - DNA, 1767 bp, Neurospora crassa; identical to SEQ ID NO: 243
  CDS (1)..(1767)

SEQ ID NO: 12169 - protein, 588 aa, Neurospora crassa; identical to SEQ ID NO: 244

SEQ ID NO: 12170 - DNA, 1596 bp, Aspergillus parasiticus; identical to SEQ ID NO: 245
  CDS (1)..(1596)

SEQ ID NO: 12171 - protein, 531 aa, Aspergillus parasiticus; identical to SEQ ID NO: 246

SEQ ID NO: 12172 - DNA, 1711 bp, Amanita muscaria; identical to SEQ ID NO: 247
  CDS (38)..(1600)

SEQ ID NO: 12173 - protein, 520 aa, Amanita muscaria; identical to SEQ ID NO: 248

SEQ ID NO: 12174 - DNA, 1425 bp, Tetragenococcus halophilus; identical to SEQ ID NO: 249
  CDS (1)..(1425)

SEQ ID NO: 12175 - protein, 474 aa, Tetragenococcus halophilus; identical to SEQ ID NO: 250

SEQ ID NO: 12176 - DNA, 2846 bp, Pichia stipitis; identical to SEQ ID NO: 251
  CDS (175)..(1836)

SEQ ID NO: 12177 - protein, 553 aa, Pichia stipitis; identical to SEQ ID NO: 252

SEQ ID NO: 12178 - DNA, 2054 bp, Beta vulgaris subsp; identical to SEQ ID NO: 253
  CDS (94)..(1731)

SEQ ID NO: 12179 - protein, 545 aa, Beta vulgaris subsp; identical to SEQ ID NO: 254

SEQ ID NO: 12180 - DNA, 1758 bp, Debaryomyces hansenii; identical to SEQ ID NO: 255
  CDS (1)..(1758)

SEQ ID NO: 12181 - protein, 585 aa, Debaryomyces hansenii; identical to SEQ ID NO: 256

SEQ ID NO: 12182 - DNA, 1608 bp, Debaryomyces hansenii; identical to SEQ ID NO: 257
  CDS (1)..(1608)

SEQ ID NO: 12183 - protein, 535 aa, Debaryomyces hansenii; identical to SEQ ID NO: 258

SEQ ID NO: 12184 - DNA, 1764 bp, Debaryomyces hansenii; identical to SEQ ID NO: 259
  CDS (1)..(1764)

SEQ ID NO: 12185 - protein, 587 aa, Debaryomyces hansenii; identical to SEQ ID NO: 260

SEQ ID NO: 12186 - DNA, 1839 bp, Debaryomyces hansenii; identical to SEQ ID NO: 261
  CDS (1)..(1839)

SEQ ID NO: 12187 - protein, 612 aa, Debaryomyces hansenii; identical to SEQ ID NO: 262

SEQ ID NO: 12188 - DNA, 1842 bp, Debaryomyces hansenii; identical to SEQ ID NO: 263
  CDS (1)..(1842)

SEQ ID NO: 12189 - protein, 613 aa, Debaryomyces hansenii; identical to SEQ ID NO: 264

SEQ ID NO: 12190 - DNA, 1638 bp, Debaryomyces hansenii; identical to SEQ ID NO: 265
  CDS (1)..(1638)

SEQ ID NO: 12191 - protein, 545 aa, Debaryomyces hansenii; identical to SEQ ID NO: 266

SEQ ID NO: 12192 - DNA, 1638 bp, Debaryomyces hansenii; identical to SEQ ID NO: 267
  CDS (1)..(1638)

SEQ ID NO: 12193 - protein, 545 aa, Debaryomyces hansenii; identical to SEQ ID NO: 268

SEQ ID NO: 12194 - DNA, 1620 bp, Debaryomyces hansenii; identical to SEQ ID NO: 269
  CDS (1)..(1620)

SEQ ID NO: 12195 - protein, 539 aa, Debaryomyces hansenii; identical to SEQ ID NO: 270

SEQ ID NO: 12196 - DNA, 1533 bp, Debaryomyces hansenii; identical to SEQ ID NO: 271
  CDS (1)..(1533)

SEQ ID NO: 12197 - protein, 510 aa, Debaryomyces hansenii; identical to SEQ ID NO: 272

SEQ ID NO: 12198 - DNA, 1665 bp, Debaryomyces hansenii; identical to SEQ ID NO: 273
  CDS (1)..(1665)

SEQ ID NO: 12199 - protein, 554 aa, Debaryomyces hansenii; identical to SEQ ID NO: 274

SEQ ID NO: 12200 - DNA, 1749 bp, Debaryomyces hansenii; identical to SEQ ID NO: 275
  CDS (1)..(1749)

SEQ ID NO: 12201 - protein, 582 aa, Debaryomyces hansenii; identical to SEQ ID NO: 276

SEQ ID NO: 12202 - DNA, 1737 bp, Debaryomyces hansenii; identical to SEQ ID NO: 277
  CDS (1)..(1737)

SEQ ID NO: 12203 - protein, 578 aa, Debaryomyces hansenii; identical to SEQ ID NO: 278

SEQ ID NO: 12204 - DNA, 1584 bp, Debaryomyces hansenii; identical to SEQ ID NO: 279
  CDS (1)..(1584)

SEQ ID NO: 12205 - protein, 527 aa, Debaryomyces hansenii; identical to SEQ ID NO: 280

SEQ ID NO: 12206 - DNA, 1674 bp, Debaryomyces hansenii; identical to SEQ ID NO: 281
  CDS (1)..(1674)

SEQ ID NO: 12207 - protein, 557 aa, Debaryomyces hansenii; identical to SEQ ID NO: 282

SEQ ID NO: 12208 - DNA, 1659 bp, Debaryomyces hansenii; identical to SEQ ID NO: 283
  CDS (1)..(1659)

SEQ ID NO: 12209 - protein, 552 aa, Debaryomyces hansenii; identical to SEQ ID NO: 284

SEQ ID NO: 12210 - DNA, 1632 bp, Debaryomyces hansenii; identical to SEQ ID NO: 285
  CDS (1)..(1632)

SEQ ID NO: 12211 - protein, 543 aa, Debaryomyces hansenii; identical to SEQ ID NO: 286

SEQ ID NO: 12212 - DNA, 2196 bp, Debaryomyces hansenii; identical to SEQ ID NO: 287
  CDS (1)..(2196)

SEQ ID NO: 12213 - protein, 731 aa, Debaryomyces hansenii; identical to SEQ ID NO: 288

SEQ ID NO: 12214 - DNA, 1647 bp, Debaryomyces hansenii; identical to SEQ ID NO: 289
  CDS (1)..(1647)

SEQ ID NO: 12215 - protein, 548 aa, Debaryomyces hansenii; identical to SEQ ID NO: 290

SEQ ID NO: 12216 - DNA, 1659 bp, Debaryomyces hansenii; identical to SEQ ID NO: 291
  CDS (1)..(1659)

SEQ ID NO: 12217 - protein, 552 aa, Debaryomyces hansenii; identical to SEQ ID NO: 292

SEQ ID NO: 12218 - DNA, 1623 bp, Yarrowia lipolytica; identical to SEQ ID NO: 293
  CDS (1)..(1623)

SEQ ID NO: 12219 - protein, 540 aa, Yarrowia lipolytica; identical to SEQ ID NO: 294

SEQ ID NO: 12220 - DNA, 1602 bp, Yarrowia lipolytica; identical to SEQ ID NO: 295
  CDS (1)..(1602)

SEQ ID NO: 12221 - protein, 533 aa, Yarrowia lipolytica; identical to SEQ ID NO: 296

SEQ ID NO: 12222 - DNA, 1701 bp, Yarrowia lipolytica; identical to SEQ ID NO: 297
  CDS (1)..(1701)

SEQ ID NO: 12223 - protein, 566 aa, Yarrowia lipolytica; identical to SEQ ID NO: 298

SEQ ID NO: 12224 - DNA, 1779 bp, Yarrowia lipolytica; identical to SEQ ID NO: 299
  CDS (1)..(1779)

SEQ ID NO: 12225 - protein, 592 aa, Yarrowia lipolytica; identical to SEQ ID NO: 300

SEQ ID NO: 12226 - DNA, 1620 bp, Yarrowia lipolytica; identical to SEQ ID NO: 301
  CDS (1)..(1620)

SEQ ID NO: 12227 - protein, 539 aa, Yarrowia lipolytica; identical to SEQ ID NO: 302

SEQ ID NO: 12228 - DNA, 1737 bp, Yarrowia lipolytica; identical to SEQ ID NO: 303
  CDS (1)..(1737)

SEQ ID NO: 12229 - protein, 578 aa, Yarrowia lipolytica; identical to SEQ ID NO: 304

SEQ ID NO: 12230 - DNA, 1548 bp, Yarrowia lipolytica; identical to SEQ ID NO: 305
  CDS (1)..(1548)

SEQ ID NO: 12231 - protein, 515 aa, Yarrowia lipolytica; identical to SEQ ID NO: 306

SEQ ID NO: 12232 - DNA, 1698 bp, Yarrowia lipolytica; identical to SEQ ID NO: 307
  CDS (1)..(1698)

SEQ ID NO: 12233 - protein, 565 aa, Yarrowia lipolytica; identical to SEQ ID NO: 308

SEQ ID NO: 12234 - DNA, 1665 bp, Yarrowia lipolytica; identical to SEQ ID NO: 309
  CDS (1)..(1665)

SEQ ID NO: 12235 - protein, 554 aa, Yarrowia lipolytica; identical to SEQ ID NO: 310

SEQ ID NO: 12236 - DNA, 1740 bp, Yarrowia lipolytica; identical to SEQ ID NO: 311
  CDS (1)..(1740)

SEQ ID NO: 12237 - protein, 579 aa, Yarrowia lipolytica; identical to SEQ ID NO: 312

SEQ ID NO: 12238 - DNA, 1329 bp, Yarrowia lipolytica; identical to SEQ ID NO: 313
  CDS (1)..(1329)

SEQ ID NO: 12239 - protein, 442 aa, Yarrowia lipolytica; identical to SEQ ID NO: 314

SEQ ID NO: 12240 - DNA, 1602 bp, Yarrowia lipolytica; identical to SEQ ID NO: 315
  CDS (1)..(1602)

SEQ ID NO: 12241 - protein, 533 aa, Yarrowia lipolytica; identical to SEQ ID NO: 316

SEQ ID NO: 12242 - DNA, 2364 bp, Kluyveromyces lactis; identical to SEQ ID NO: 317
  CDS (1)..(2364)

SEQ ID NO: 12243 - protein, 787 aa, Kluyveromyces lactis; identical to SEQ ID NO: 318

SEQ ID NO: 12244 - DNA, 1434 bp, Kluyveromyces lactis; identical to SEQ ID NO: 319
  CDS (1)..(1434)

SEQ ID NO: 12245 - protein, 477 aa, Kluyveromyces lactis; identical to SEQ ID NO: 320

SEQ ID NO: 12246 - DNA, 1719 bp, Kluyveromyces lactis; identical to SEQ ID NO: 321
  CDS (1)..(1719)

SEQ ID NO: 12247 - protein, 572 aa, Kluyveromyces lactis; identical to SEQ ID NO: 322

SEQ ID NO: 12248 - DNA, 1536 bp, Kluyveromyces lactis; identical to SEQ ID NO: 323
  CDS (1)..(1536)

SEQ ID NO: 12249 - protein, 511 aa, Kluyveromyces lactis; identical to SEQ ID NO: 324

SEQ ID NO: 12250 - DNA, 2034 bp, Kluyveromyces lactis; identical to SEQ ID NO: 325
  CDS (1)..(2034)

SEQ ID NO: 12251 - protein, 677 aa, Kluyveromyces lactis; identical to SEQ ID NO: 326

SEQ ID NO: 12252 - DNA, 1596 bp, Candida glabrata; identical to SEQ ID NO: 327
  CDS (1)..(1596)

SEQ ID NO: 12253 - protein, 531 aa, Candida glabrata; identical to SEQ ID NO: 328

SEQ ID NO: 12254 - DNA, 2571 bp, Candida glabrata; identical to SEQ ID NO: 329
  CDS (1)..(2571)

SEQ ID NO: 12255 - protein, 856 aa, Candida glabrata; identical to SEQ ID NO: 330

SEQ ID NO: 12256 - DNA, 2289 bp, Candida glabrata; identical to SEQ ID NO: 331
  CDS (1)..(2289)

SEQ ID NO: 12257 - protein, 762 aa, Candida glabrata; identical to SEQ ID NO: 332

SEQ ID NO: 12258 - DNA, 1668 bp, Candida glabrata; identical to SEQ ID NO: 333
  CDS (1)..(1668)

SEQ ID NO: 12259 - protein, 555 aa, Candida glabrata; identical to SEQ ID NO: 334

SEQ ID NO: 12260 - DNA, 1695 bp, Candida glabrata; identical to SEQ ID NO: 335
  CDS (1)..(1695)

SEQ ID NO: 12261 - protein, 564 aa, Candida glabrata; identical to SEQ ID NO: 336

SEQ ID NO: 12262 - DNA, 1650 bp, Candida glabrata; identical to SEQ ID NO: 337
  CDS (1)..(1650)

SEQ ID NO: 12263 - protein, 549 aa, Candida glabrata; identical to SEQ ID NO: 338

SEQ ID NO: 12264 - DNA, 1602 bp, Candida glabrata; identical to SEQ ID NO: 339
  CDS (1)..(1602)

SEQ ID NO: 12265 - protein, 533 aa, Candida glabrata; identical to SEQ ID NO: 340

SEQ ID NO: 12266 - DNA, 1692 bp, Candida glabrata; identical to SEQ ID NO: 341
  CDS (1)..(1692)

SEQ ID NO: 12267 - protein, 563 aa, Candida glabrata; identical to SEQ ID NO: 342

SEQ ID NO: 12268 - DNA, 1707 bp, Candida glabrata; identical to SEQ ID NO: 343
  CDS (1)..(1707)

SEQ ID NO: 12269 - protein, 568 aa, Candida glabrata; identical to SEQ ID NO: 344

SEQ ID NO: 12270 - DNA, 1671 bp, Candida glabrata; identical to SEQ ID NO: 345
  CDS (1)..(1671)

SEQ ID NO: 12271 - protein, 556 aa, Candida glabrata; identical to SEQ ID NO: 346

SEQ ID NO: 12272 - DNA, 1650 bp, Candida glabrata; identical to SEQ ID NO: 347
  CDS (1)..(1650)

SEQ ID NO: 12273 - protein, 549 aa, Candida glabrata; identical to SEQ ID NO: 348

SEQ ID NO: 12274 - DNA, 1659 bp, Candida glabrata; identical to SEQ ID NO: 349
  CDS (1)..(1659)

SEQ ID NO: 12275 - protein, 552 aa, Candida glabrata; identical to SEQ ID NO: 350

SEQ ID NO: 12276 - DNA, 1728 bp, Yarrowia lipolytica; identical to SEQ ID NO: 351
  CDS (1)..(1728)

SEQ ID NO: 12277 - protein, 575 aa, Yarrowia lipolytica; identical to SEQ ID NO: 352

SEQ ID NO: 12278 - DNA, 1647 bp, Trichoderma reesei; identical to SEQ ID NO: 353
  CDS (1)..(1647)

SEQ ID NO: 12279 - protein, 548 aa, Trichoderma reesei; identical to SEQ ID NO: 354

SEQ ID NO: 12280 - DNA, 2048 bp, Equus caballus; identical to SEQ ID NO: 355
  misc_feature (1853)..(1853): n is a, c, g, or t
  CDS (178)..(1752)

SEQ ID NO: 12281 - protein, 524 aa, Equus caballus; identical to SEQ ID NO: 356

SEQ ID NO: 12282 - DNA, 1629 bp, Aspergillus fumigatus; identical to SEQ ID NO: 357
  CDS (1)..(1629)

SEQ ID NO: 12283 - protein, 542 aa, Aspergillus fumigatus; identical to SEQ ID NO: 358

SEQ ID NO: 12284 - DNA, 1653 bp, Leptosphaeria maculans; identical to SEQ ID NO: 359
  CDS (1)..(1653)

SEQ ID NO: 12285 - protein, 550 aa, Leptosphaeria maculans; identical to SEQ ID NO: 360

SEQ ID NO: 12286 - DNA, 1542 bp, Aspergillus parasiticus; identical to SEQ ID NO: 361
  CDS (1)..(1542)

SEQ ID NO: 12287 - protein, 513 aa, Aspergillus parasiticus; identical to SEQ ID NO: 362

SEQ ID NO: 12288 - DNA, 1548 bp, Oryza sativa; identical to SEQ ID NO: 363
  CDS (1)..(1548)

SEQ ID NO: 12289 - protein, 515 aa, Oryza sativa; identical to SEQ ID NO: 364

SEQ ID NO: 12290 - DNA, 1584 bp, Oryza sativa; identical to SEQ ID NO: 365
  CDS (1)..(1584)

SEQ ID NO: 12291 - protein, 527 aa, Oryza sativa; identical to SEQ ID NO: 366

SEQ ID NO: 12292 - DNA, 1536 bp, Oryza sativa; identical to SEQ ID NO: 367
  CDS (1)..(1536)

SEQ ID NO: 12293 - protein, 511 aa, Oryza sativa; identical to SEQ ID NO: 368

SEQ ID NO: 12294 - DNA, 1891 bp, Plantago major; identical to SEQ ID NO: 369
  CDS (146)..(1738)

SEQ ID NO: 12295 - protein, 530 aa, Plantago major; identical to SEQ ID NO: 370

SEQ ID NO: 12296 - DNA, 1987 bp, Plantago major; identical to SEQ ID NO: 371
  CDS (116)..(1705)

SEQ ID NO: 12297 - protein, 529 aa, Plantago major; identical to SEQ ID NO: 372

SEQ ID NO: 12298 - DNA, 1677 bp, Ashbya gossypii; identical to SEQ ID NO: 373
  CDS (1)..(1677)

SEQ ID NO: 12299 - protein, 558 aa, Ashbya gossypii; identical to SEQ ID NO: 374

SEQ ID NO: 12300 - DNA, 1608 bp, Ashbya gossypii; identical to SEQ ID NO: 375
  CDS (1)..(1608)

SEQ ID NO: 12301 - protein, 535 aa, Ashbya gossypii; identical to SEQ ID NO: 376

SEQ ID NO: 12302 - DNA, 1641 bp, Ashbya gossypii; identical to SEQ ID NO: 377
  CDS (1)..(1641)

SEQ ID NO: 12303 - protein, 546 aa, Ashbya gossypii; identical to SEQ ID NO: 378

SEQ ID NO: 12304 - DNA, 1620 bp, Ashbya gossypii; identical to SEQ ID NO: 379
  CDS (1)..(1620)

SEQ ID NO: 12305 - protein, 539 aa, Ashbya gossypii; identical to SEQ ID NO: 380

SEQ ID NO: 12306 - DNA, 1644 bp, Ashbya gossypii; identical to SEQ ID NO: 381
  CDS (1)..(1644)

SEQ ID NO: 12307 - protein, 547 aa, Ashbya gossypii; identical to SEQ ID NO: 382

SEQ ID NO: 12308 - DNA, 1995 bp, Ashbya gossypii; identical to SEQ ID NO: 383
  CDS (1)..(1995)

SEQ ID NO: 12309 - protein, 664 aa, Ashbya gossypii; identical to SEQ ID NO: 384

SEQ ID NO: 12310 - DNA, 1642 bp, Drosophila melanogaster; identical to SEQ ID NO: 385
  CDS (119)..(1453)

SEQ ID NO: 12311 - protein, 444 aa, Drosophila melanogaster; identical to SEQ ID NO: 386

SEQ ID NO: 12312 - DNA, 1620 bp, Neurospora crassa; identical to SEQ ID NO: 387
  CDS (1)..(1620)

SEQ ID NO: 12313 - protein, 539 aa, Neurospora crassa; identical to SEQ ID NO: 388

SEQ ID NO: 12314 - DNA, 1968 bp, Neurospora crassa; identical to SEQ ID NO: 389
  CDS (1)..(1968)

SEQ ID NO: 12315 - protein, 655 aa, Neurospora crassa; identical to SEQ ID NO: 390

SEQ ID NO: 12316 - DNA, 1572 bp, Neurospora crassa; identical to SEQ ID NO: 391
  CDS (1)..(1572)

SEQ ID NO: 12317 - protein, 523 aa, Neurospora crassa; identical to SEQ ID NO: 392

SEQ ID NO: 12318 - DNA, 1614 bp, Neurospora crassa; identical to SEQ ID NO: 393
  CDS (1)..(1614)

SEQ ID NO: 12319 - protein, 537 aa, Neurospora crassa; identical to SEQ ID NO: 394

SEQ ID NO: 12320 - DNA, 1989 bp, Neurospora crassa; identical to SEQ ID NO: 395
  CDS (1)..(1989)

SEQ ID NO: 12321 - protein, 662 aa, Neurospora crassa; identical to SEQ ID NO: 396

SEQ ID NO: 12322 - DNA, 1557 bp, Neurospora crassa; identical to SEQ ID NO: 397
  CDS (1)..(1557)

SEQ ID NO: 12323 - protein, 518 aa, Neurospora crassa; identical to SEQ ID NO: 398

SEQ ID NO: 12324 - DNA, 1626 bp, Neurospora crassa; identical to SEQ ID NO: 399
  CDS (1)..(1626)

SEQ ID NO: 12325 - protein, 541 aa, Neurospora crassa; identical to SEQ ID NO: 400

SEQ ID NO: 12326 - DNA, 1752 bp, Neurospora crassa; identical to SEQ ID NO: 401
  CDS (1)..(1752)

SEQ ID NO: 12327 - protein, 583 aa, Neurospora crassa; identical to SEQ ID NO: 402

SEQ ID NO: 12328 - DNA, 1698 bp, Neurospora crassa; identical to SEQ ID NO: 403
  CDS (1)..(1698)

SEQ ID NO: 12329 - protein, 565 aa, Neurospora crassa; identical to SEQ ID NO: 404

SEQ ID NO: 12330 - DNA, 1647 bp, Neurospora crassa; identical to SEQ ID NO: 405
  CDS (1)..(1647)

SEQ ID NO: 12331 - protein, 548 aa, Neurospora crassa; identical to SEQ ID NO: 406

SEQ ID NO: 12332 - DNA, 1533 bp, Neurospora crassa; identical to SEQ ID NO: 407
  CDS (1)..(1533)

SEQ ID NO: 12333 - protein, 510 aa, Neurospora crassa; identical to SEQ ID NO: 408

SEQ ID NO: 12334 - DNA, 1695 bp, Neurospora crassa; identical to SEQ ID NO: 409
  CDS (1)..(1695)

SEQ ID NO: 12335 - protein, 564 aa, Neurospora crassa; identical to SEQ ID NO: 410

SEQ ID NO: 12336 - DNA, 1683 bp, Neurospora crassa; identical to SEQ ID NO: 411
  CDS (1)..(1683)

SEQ ID NO: 12337 - protein, 560 aa, Neurospora crassa; identical to SEQ ID NO: 412

SEQ ID NO: 12338 - DNA, 1794 bp, Neurospora crassa; identical to SEQ ID NO: 413
  CDS (1)..(1794)

SEQ ID NO: 12339 - protein, 597 aa, Neurospora crassa; identical to SEQ ID NO: 414

SEQ ID NO: 12340 - DNA, 1578 bp, Neurospora crassa; identical to SEQ ID NO: 415
  CDS (1)..(1578)

SEQ ID NO: 12341 - protein, 525 aa, Neurospora crassa; identical to SEQ ID NO: 416

SEQ ID NO: 12342 - DNA, 1614 bp, Neurospora crassa; identical to SEQ ID NO: 417
  CDS (1)..(1614)

SEQ ID NO: 12343 - protein, 537 aa, Neurospora crassa; identical to SEQ ID NO: 418

SEQ ID NO: 12344 - DNA, 1641 bp, Neurospora crassa; identical to SEQ ID NO: 419
  CDS (1)..(1641)

SEQ ID NO: 12345 - protein, 546 aa, Neurospora crassa; identical to SEQ ID NO: 420

SEQ ID NO: 12346 - DNA, 1644 bp, Neurospora crassa; identical to SEQ ID NO: 421
  CDS (1)..(1644)

SEQ ID NO: 12347 - protein, 547 aa, Neurospora crassa; identical to SEQ ID NO: 422

SEQ ID NO: 12348 - DNA, 1572 bp, Neurospora crassa; identical to SEQ ID NO: 423
  CDS (1)..(1572)

SEQ ID NO: 12349 - protein, 523 aa, Neurospora crassa; identical to SEQ ID NO: 424

SEQ ID NO: 12350 - DNA, 1509 bp, Mycobacterium bovis; identical to SEQ ID NO: 425
  CDS (1)..(1509)

SEQ ID NO: 12351 - protein, 502 aa, Mycobacterium bovis; identical to SEQ ID NO: 426

SEQ ID NO: 12352 - DNA, 2251 bp, Oryza sativa; identical to SEQ ID NO: 427
  CDS (152)..(1723)

SEQ ID NO: 12353 - protein, 523 aa, Oryza sativa; identical to SEQ ID NO: 428

SEQ ID NO: 12354 - DNA, 1648 bp, Orobanche ramosa; identical to SEQ ID NO: 429
  CDS (46)..(1605)

SEQ ID NO: 12355 - protein, 519 aa, Orobanche ramosa; identical to SEQ ID NO: 430

SEQ ID NO: 12356 - DNA, 1608 bp, Oryza sativa; identical to SEQ ID NO: 431
  CDS (1)..(1608)

SEQ ID NO: 12357 - protein, 535 aa, Oryza sativa; identical to SEQ ID NO: 432

SEQ ID NO: 12358 - DNA, 1617 bp, Oryza sativa; identical to SEQ ID NO: 433
  CDS (1)..(1617)

SEQ ID NO: 12359 - protein, 538 aa, Oryza sativa; identical to SEQ ID NO: 434

SEQ ID NO: 12360 - DNA, 2574 bp, Oryza sativa; identical to SEQ ID NO: 435
  CDS (569)..(2089)

SEQ ID NO: 12361 - protein, 506 aa, Oryza sativa; identical to SEQ ID NO: 436

SEQ ID NO: 12362 - DNA, 2710 bp, Kluyveromyces lactis; identical to SEQ ID NO: 437
  CDS (428)..(2014)

SEQ ID NO: 12363 - protein, 528 aa, Kluyveromyces lactis; identical to SEQ ID NO: 438

SEQ ID NO: 12364 - DNA, 1848 bp, Saccharomyces pastorianus; identical to SEQ ID NO: 439
  CDS (1)..(1848)

SEQ ID NO: 12365 - protein, 615 aa, Saccharomyces pastorianus; identical to SEQ ID NO: 440

SEQ ID NO: 12366 - DNA, 1927 bp, Prunus cerasus; identical to SEQ ID NO: 441
  CDS (56)..(1585)

SEQ ID NO: 12367 - protein, 509 aa, Prunus cerasus; identical to SEQ ID NO: 442

SEQ ID NO: 12368 - DNA, 2032 bp, Prunus cerasus; identical to SEQ ID NO: 443
  CDS (74)..(1690)

SEQ ID NO: 12369 - protein, 538 aa, Prunus cerasus; identical to SEQ ID NO: 444

SEQ ID NO: 12370 - DNA, 2012 bp, Malus domestica; identical to SEQ ID NO: 445
  CDS (104)..(1579)

SEQ ID NO: 12371 - protein, 491 aa, Malus domestica; identical to SEQ ID NO: 446

SEQ ID NO: 12372 - DNA, 1563 bp, Neurospora crassa; identical to SEQ ID NO: 447
  CDS (1)..(1563)

SEQ ID NO: 12373 - protein, 520 aa, Neurospora crassa; identical to SEQ ID NO: 448

SEQ ID NO: 12374 - DNA, 1614 bp, Neurospora crassa; identical to SEQ ID NO: 449
  CDS (1)..(1614)

SEQ ID NO: 12375 - protein, 537 aa, Neurospora crassa; identical to SEQ ID NO: 450

SEQ ID NO: 12376 - DNA, 1596 bp, Emericella nidulans; identical to SEQ ID NO: 451
  CDS (1)..(1596)

SEQ ID NO: 12377 - protein, 531 aa, Emericella nidulans; identical to SEQ ID NO: 452

SEQ ID NO: 12378 - DNA, 1407 bp, Bacteroides thetaiotaomicron; identical to SEQ ID NO: 453
  CDS (1)..(1407)

SEQ ID NO: 12379 - protein, 468 aa, Bacteroides thetaiotaomicron; identical to SEQ ID NO: 454

SEQ ID NO: 12380 - DNA, 1407 bp, Bacteroides thetaiotaomicron; identical to SEQ ID NO: 455
  CDS (1)..(1407)

SEQ ID NO: 12381 - protein, 468 aa, Bacteroides thetaiotaomicron; identical to SEQ ID NO: 456

SEQ ID NO: 12382 - DNA, 1404 bp, Staphylococcus epidermidis; identical to SEQ ID NO: 457
  CDS (1)..(1404)

SEQ ID NO: 12383 - protein, 467 aa, Staphylococcus epidermidis; identical to SEQ ID NO: 458

SEQ ID NO: 12384 - DNA, 1545 bp, Aspergillus niger; identical to SEQ ID NO: 459
  CDS (1)..(1545)

SEQ ID NO: 12385 - protein, 514 aa, Aspergillus niger; identical to SEQ ID NO: 460

SEQ ID NO: 12386 - DNA, 1584 bp, Aspergillus niger; identical to SEQ ID NO: 461
  CDS (1)..(1584)

SEQ ID NO: 12387 - protein, 527 aa, Aspergillus niger; identical to SEQ ID NO: 462

SEQ ID NO: 12388 - DNA, 1752 bp, Aspergillus niger; identical to SEQ ID NO: 463
  CDS (1)..(1752)

SEQ ID NO: 12389 - protein, 583 aa, Aspergillus niger; identical to SEQ ID NO: 464

SEQ ID NO: 12390 - DNA, 1593 bp, Aspergillus niger; identical to SEQ ID NO: 465
  CDS (1)..(1593)

SEQ ID NO: 12391 - protein, 530 aa, Aspergillus niger; identical to SEQ ID NO: 466

SEQ ID NO: 12392 - DNA, 1584 bp, Emericella nidulans; identical to SEQ ID NO: 467
  CDS (1)..(1584)

SEQ ID NO: 12393 - protein, 527 aa, Emericella nidulans; identical to SEQ ID NO: 468

SEQ ID NO: 12394 - DNA, 1599 bp, Aspergillus oryzae; identical to SEQ ID NO: 469
  CDS (1)..(1599)

SEQ ID NO: 12395 - protein, 532 aa, Aspergillus oryzae; identical to SEQ ID NO: 470

SEQ ID NO: 12396 - DNA, 1943 bp, Arabidopsis thaliana; identical to SEQ ID NO: 471
  CDS (139)..(1650)

SEQ ID NO: 12397 - protein, 503 aa, Arabidopsis thaliana; identical to SEQ ID NO: 472

SEQ ID NO: 12398 - DNA, 2234 bp, Kluyveromyces lactis; identical to SEQ ID NO: 473
  CDS (402)..(2102)

SEQ ID NO: 12399 - protein, 566 aa, Kluyveromyces lactis; identical to SEQ ID NO: 474

SEQ ID NO: 12400 - DNA, 1476 bp, Corynebacterium glutamicum; identical to SEQ ID NO: 475
  CDS (1)..(1476)

SEQ ID NO: 12401 - protein, 491 aa, Corynebacterium glutamicum; identical to SEQ ID NO: 476

SEQ ID NO: 12402 - DNA, 2187 bp, Drosophila melanogaster; identical to SEQ ID NO: 477
  CDS (198)..(1688)

SEQ ID NO: 12403 - protein, 496 aa, Drosophila melanogaster; identical to SEQ ID NO: 478

SEQ ID NO: 12404 - DNA, 1972 bp, Trichoderma harzianum; identical to SEQ ID NO: 479
  CDS (123)..(1754)

SEQ ID NO: 12405 - protein, 543 aa, Trichoderma harzianum; identical to SEQ ID NO: 480

SEQ ID NO: 12406 - DNA, 1830 bp, Arabidopsis thaliana; identical to SEQ ID NO: 481
  CDS (74)..(1522)

SEQ ID NO: 12407 - protein, 482 aa, Arabidopsis thaliana; identical to SEQ ID NO: 482

SEQ ID NO: 12408 - DNA, 1599 bp, Neurospora crassa; identical to SEQ ID NO: 483
  CDS (1)..(1599)

SEQ ID NO: 12409 - protein, 532 aa, Neurospora crassa; identical to SEQ ID NO: 484

SEQ ID NO: 12410 - DNA, 1860 bp, Oryza sativa; identical to SEQ ID NO: 485
  CDS (3)..(1736)

SEQ ID NO: 12411 - protein, 577 aa, Oryza sativa; identical to SEQ ID NO: 486

SEQ ID NO: 12412 - DNA, 1569 bp, Uromyces fabae; identical to SEQ ID NO: 487
  CDS (1)..(1569)

SEQ ID NO: 12413 - protein, 522 aa, Uromyces fabae; identical to SEQ ID NO: 488

SEQ ID NO: 12414 - DNA, 1620 bp, Aspergillus oryzae; identical to SEQ ID NO: 489
  CDS (1)..(1620)

SEQ ID NO: 12415 - protein, 539 aa, Aspergillus oryzae; identical to SEQ ID NO: 490

SEQ ID NO: 12416 - DNA, 1725 bp, Oryza sativa; identical to SEQ ID NO: 491
  CDS (1)..(1725)

SEQ ID NO: 12417 - protein, 574 aa, Oryza sativa; identical to SEQ ID NO: 492

SEQ ID NO: 12418 - DNA, 1440 bp, Zymomonas mobilis; identical to SEQ ID NO: 493
  CDS (1)..(1440)

SEQ ID NO: 12419 - protein, 479 aa, Zymomonas mobilis; identical to SEQ ID NO: 494

SEQ ID NO: 12420 - DNA, 1766 bp, Apium graveolens var; identical to SEQ ID NO: 495
  CDS (17)..(1558)

SEQ ID NO: 12421 - protein, 513 aa, Apium graveolens var; identical to SEQ ID NO: 496

SEQ ID NO: 12422 - DNA, 2041 bp, Mesembryanthemum crystallinum; identical to SEQ ID NO: 497
  CDS (118)..(1785)

SEQ ID NO: 12423 - protein, 555 aa, Mesembryanthemum crystallinum; identical to SEQ ID NO: 498

SEQ ID NO: 12424 - DNA, 1530 bp, Pichia angusta; identical to SEQ ID NO: 499
  CDS (1)..(1530)

SEQ ID NO: 12425 - protein, 509 aa, Pichia angusta; identical to SEQ ID NO: 500

SEQ ID NO: 12426 - DNA, 1864 bp, Spinacia oleracea; identical to SEQ ID NO: 501
  CDS (61)..(1716)

SEQ ID NO: 12427 - protein, 551 aa, Spinacia oleracea; identical to SEQ ID NO: 502

SEQ ID NO: 12428 - DNA, 1822 bp, Arabidopsis thaliana; identical to SEQ ID NO: 503
  CDS (65)..(1684)

SEQ ID NO: 12429 - protein, 539 aa, Arabidopsis thaliana; identical to SEQ ID NO: 504

SEQ ID NO: 12430 - DNA, 1653 bp, Pichia stipitis; identical to SEQ ID NO: 505
  CDS (1)..(1653)

SEQ ID NO: 12431 - protein, 550 aa, Pichia stipitis; identical to SEQ ID NO: 506

SEQ ID NO: 12432 - DNA, 2408 bp, Drosophila melanogaster; identical to SEQ ID NO: 507
  CDS (316)..(1839)

SEQ ID NO: 12433 - protein, 507 aa, Drosophila melanogaster; identical to SEQ ID NO: 508

SEQ ID NO: 12434 - DNA, 1506 bp, Oryza sativa; identical to SEQ ID NO: 509
  CDS (1)..(1506)

SEQ ID NO: 12435 - protein, 501 aa, Oryza sativa; identical to SEQ ID NO: 510

SEQ ID NO: 12436 - DNA, 1767 bp, Kluyveromyces lactis; identical to SEQ ID NO: 511
  CDS (1)..(1767)

SEQ ID NO: 12437 - protein, 588 aa, Kluyveromyces lactis; identical to SEQ ID NO: 512

SEQ ID NO: 12438 - DNA, 1557 bp, Schizosaccharomyces pombe; identical to SEQ ID NO: 513
  CDS (1)..(1557)

SEQ ID NO: 12439 - protein, 518 aa, Schizosaccharomyces pombe; identical to SEQ ID NO: 514

SEQ ID NO: 12440 - DNA, 2468 bp, Mus musculus; identical to SEQ ID NO: 515
  CDS (34)..(1605)

SEQ ID NO: 12441 - protein, 523 aa, Mus musculus; identical to SEQ ID NO: 516

SEQ ID NO: 12442 - DNA, 2355 bp, Canis familiaris; identical to SEQ ID NO: 517
  CDS (201)..(1688)

SEQ ID NO: 12443 - protein, 495 aa, Canis familiaris; identical to SEQ ID NO: 518

SEQ ID NO: 12444 - DNA, 1485 bp, Ovis aries; identical to SEQ ID NO: 519
  CDS (1)..(1485)

SEQ ID NO: 12445 - protein, 494 aa, Ovis aries; identical to SEQ ID NO: 520

SEQ ID NO: 12446 - DNA, 1638 bp, Candida albicans; identical to SEQ ID NO: 521
  CDS (1)..(1638)

SEQ ID NO: 12447 - protein, 545 aa, Candida albicans; identical to SEQ ID NO: 522

SEQ ID NO: 12448 - DNA, 2425 bp, Kluyveromyces lactis; identical to SEQ ID NO: 523
  CDS (539)..(2194)

SEQ ID NO: 12449 - protein, 551 aa, Kluyveromyces lactis; identical to SEQ ID NO: 524

SEQ ID NO: 12450 - DNA, 2099 bp, Saccharomyces cerevisiae; identical to SEQ ID NO: 525
  CDS (180)..(1910)

SEQ ID NO: 12451 - protein, 576 aa, Saccharomyces cerevisiae; identical to SEQ ID NO: 526

SEQ ID NO: 12452 - DNA, 1785 bp, Neurospora crassa; identical to SEQ ID NO: 527
  CDS (1)..(1785)

SEQ ID NO: 12453 - protein, 594 aa, Neurospora crassa; identical to SEQ ID NO: 528

SEQ ID NO: 12454 - DNA, 27 bp, Artificial sequence
  Primer sequence
atgaaaaatatcatttcattggtaagc

SEQ ID NO: 12455 - DNA, 27 bp, Artificial sequence
  Primer sequence
ttaacatttatcagctgcatttaattc

SEQ ID NO: 12456 - DNA, 1728 bp, Saccharomyces cerevisiae
  CDS (1)..(1728)
atgctatcagcaaggtgcctcaaatctatatacttcaagagatctttctcacaactgggacacatcaagccccccaagcacataagaaatgaacctgttaagccatttagaaacatagacttaaaagactgggacttactgagggcttccttgatgaaattcaaaagttcttctttagaagtgccactggtcatcaatggggaaaggatatatgacaataatgaaagagcgcttttcccgcagactaaccctgcgaaccatcaacaagtactggcaaacgtcacacaagccacggaaaaagatgtcatgaatgctgtaaaagccgccaaggatgccaaaaaggattggtacaatctaccgttttatgacagatctgcaatttttttgaaagccgctgacttaatttccaccaagtatcgttatgacatgttagctgctacaatgctgggccagggaaaaaatgtgtatcaggcagaaatcgactgtatcacggaattatctgacttttttagatactatgtcaagtatgcatcagacttgtatgctcaacaacccgtagagtcagcggatggtacttggaataaagctgaatacagacctttagagggatttgtgtatgctgtttcaccattcaactttactgctattgctgcaaacttgattggggctccagctttgatgggtaatacagttgtctggaaaccttcacaaaccgctgccctttcaaattacttattgatgactgttttggaagaagcgggattgccaaagggtgtcataaatttcattccaggtgatccagttcaagttactgaccaggtattagctgataaagattttggtgccttgcattttaccggttctacaaatgtctttaagagtttgtatggcaaaatacaaagtggcgttgttgaagggaagtacagagattacccccgtattattggtgagacaggtggtaaaaatttccatctagttcacccaagtgcaaatatatcacatgcagtactctctactattagaggcactttcgagttccaaggccaaaagtgctctgccgcttccaggttatatcttccagagtcaaaaagtgaagaattcttatccgatatgtttggcatattgcagtcacagaatgttgtcccaatgaacacatccgcaagtccaatttctggtgggaatttgcggggatttatgggtcctgtcatccatgaacaaagtttcgacaaattagttaaagtaattgaagatgcaaagaaagaccccgagttggaaattctttacggtggacaatacgataaaagccaaggttggtttgtcggacccacagtcataaaagccaagagaccagatcatccatatatgtcaacagaattttttggccctatattaactgtttacgagtatccagatactgaatttaatgaaatctgtgatattatcgataatacgagtcaatacgccttaactggtgctatttttgccaaagatcgtaaagcaattgaatacgcagatgagaagttgaagtttagcgcaggaaatttctacataaatgataagtgtactggtgccgttgtttctcagcaatggtttggtggcgcaagaatgagtggtaccgacgataaggctggtggtccaaacattttaagcagatttgtcagtattagaaacacaaaggagaacttctacgagttgactgatttcaaatatccatcgaattatgaataa

SEQ ID NO: 12457 - protein, 575 aa, Saccharomyces cerevisiae
MLSARCLKSIYFKRSFSQLGHIKPPKHIRNEPVKPFRNIDLKDWDLLRASLMKFKSSSLEVPLVINGERIYDNNERALFPQTNPANHQQVLANVTQATEKDVMNAVKAAKDAKKDWYNLPFYDRSAIFLKAADLISTKYRYDMLAATMLGQGKNVYQAEIDCITELSDFFRYYVKYASDLYAQQPVESADGTWNKAEYRPLEGFVYAVSPFNFTAIAANLIGAPALMGNTVVWKPSQTAALSNYLLMTVLEEAGLPKGVINFIPGDPVQVTDQVLADKDFGALHFTGSTNVFKSLYGKIQSGVVEGKYRDYPRIIGETGGKNFHLVHPSANISHAVLSTIRGTFEFQGQKCSAASRLYLPESKSEEFLSDMFGILQSQNVVPMNTSASPISGGNLRGFMGPVIHEQSFDKLVKVIEDAKKDPELEILYGGQYDKSQGWFVGPTVIKAKRPDHPYMSTEFFGPILTVYEYPDTEFNEICDIIDNTSQYALTGAIFAKDRKAIEYADEKLKFSAGNFYINDKCTGAVVSQQWFGGARMSGTDDKAGGPNILSRFVSIRNTKENFYELTDFKYPSNYE

SEQ ID NO: 12458 - DNA, 1548 bp, Bacillus subtilis
  CDS (1)..(1548)
atgacaacaccttacaaacacgagccattcacaaatttccaagatcaaaactacgtggaagcgtttaaaaaagcgcttgcgacagtaagcgaatatttaggaaaagactatccgcttgtcattaacggcgagagagtggaaacggaagcgaaaatcgtttcaatcaacccagctgataaagaagaagtcgtcggccgagtgtcaaaagcgtctcaagagcacgctgagcaagcgattcaagcggctgcaaaagcatttgaagagtggagatacacgtctcctgaagagagagcggctgtcctgttccgcgctgctgccaaagtccgcagaagaaaacatgaattctcagctttgcttgtgaaagaagcaggaaagccttggaacgaggcggatgccgatacggctgaagcgattgacttcatggagtattatgcacgccaaatgatcgaactggcaaaaggcaaaccggtcaacagccgtgaaggcgagaaaaaccaatatgtatacacgccgactggagtgacagtcgttatcccgccttggaacttcttgtttgcgatcatggcaggcacaacagtggcgccgatcgttactggaaacacagtggttctgaaacctgcgagtgctacacctgttattgcagcaaaatttgttgaggtgcttgaagagtccggattgccaaaaggcgtagtcaactttgttccgggaagcggatcggaagtaggcgactatcttgttgaccatccgaaaacaagccttatcacatttacgggatcaagagaagttggtacgagaattttcgaacgcgcggcgaaggttcagccgggccagcagcatttaaagcgtgtcatcgctgaaatgggcggtaaagatacggttgttgttgatgaggatgcggacattgaattagcggctcaatcgatctttacttcagcattcggctttgcgggacaaaaatgctctgcaggttcacgtgcagtagttcatgaaaaagtgtatgatcaagtattagagcgtgtcattgaaattacggaatcaaaagtaacagctaaacctgacagtgcagatgtttatatgggacctgtcattgaccaaggttcttatgataaaattatgagctatattgagatcggaaaacaggaagggcgtttagtaagcggcggtactggtgatgattcgaaaggatacttcatcaaaccgacgatcttcgctgaccttgatccgaaagcaagactcatgcaggaagaaattttcggacctgtcgttgcattttgtaaagtgtcagactttgatgaagctttagaagtggcaaacaatactgaatatggtttgacaggcgcggttatcacaaacaaccgcaagcacatcgagcgtgcgaaacaggaattccatgtcggaaacctatacttcaaccgcaactgtacaggtgctatcgtcggctaccatccgtttggcggcttcaaaatgtcgggaacggattcaaaagcaggcgggccggattacttggctctgcatatgcaagcaaaaacaatcagtgaaatgttctaa

SEQ ID NO: 12459 - protein, 515 aa, Bacillus subtilis
MTTPYKHEPFTNFQDQNYVEAFKKALATVSEYLGKDYPLVINGERVETEAKIVSINPADKEEVVGRVSKASQEHAEQAIQAAAKAFEEWRYTSPEERAAVLFRAAAKVRRRKHEFSALLVKEAGKPWNEADADTAEAIDFMEYYARQMIELAKGKPVNSREGEKNQYVYTPTGVTVVIPPWNFLFAIMAGTTVAPIVTGNTVVLKPASATPVIAAKFVEVLEESGLPKGVVNFVPGSGSEVGDYLVDHPKTSLITFTGSREVGTRIFERAAKVQPGQQHLKRVIAEMGGKDTVVVDEDADIELAAQSIFTSAFGFAGQKCSAGSRAVVHEKVYDQVLERVIEITESKVTAKPDSADVYMGPVIDQGSYDKIMSYIEIGKQEGRLVSGGTGDDSKGYFIKPTIFADLDPKARLMQEEIFGPVVAFCKVSDFDEALEVANNTEYGLTGAVITNNRKHIERAKQEFHVGNLYFNRNCTGAIVGYHPFGGFKMSGTDSKAGGPDYLALHMQAKTISEMF

SEQ ID NO: 12460 - DNA, 1662 bp, Aeropyrum pernix
  CDS (1)..(1662)
atgactattgtttggacaccggttaaagggtggttcctcgtggctttatggaggatagagaagcctaagaacgagcctttcctggagtttaggcctgggactaaggagagggagcttctaaagaagaagctcgaggaggttaagagtaagaccgtcgagatccccctgataatcggggggaaagaggtcaagactggtgagaccgtcgagatacgcgcgccccacgataaggatgccgtgctggctgtagcccaccttgctggggaggaggagataagggatgccatagagaaggccctggacgcttggacaaagtggtccgagatggagtggtaccacagggcctcagtcttcctgaaggctgcagacctgctggcggggccctacaggcttgaggccgatgctgtcataatgcttaaccactcgaagacgccgtgggaggcggagatagacctggcagaactcgtggacttctggaggtttggggcctactatgctagattcatcttcgaacagcagcctgagcaggctcccggcgagctaaacagggtcgagtggcggcctctagagggcttcgtattcgcagttcccccgttcaacttcttcagcataggaggtaacctgcccaccgcccccgcgctcgtggggaacgtgtcgatatggaagccttccagatgggttatatactccaactacataataatgaggatcctgatggaggctgggctacctccgggcgtggtaaacttcgttcccttcaacaccaagtactcgagcatagtgctctcccacccagacttcgcaggcctccacttcacagggagctactcaactttcgtcaggctctggaagatgatagcgcagaacctggacaagtacaggaacttccccaggatagtgggcgagacgggcggtaaagacttcattgtggtccacccgagcgcagacataaccgaggcagtggttgctacgataagaggagccttcgagtaccaggggcagaagtgcagcgctgcctccaggctattcgtacccaagagcatgtggcccaggttctgggaggccatgaaggcggagctggataaggttaaggtcgggccggttgacgacttcacagtattcatgggcgccataataagcgaggagcagtttaggaagatagtctcctacatagagtatgctaagcagcatcccgaggagtaccagataatctacggtggcaagtatgatgacagtaagggctacttcatatggcctactgtcgtgctcaccaacaacccgaagggcaagctgatgacagaagagatcttcggccctgtgctcacggtctacgtgtatgacgacgacaagtatgatgagatactgtgggttgtggacaaggcagctccctacggactaacagggtccgtgttcgcgaaggatagggaggccatactcaaggcggagaaggcgcttaggtatgcagcaggcaacttctacataaacgacaagccgacaggatccatagtggctagacagcccttcggaggcgccagatggtcgggcaccaacgacaaggcaggctggttcacaaacctcctaaggtggctgaacccgagatcgataaaggagaccctagtgccgccgaaagagtggagaagaccctatatgggagaggactag

SEQ ID NO: 12461 - protein, 553 aa, Aeropyrum pernix
MTIVWTPVKGWFLVALWRIEKPKNEPFLEFRPGTKERELLKKKLEEVKSKTVEIPLIIGGKEVKTGETVEIRAPHDKDAVLAVAHLAGEEEIRDAIEKALDAWTKWSEMEWYHRASVFLKAADLLAGPYRLEADAVIMLNHSKTPWEAEIDLAELVDFWRFGAYYARFIFEQQPEQAPGELNRVEWRPLEGFVFAVPPFNFFSIGGNLPTAPALVGNVSIWKPSRWVIYSNYIIMRILMEAGLPPGVVNFVPFNTKYSSIVLSHPDFAGLHFTGSYSTFVRLWKMIAQNLDKYRNFPRIVGETGGKDFIVVHPSADITEAVVATIRGAFEYQGQKCSAASRLFVPKSMWPRFWEAMKAELDKVKVGPVDDFTVFMGAIISEEQFRKIVSYIEYAKQHPEEYQIIYGGKYDDSKGYFIWPTVVLTNNPKGKLMTEEIFGPVLTVYVYDDDKYDEILWVVDKAAPYGLTGSVFAKDREAILKAEKALRYAAGNFYINDKPTGSIVARQPFGGARWSGTNDKAGWFTNLLRWLNPRSIKETLVPPKEWRRPYMGED

SEQ ID NO: 12462 - DNA, 1548 bp, Bacillus halodurans
  CDS (1)..(1548)
atgttgcaaccatataagcatgagccatttacagattttacggtggaagcgaatcgaaaagcgtttgaagaagcacttggacttgtagaaaaagagttaggcaaagagtatccattaattatcaatggtgagcgggttacaacagaggacaagatccaatcttggaaccctgctcgtaaagatcaattggttggttctgtttctaaagcgaatcaggaccttgcagagaaagctattcaatcagcagatgaagcgttccaaacttggcgcaacgtcaaccctgaggagcgtgcgaacattttagtgaaggctgctgcgatcatccgtcgccgcaagcatgagttttctgcatggcttgtacatgaagctgggaagccgtggaaggaagcggatgcggatacggcggaagcgatcgacttccttgaatattatgctcggcaaatgattgagcttaataggggaaaagagattcttagccgtccaggcgagcaaaaccgttacttctatacaccaatgggcgtgacagttacgatttctccatggaacttcgcccttgcgatcatggtcggtacggcagtagctccgattgtgacaggaaacacagttgtccttaagcctgccagtacgacacctgtcgttgctgctaaatttgttgaagttcttgaggatgcagggttaccaaaaggcgttatcaactatgtaccaggaagcggcgctgaagtcggtgactaccttgttgatcatccgaaaacgagtcttattacgtttacgggctcaaaagatgtcggtgttcgtttatatgagcgggcagctgttgttcgaccaggacaaaaccacttgaagcgcgtcattgtagaaatgggtggaaaggataccgttgtcgtcgatcgcgatgctgatcttgatttggctgcagaatccatcctcgtctccgccttcgggttctcgggacaaaaatgttctgctgggtcacgggctgttatccacaaggatgtctacgatgaagtgttagaaaaaacggtcgcccttgcgaaaaacttaacggttggcgatcctacgaaccgcgacaactacatgggaccagtaattgatgaaaaagcgtttgaaaaaattatgtcatacattgaaattggtaaaaaagaaggccgtctcatgacgggcggagaaggagacagctctacaggcttcttcatccaaccgacgattattgctgaccttgatccagaagcggtgatcatgcaagaagaaatatttggaccggtggttgctttcagcaaagcgaacgattttgatcatgcactcgaaattgccaacaacacagagtatggcttaacaggagcggtgattacgagaaatcgcgcccacatcgagcaagcaaagcgagagttccatgtcggaaacttgtatttcaaccgtaattgcacaggagcaatcgttggctatcatccatttggcggctttaaaatgtctggtaccgattcaaaagcaggtggtcctgactatttagcgcttcatatgcaagcgaagacagtatcagaaatgtattaa

SEQ ID NO: 12463 - protein, 515 aa, Bacillus halodurans
MLQPYKHEPFTDFTVEANRKAFEEALGLVEKELGKEYPLIINGERVTTEDKIQSWNPARKDQLVGSVSKANQDLAEKAIQSADEAFQTWRNVNPEERANILVKAAAIIRRRKHEFSAWLVHEAGKPWKEADADTAEAIDFLEYYARQMIELNRGKEILSRPGEQNRYFYTPMGVTVTISPWNFALAIMVGTAVAPIVTGNTVVLKPASTTPVVAAKFVEVLEDAGLPKGVINYVPGSGAEVGDYLVDHPKTSLITFTGSKDVGVRLYERAAVVRPGQNHLKRVIVEMGGKDTVVVDRDADLDLAAESILVSAFGFSGQKCSAGSRAVIHKDVYDEVLEKTVALAKNLTVGDPTNRDNYMGPVIDEKAFEKIMSYIEIGKKEGRLMTGGEGDSSTGFFIQPTIIADLDPEAVIMQEEIFGPVVAFSKANDFDHALEIANNTEYGLTGAVITRNRAHIEQAKREFHVGNLYFNRNCTGAIVGYHPFGGFKMSGTDSKAGGPDYLALHMQAKTVSEMY

SEQ ID NO: 12464 - DNA, 2991 bp, Nostoc sp. PCC 7120
  CDS (1)..(2991)
atggtattacaagtacaaaccagcacctacgaagcgaaaactcaagaaattgctagacaattattaggagcaactcaagaaaatcgctcgttttttgcttctttacgtgatcaaatgcgttgggatgacaaattactggcttgggcgatgagtaatcccggtttacgggtgcaattatttcggtttattgatactttacccgcattgcatagtaaagcggaaattgctgcacatttacaagaatatttaggggatgaatctgtcgaacttcccgccgctttaaagggaatgctcaattttgctaaccctgactctgtgccgggacaagtggctgcaactaccgtctctacagcagttgagactttagctcataaatatatttctggtgaaaatattaaacaagtcatcaagacagttgaacgactacggaaagaaaaaatggccttcaccattgatttacttggtgaggcggtaattacagaaacagaggcgcaatcttatctagaacggtatctagaattaattgctcaattaacagaagcatcgaagaattggggaactattgcggctattgatgaagcagatggcgaacagctagcaaaagtccaggtttctgtcaaactaacagcgttttattcccaatttgacccattggatgctaaaggtagtgaggagaaagttagcgatcgcattcgtattttattacgtcgtgctaaggagttaggggcagctatccattttgatatggaacagtatgcttataaagacttaactttaaatattttgcaaaaaatcttattagaagatgagtttcgtcaacgcacagatattggcatcacaattcaagcatacctaagagatagtgagcaagatgccagaaatgcgatcgcttggttgaaacagcgcggttatcctttaactattaggctggtaaaaggggcgtattgggatcaagaaactattaaagctgcacaaaaacattggccgcagcctgtttttaatgataaagcagcgacagatgccaattttgaggcgataactcagttattactggaaaatcaccaatatgtttattctgccattggtagccataatgtgcgatcgcaagctttagctatggcaattgcggaaactttgaatgtcccccggcggcggtttgagatgcaggtgctgtacgggatgggggataagttagcgaaggctttggttgatcggggttatcgggtgcgggtttattgtccttatggtgacttattaccggggatggcttacctgattcggcgattgttggaaaatacggcgaatagttcgtttttacggcagaatttggagaatcggccggttgaggagttgctggcagcgccgaaagttgatttagcccaggcaaaggtgcattcgccggaggcattcccacagggtaaacactttgtgggggctgcggatacagattatgcagaggaggaggacagaacaaaggcggcgcgggcttttgctgtggtacgtggggagttaggcaagacttacttacctctaattaatggggagtatgtgcagactgctgaggtgattgattctgttaatccttctaattttagtgaggtgattggcaaggttggattgattagtgtggaacaggcagaacaggcgatgcaggcggcgaaggcggcttttcctggttggcggcgcacgtcggtgaaggaacgggcggggattttgcgtcgggctggtgatttgatggaacagcgccgggcggaattgtcggcttggatagttttagaggtggggaaacctgttaaagaagcagatggggaggtttcggaggcgatagatttttgccgctattatgctgatgagatggaacggttgcatcaaggtataaattatgatgtagatggggaaacgaatcgttatatttaccagccacggggtattgtggtagtgatttctccttggaattttcctttagcgatcgcctgtggaatgactgttgcagccttagttacaggcaattgtactctgctaaagcctgcggaaacttcttctgtcattactgccaaactaacggaaattttggtagaggctggcattcctaaaggtgtctttcaatacgtccctggtaagggttctcaagtcggtgcttacttggtaagtcatcctgatactcatctgattgcttttacaggttctcaggaagttggttgtcggatttacgccgaagccgctaccctgaaaccccaacaaaggcacatgaagcgggtaattgcggaaatgggcgggaagaatgccatcattgtggatgaaagtgctgatttagaccaagctgttgttggggtagtgcagtcagcctttggttacagtggacaaaaatgttctgcttgttcgcgggtggtggtagtagaagcaatttatgatgcttttatccaccgggtggtggaagcgacaaaatccttaaatattggcgaggcggagttaccaagtacccaagtcggccctgtgattgatgctaatgcgcgcgatcgcatccgcgagtatattgagaagggtaaggcagaatctcaggtggcgttggaattaagcgcacccaaccacggctattttgtcgggcctgtcatctttggggaagttccacctcatggcacaatagcccagcaggaaattttcggccctgtgctggcggtaatcaaagccaaagattttgcccaagctttagctattgctaatgataccgactacgccttgactggagggctttattcccgcacaccttcccatattcaacaagcccaggaagagtttgaagtgggtaacttatatatcaaccgtaacatcacaggggcgatcgttgcgagacagcctttcggtggctttaagctttccggtgtcggttccaaagcaggcggccctgattatctgttgcaattcctcgaaccaaggacaatcacagaaaacattcagcgccaaggttttgcacccattgaaggtgcagaataa

SEQ ID NO: 12465 - protein, 996 aa, Nostoc sp. PCC 7120
MVLQVQTSTYEAKTQEIARQLLGATQENRSFFASLRDQMRWDDKLLAWAMSNPGLRVQLFRFIDTLPALHSKAEIAAHLQEYLGDESVELPAALKGMLNFANPDSVPGQVAATTVSTAVETLAHKYISGENIKQVIKTVERLRKEKMAFTIDLLGEAVITETEAQSYLERYLELIAQLTEASKNWGTIAAIDEADGEQLAKVQVSVKLTAFYSQFDPLDAKGSEEKVSDRIRILLRRAKELGAAIHFDMEQYAYKDLTLNILQKILLEDEFRQRTDIGITIQAYLRDSEQDARNAIAWLKQRGYPLTIRLVKGAYWDQETIKAAQKHWPQPVFNDKAATDANFEAITQLLLENHQYVYSAIGSHNVRSQALAMAIAETLNVPRRRFEMQVLYGMGDKLAKALVDRGYRVRVYCPYGDLLPGMAYLIRRLLENTANSSFLRQNLENRPVEELLAAPKVDLAQAKVHSPEAFPQGKHFVGAADTDYAEEEDRTKAARAFAVVRGELGKTYLPLINGEYVQTAEVIDSVNPSNFSEVIGKVGLISVEQAEQAMQAAKAAFPGWRRTSVKERAGILRRAGDLMEQRRAELSAWIVLEVGKPVKEADGEVSEAIDFCRYYADEMERLHQGINYDVDGETNRYIYQPRGIVVVISPWNFPLAIACGMTVAALVTGNCTLLKPAETSSVITAKLTEILVEAGIPKGVFQYVPGKGSQVGAYLVSHPDTHLIAFTGSQEVGCRIYAEAATLKPQQRHMKRVIAEMGGKNAIIVDESADLDQAVVGVVQSAFGYSGQKCSACSRVVVVEAIYDAFIHRVVEATKSLNIGEAELPSTQVGPVIDANARDRIREYIEKGKAESQVALELSAPNHGYFVGPVIFGEVPPHGTIAQQEIFGPVLAVIKAKDFAQALAIANDTDYALTGGLYSRTPSHIQQAQEEFEVGNLYINRNITGAIVARQPFGGFKLSGVGSKAGGPDYLLQFLEPRTITENIQRQGFAPIEGAE

SEQ ID NO: 12466 - DNA, 6633 bp, Brucella melitensis
  CDS (1351)..(5007)
ggcgttgatggcggccatcacagtggcgtcgacggcggtcatcgcggcgacttcggtttagactaaattatagatattgaatcaatgtctgtttggtctgatgtatgggccagtggattatttgatgtatctctaattttcgcatcgccaagttgattgatcttatagaaataccaatacgaagccccgctctgcggggctttttcgtgatggggaaattttagatttcaggcaaaaaaagagccggactgggaagtccggccaagttatgaaggtgccacttgggcaaacctccagaggggaacacttaccgtgcgcaatgggaggaggcacaacggtaagtacctgtgatatggagcagaatgctctattcttcaaccccaaaacataattatttttgaccattcagaaaattttgaactttttggccctatcggctttcggaagccgaaaccgaagggtttcgcgttccgtttcggggcgggcaaaaagaaaaacccgaaatgatttccattggatcgttgacagagcggctcctgttttaacagaatcgccagaaccgctctatctctttgtttttagcacttttggctcgaaaatgctctgggctgtcgtgacgaatggaaatgttttcggactgcttgccgcaaactcttataaaaacaatcacaacgcgcccggatagaccctgatcgggcggttatcctttacggattccatcaccacgaaggtggatgtgcttgccacattgggcaggctggagattttttcgcccagcacctcgcggtagcgccggatgttgggtgtgcgcactttcaggagatagtcgaaggagctggcgatcatgtggcattcctctacctcgcgtatcttgcgcaccgccacattgaacgcttcaagtgctgcctcccgcgtatccgataatttgaccgttgtgaaagcgatatggtcgaggcccagtttttccgggtcgatggctgcgcgaaaacccagaatatagccttcatcgaccagtcttttcagtcgcgcctgacatggcgtcttggaaaggccgacccttttcgacagttccgtcaccgggatgcgcccatcttcgctcaggacctccagaatgcgccggtcgaactgatccatatcgtctagcgagtctatctttcgcattctataagccttcataggaggtaataataagatcggattgcctatttatagctaaaaagagggcagaatggaatttatgcggatgataatgtgcaactaaattaaagaagggctatccttgagtgacatctggggccttttcctttttgtgagcagtgcaccatgaccgataatatttctgtttccaaaatggccgttttccagaattttgcgccgccgatccgcgagcaaagcgcactgaggcaagcgatcactgccgcttatcgccgccccgaagccgaatgcgtttcagcgctggccgagcaggcaaccttgccggaggagacgcgccagcaaatccgttccaccgcccgcaagctgatcgaagcgctgcgtgccaagcataagggcaccggcatcgaaggtctggtgcatgaatattcgctgtcgagccaggaaggcgtggcgctgatgtgccttgccgaagccttgctgcgcattcccgatatggcgacgcgcgatgcgctgatccgcgacaagatatcgaatggcgactggaaatcccacattggcggcgggcgctcgcttttcgtcaatgctgcgacatggggcctggtcgttaccggcaagctcaccaataccgtcaatgatcgtggcctttccgccgctcttacccgcctcatcgcccgctgcggcgagccggtcatccgtcgcggcgtggacatggccatgcgcatgatgggcgagcagttcgtcaccggcgaaaccatcgatgaggcgttgaaacgcgccaaggagctggaagagcgcggcttccgctattcctacgacatgctgggcgaggccgcgaccaccgccgccgatgcagagcgttattataaggattatgaaaccgcgatccacgccatcggtcgtgcttccgcagggcgcggcatttatgatggtcccggcatttccatcaagctttcggcgcttcacccgcgttatacccgcgcgcaaagtgagcgcgtcatgggtgaacttctgccgaaggtgaaggcactcgcggccatcgccaagtcctataatatcggcctcaatatcgacgcggaggaggccgaccgtcttgaactgtcgctcgacctgttgcaaagcctttgcgaagaccctgatctggcaggctgggatggcatcggcttcgtggtgcaggcctatggcaagcgctgccccctcgtgcttgatttcatcatcgatctggctcgccgcaccaagcgccgcgtcatggtgcgtctggtgaagggcgcctattgggatgcggagatcaagcgtgcgcaggtggatgggctggaggattttccggtctatacccgcaaggtgcatacggacgtttcctatattgcctgcgcgcgcaagcttctggccgcgacggatgtgatctttccgcaatttgcgacccataacgcgcagacactcgccacgatctatcatctggccgggccggatttcaaaaccggtaagtttgagttccaatgcctgcacggcatgggtgagccgctttatgatgaagtcgtcggccccgaaaagctcggtcgcccggcccgcatttatgcaccggtcggcacgcatgaaacgctgctcgcctatctcgtccgccgccttcttgaaaacggcgcgaactcctccttcgtcaaccgtattggcgacaaaaacgtctcggtcgatgagctgatcgccgatccggtggaagtcgtccggtcgatggctgtcgtcggtgcgcgtcatgaccagattgcgctgccggaaaatctctatggcgcgcgccgcaattccgcaggctttgatctttccaatgaggtgacgcttgcggaactgagcaaaaccttgaaggaaacggcaggccgtgcatggaccgccgaaccgcaggtggcgggtgcaaaggtgaagggcgtaagccgtccggttctcaatcccggcgaccggaatgatgttgtcggcaccgtaacggaaatcgcagaggccgatgtggcaaaggcgatgaaggcagcgcaaaccgcgaccacaagctggtccgcggttgcgcccgcagaacgcgccgcctgtctggagcgcgcagccgatatcatgcagcgcgacatgccggctctgctcggcctcgtcatgcgcgaggcgggcaagtccatgccgaacgccattgccgaagtgcgtgaagccatcgatttcctgcgctattatgccgaacagacccgccgcacgcttggcgtcggccacaaggcgcttggccctgtcgtctgcatcagcccgtggaacttcccgctggcaatcttcaccggccagattgcggctgcacttgttgcaggcaatccggttctggcaaagcctgccgaggaaaccccgctgatcgccgctgagggcgtgcgcattctgcatgaggggggcattccggcggatgcgctccagcttctgccgggtgatggccgcattggcgccgcgctggttgcagcaccggaaacttgcggcgtaatgttcaccggctccaccgaggtggcgcggctcatccaggcgcagcttgcctcgcgcctgctgccgaacggaaagccggtcccgctcattgccgaaacgggcggtcagaacgccatgatcgtggattcctcggcacttgccgagcaggtggtgtttgatgtcatcgcttcggctttcgatagcgccggccagcgctgttcggcgctgcgtgtcctctgcttgcaggaagatgtggccgaccgcattctcaccatgctcaagggcgccttgcgtgagctttccattggccgcacggaccagctcaaggtcgatatcggcccggttatcaccgatgaggcgaagaacaccattgaaaagcatattcaggccatgcgcgatcttggccgcaaggtggaacagcttccccttggcccggaaacgcagaacggcacttttgttgcgccgacaatcatcgagattgaatcgctgcgcgatctcaagcgcgaagtgttcggcccggtcctgcatgtggttcgttacaagcgcgacgacatggaaagcctgatcgatgatatcaattcgaccggctatgggcttacttttggtttgcatacgcgccttgacgagacgattgccaatgttgcggatcgcatccgtgtcggcaatatctatatcaatcgcaacattatcggcgcagtggtgggcgtgcagcctttcggcgggcgtggcctttccggcaccggcccgaaggcgggcggtccgctctatcttggccgtctggtcgaaaccgcgccgatcccgccgcgtcacgcttcggttcataccgatgcggcgctgaaggactttgcccggtggctcggcaatcgcggcatgaacgatctggcgcaggcggcgcgcgataccggcagtgcttcggcgctcggtctcgaactcgaactgccgggcccggttggcgagcgcaatctctatgctctccacccgcgcgggcgcgtgcttctggtcccccagaccgaaattggcctctatcgccaattgacggcggtgctggcaaccggcaacactgcggtcatcgacgaggcttgcggtttgcgcgccgtgttgaaggatctgccggaaacagttgccgcgcgcgccatctggacgggcgactggcaggcggatgcgccttttgccggagcacttatcgaaggcgacagcgcgcgcatcaaggaggtgaactccaggatcgccgccctgccgggaccgctcgtactcacacaggcggcatcgccggaagatcttgcagccaatcaggatgcttattgcctcaactggctgcttgaggaagtctcgacctccatcaacaccacggcagcaggcggcaacgccagcctgatggcgatcggctgatttcttcgcatatgtgaggcagaaaaggcggctttccggccaccttttctttgcgccacgcaaggcttgcatggctgtgcagaaaaatcgacaacagaacgattagattattttctgaaaaatcggaataaaatttacaacgtgattgacagcccgatttaaaaggcgaagactatatatgcgctggcaaagcgtcggcgtggaggcgccgtatagagggaggaaaataatgcgttcagcattcatggttgcggcgctggccgctggggtatcgtcattcgcattctcggcccaggctgccggcaatctcaaccttatctgttcggcggatgtcgtcatctgcgaacagatgaaaaatatgttcgagaaagataccggaatcaaggtcaatatggtgcgcctttcttccggcgaaacctatgcgaaagtgcgtgccgaagcgcgcaatccgaagaccgatatctggtgggcaggcacgggcgacccgcaccttcaggccgcttccgaagggctgacgcttgaatataaatcgccgatgctcgaccagttgaatgattgggccaaaaaacaggctgaaagttccggcttccgcacggtcggggtttatgccggtgcgctgggctgggggtataacaccgatattttcgccaagaagaacctgaaggaaccgaagtgctgggccgatctcctggacccttcttataagggcgaaatccagatggccaatccgaattcttccggcacggcctatacggcgcttgccacgctggttcagatcatgggtgaggacaaaggctttgattatctgaagaaactcaacgccaatgtctcgcaatataccaagtccggttctgcgcctgtgaagtctgcggcgcgcggtgaaacgggcatcggcatcgtcttcatgcatgatgcggtggcgatgacggcggacggtttccccatcaagtctgtcgcgccatgcgaaggcacaggctatgaaatcggctcaatgtccatcatcaagggcgcgaagaaccttgaaaacgccaagaaatggtatgactgggcgctgaccgccgaggtgcagtcgcatatgaaggacgccaagtccttccagcttccctccaacaagtctgccgaggttccaaaggaatcgccgcgctttgaggatatcaagctcatcgattacgatttcaagacttatggcgaaccggccaagcgcaaggaattgctggagcgctgggacaatgaagtcggcgcagtcgccaactgatcgacctattgtaaaggcttgccgcacaagttgtcgcggcgggctgtcccggatggcgggcgcccggtttgaccgggcgcacgttatccttttcccggaaatcggcccggtagagaggggaagcggacgcactcatgacacaacataaccgcagactggatgccgttctggcaatcgcgctgatcgcctttgccctgctgccctggtatcgcattgaagacggcttcctgcatttcagctggattgaagttctgttcagcgaaagcgccgaggcgcccggcatattgcaaattttcgtcttcggacgttcgtggatcggggcgattgcccttctgatgctcatatgcgctgttgcgcgctttttcctgcct

SEQ ID NO: 12467 - protein, 1218 aa, Brucella melitensis
MAVFQNFAPPIREQSALRQAITAAYRRPEAECVSALAEQATLPEETRQQIRSTARKLIEALRAKHKGTGIEGLVHEYSLSSQEGVALMCLAEALLRIPDMATRDALIRDKISNGDWKSHIGGGRSLFVNAATWGLVVTGKLTNTVNDRGLSAALTRLIARCGEPVIRRGVDMAMRMMGEQFVTGETIDEALKRAKELEERGFRYSYDMLGEAATTAADAERYYKDYETAIHAIGRASAGRGIYDGPGISIKLSALHPRYTRAQSERVMGELLPKVKALAAIAKSYNIGLNIDAEEADRLELSLDLLQSLCEDPDLAGWDGIGFVVQAYGKRCPLVLDFIIDLARRTKRRVMVRLVKGAYWDAEIKRAQVDGLEDFPVYTRKVHTDVSYIACARKLLAATDVIFPQFATHNAQTLATIYHLAGPDFKTGKFEFQCLHGMGEPLYDEVVGPEKLGRPARIYAPVGTHETLLAYLVRRLLENGANSSFVNRIGDKNVSVDELIADPVEVVRSMAVVGARHDQIALPENLYGARRNSAGFDLSNEVTLAELSKTLKETAGRAWTAEPQVAGAKVKGVSRPVLNPGDRNDVVGTVTEIAEADVAKAMKAAQTATTSWSAVAPAERAACLERAADIMQRDMPALLGLVMREAGKSMPNAIAEVREAIDFLRYYAEQTRRTLGVGHKALGPVVCISPWNFPLAIFTGQIAAALVAGNPVLAKPAEETPLIAAEGVRILHEGGIPADALQLLPGDGRIGAALVAAPETCGVMFTGSTEVARLIQAQLASRLLPNGKPVPLIAETGGQNAMIVDSSALAEQVVFDVIASAFDSAGQRCSALRVLCLQEDVADRILTMLKGALRELSIGRTDQLKVDIGPVITDEAKNTIEKHIQAMRDLGRKVEQLPLGPETQNGTFVAPTIIEIESLRDLKREVFGPVLHVVRYKRDDMESLIDDINSTGYGLTFGLHTRLDETIANVADRIRVGNIYINRNIIGAVVGVQPFGGRGLSGTGPKAGGPLYLGRLVETAPIPPRHASVHTDAALKDFARWLGNRGMNDLAQAARDTGSASALGLELELPGPVGERNLYALHPRGRVLLVPQTEIGLYRQLTAVLATGNTAVIDEACGLRAVLKDLPETVAARAIWTGDWQADAPFAGALIEGDSARIKEVNSRIAALPGPLVLTQAASPEDLAANQDAYCLNWLLEEVSTSINTTAAGGNASLMAIG

SEQ ID NO: 12468 - DNA, 3972 bp, Yersinia pestis
  CDS (1)..(3972)
atggcgaataccacaatgggcgtaaagcttgatgaagcaacacgagaccgcatcaagagtgcagcacaacgtattgaccgcacaccacactggctcattaaacaggctattttcaactacttagaaaaactggaaagtaacagtgaattgccagaactggcaacaacaagttcactctctctgcaagacacagaagatgctataccgcaactcactgaaaacactcatcagccattcttggattttgcggaacacgtgctcccgcagtcggttacccgtgccgccattactgcggcttatcgtcgcccagaaaccgaagcgatccccatgttattggaacaagcacgcctacccgcagatttagcgcaagcaacacataaactggcctattccattgctgaaaaactgcgtaatcaaaaaagtgcccatggccgcgcgggcatggtacagggattgctgcaagagttctcactctcttcacaggaaggcgtggcattgatgtgtctggctgaagccctactacgtattcctgacaagccaacccgcgatgcactgatccgcgataaaattagcaacggcaactggcattcgcatctgggacgtagcccgtcaatgtttgtcaatgcagccacttggggcctgctatttactggccgcctagtctctacccataacgaagccaaactctccggctcactgaaccgaattatcggtaaagggggtgagccgttgattcgtaaaggcgtcgatatggcgatgcgcttgatgggcgagcaattcgtcaccggtgaaaccatttcggaagcattggcaaatgcccgtaaattagaagataaagggttccgctactcttacgatatgctgggcgaagcggcattaactgaagcagatgcacaggcttacctactctcttaccaacaggcaattcatgccattggtaaagcctcaaatggccgtggtatttacgaaggcccggggatttcaatcaaactttccgccctacacccccgttatagccgtgcgcaatatgagcgagtgatggacgagttatacccgcgtctgttatcgctaacattacaggcccgtcagtatgatatcggtatcaatattgatgccgaggaggctgatcgtctggaaatctctctcgacctgttggagaggctgtgcttcgaaccccaattggcaggttggaatggcattggttttgttattcaggcataccaaaagcgttgtccgtccactattgatgccgtgattgatatggcacaacgtagccgccgccgtctgatgattcgcctcgtcaaaggggcgtattgggacagcgaaattaaacgtgctcaaattgacgggttggaaggatacccggtttatactcgtaaggtttataccgatgtgtcctatctggcctgcgcccgcaaattattggctgttccaaacctgatctatccgcaatttgcgacgcataatgcgcatactctgtcagcgatttaccaccttgccgggcaaaattactaccccggccagtatgagttccaatgcctacacggcatgggggagccactgtatgagcaagtggtcgggaaagttgccgagggtaagctcaaccgcccatgccgtatttatgctccggtcggtacccatgaaacattgctggcttaccttgtgcgccgtctgttggaaaacggtgccaacacctcgtttgtcaatcgtatcgctgatgccacattaccccttgatgaactggttgcggacccggtcagtgcggtagaagccatggcggcggctgaaggtcaacttggtttacctcatccgcgtatccccttaccacgtgagctgtttggtaaagatcgcgccaactccagcggggtggatcttgccaacgaacaccgccttgcgtcgctctccagcgcgttgctggccagtgccagccaggtatggcgtgcggagcccgtcattgatgcagagcaggacaacggtgacgcgctaccggttatcaacccggcagaacctgccgatgtggttggctatgtccgcgaggcaaccgaaggtgaagttagccgtgcattggatgctgccgcccgtgctggcgctatctggtttgccacccccccggctgaacgggctgctatcttaatccgcgccgctgagttgatggaaaatcagatgcaaacgctgatgggaatattggtgcgtgaggcgggtaaaaccttcagtaatgccatcgccgaagtccgtgaagccgtggacttcttgcattattacgccggtatagtcagggataacttcgccaatgatagccatcgcccgctcggcccggttgtttgtatcagtccgtggaacttcccactggctatctttaccggtcaggttgccgccgcgttagcagcaggcaacagtgttttggcaaaaccagcggaacaaacaccactcattgccgcacaggccgtgcgtattctgctggacgcaggcatcccacagggtgttctgcaattgctacctggccgcggtgacagtgttggcgcgctactggttaatgatgcccgtgtgcgtgcagtgatgtttaccggttctaccgaagtagccactattttacaacgtagtatcgcaggccgtcttgatccacaggggcgtccaacaccgctgatcgcggaaaccggtggcctgaatgcgatgattgttgactcttcggcactgactgaacaagttgtgaccgatgttgtcgcctctgcctttgacagtgcaggccagcgttgttctgccctgcgtattctctgcattcaggatgatgtcgctgaacatacgctgcaaatgttgcgtggtgccatggcggaatgccggatgggcaatccagaacgcctgtctacggatattggtcccgttatcgacgccgaagcgaaaactggcattgagcgccatatccaagcgatgcgagccaaagggcgtaaagtttatcaggcagcccgtaccaacagcttggatgagaaagagtggcaacgtggaacatttatcaaaccgaccttgattgaattggacagttttgatgagctgcaaaaagaagtttttggcccagtgctacatgttgtacgcttccagcgtcagcatcttaatgagttagtcgatcaaattaatgcatctggctatggcttaaccttgggcatccacacccgtattgatgaaaccatcgcccgtgtcactgaaaaagcaaaagtaggcaacctctacgttaaccgtaatatggtcggtgccgttgtcggtgtacaaccttttggtggcgaggggttatcaggtaccggtcccaaagctggcggcccattgtatttgtatcgcctgctgagtagccgcccagacgacgcactggccaataccctggcgcatcaggatggcgaacagcaacaaaatgttgcaggccgtgaagcgctgctgaccgctcaccgcgcgttcactcaatgggccacggaacaacaacatgattcgctggccactctctgccaacgctatgcctctctggcacaaggtggaaccgtgcggttattgccaggcccgaccggtgagcgcaatacctatgccctgctgcctcgtgagcgagtcctttgtcttgccgataccgaaagcgatactcttacgcagttggctgcggtgttggcgaccgggagccaggttctatggccggagaatgacgtacagaaagcactgttgcctcaattgcctactgaagtgcaatcgcggatcacccttacccacgattggcaaaccgctaacatcaccttcgatgccgttatctatcacggcgatgcggatcaactacgcacgctatgtgagcaggttgcgcaaattgatggccccattgtctctgtacaaggcttcgctcgtggtgaaaccaatatcctgctggaacgcttattaattgagcattcattgagtgtcaatacagctgccgctggtggcaacgccagtctgatgactatcggctag

SEQ ID NO: 12469 - protein, 1323 aa, Yersinia pestis
MANTTMGVKLDEATRDRIKSAAQRIDRTPHWLIKQAIFNYLEKLESNSELPELATTSSLSLQDTEDAIPQLTENTHQPFLDFAEHVLPQSVTRAAITAAYRRPETEAIPMLLEQARLPADLAQATHKLAYSIAEKLRNQKSAHGRAGMVQGLLQEFSLSSQEGVALMCLAEALLRIPDKPTRDALIRDKISNGNWHSHLGRSPSMFVNAATWGLLFTGRLVSTHNEAKLSGSLNRIIGKGGEPLIRKGVDMAMRLMGEQFVTGETISEALANARKLEDKGFRYSYDMLGEAALTEADAQAYLLSYQQAIHAIGKASNGRGIYEGPGISIKLSALHPRYSRAQYERVMDELYPRLLSLTLQARQYDIGINIDAEEADRLEISLDLLERLCFEPQLAGWNGIGFVIQAYQKRCPSTIDAVIDMAQRSRRRLMIRLVKGAYWDSEIKRAQIDGLEGYPVYTRKVYTDVSYLACARKLLAVPNLIYPQFATHNAHTLSAIYHLAGQNYYPGQYEFQCLHGMGEPLYEQVVGKVAEGKLNRPCRIYAPVGTHETLLAYLVRRLLENGANTSFVNRIADATLPLDELVADPVSAVEAMAAAEGQLGLPHPRIPLPRELFGKDRANSSGVDLANEHRLASLSSALLASASQVWRAEPVIDAEQDNGDALPVINPAEPADVVGYVREATEGEVSRALDAAARAGAIWFATPPAERAAILIRAAELMENQMQTLMGILVREAGKTFSNAIAEVREAVDFLHYYAGIVRDNFANDSHRPLGPVVCISPWNFPLAIFTGQVAAALAAGNSVLAKPAEQTPLIAAQAVRILLDAGIPQGVLQLLPGRGDSVGALLVNDARVRAVMFTGSTEVATILQRSIAGRLDPQGRPTPLIAETGGLNAMIVDSSALTEQVVTDVVASAFDSAGQRCSALRILCIQDDVAEHTLQMLRGAMAECRMGNPERLSTDIGPVIDAEAKTGIERHIQAMRAKGRKVYQAARTNSLDEKEWQRGTFIKPTLIELDSFDELQKEVFGPVLHVVRFQRQHLNELVDQINASGYGLTLGIHTRIDETIARVTEKAKVGNLYVNRNMVGAVVGVQPFGGEGLSGTGPKAGGPLYLYRLLSSRPDDALANTLAHQDGEQQQNVAGREALLTAHRAFTQWATEQQHDSLATLCQRYASLAQGGTVRLLPGPTGERNTYALLPRERVLCLADTESDTLTQLAAVLATGSQVLWPENDVQKALLPQLPTEVQSRITLTHDWQTANITFDAVIYHGDADQLRTLCEQVAQIDGPIVSVQGFARGETNILLERLLIEHSLSVNTAAAGGNASLMTIG

SEQ ID NO: 12470 - DNA, 1467 bp, Listeria innocua
  CDS (1)..(1467)
atgagtattaaagaaacaagcttaccaaaagttcaaaccaaattatttattaatggaaaatggatagatggcgataataaagaaacaaaagatattgtaaatccagcaaacggcgaagtcatcgcgaaaattgctcaagcaggacctaaagaaacaaaacaagcgattaaagctgcaaaagatgcttttcctgattgggcgaaaatggaactagctgaccgcgttaaactcttgcataatattgctgatttaatggaagaacgagcagatactttagcaaaaattatgaccttagaacaaggtaaaccattaaaagaatcaaaaggagaagttttaaccggcgcggaaaacttccgattcgcagctgaagaagcaagaagactatacggtgaaacaatcccagctccaaacaaccacgcgtttattgttaaaaaacaaccaattggcgtagtagcagcaattactccgtggaatttcccgggtggaatggtgacacgaaaactcgcaccagcgctagctacaggtaataccatcgtgttaaaaccatctggagataccccgctttcggctttagctatctttgaaatttttgaagaagctggcttaccaaaaggtgttgctaatattgtcatgggaagctcgaaagaaatcggtgaaactttaacagatagtgatgatgtccgcaaattaacgtttacaggttcgacaaaagtcggtcaaacactatttaaacaatctgctgacaccttgaagaaaatctcgcttgagcttggggggcacgcaccatttatcgtgtttgcggatgctaaccttgaagctgcagtagatgatttaatcacagcaaaattccgtaacaatggtcaagtatgtgtatcaccaaaccgcatctttgtagcaaaagaaatcaaagaaaaattcactaaaacattagtcgctaaagtagaaaaactaaaagtcggtaacggtttagacgacgtaaatgttggtccgcttattcgcgaagatgccatcgacaaaatcgacaaacaacttaaaaacgcgacagataaaggcgccaaagtcctaactggtggcgaacgtttaactggctctgactacgacaaaggtaatttctataaaccaactgttttagataacgtcactcgtgaaatggacatcttttatgaagaaacattcggccccgtaattccgcttatcgtttttgaaaatgaagatgaagcaattgaaatggcgaatgatagcgaattcggtctagcatcttatttctatacaaaagatttagcacgcgttgaaaaagtcggtgcagctctagaatatggtatggttggtgcaaacgaaatcgctatatccaatccagaaactccatttggtggtgtaaaacattcaggatttggccgcgaaaatggtcattacggaatggaagaatacatccaagtgaaattcattaacttaaaatatcgtgattaa

SEQ ID NO: 12471 - protein, 488 aa, Listeria innocua
MSIKETSLPKVQTKLFINGKWIDGDNKETKDIVNPANGEVIAKIAQAGPKETKQAIKAAKDAFPDWAKMELADRVKLLHNIADLMEERADTLAKIMTLEQGKPLKESKGEVLTGAENFRFAAEEARRLYGETIPAPNNHAFIVKKQPIGVVAAITPWNFPGGMVTRKLAPALATGNTIVLKPSGDTPLSALAIFEIFEEAGLPKGVANIVMGSSKEIGETLTDSDDVRKLTFTGSTKVGQTLFKQSADTLKKISLELGGHAPFIVFADANLEAAVDDLITAKFRNNGQVCVSPNRIFVAKEIKEKFTKTLVAKVEKLKVGNGLDDVNVGPLIREDAIDKIDKQLKNATDKGAKVLTGGERLTGSDYDKGNFYKPTVLDNVTREMDIFYEETFGPVIPLIVFENEDEAIEMANDSEFGLASYFYTKDLARVEKVGAALEYGMVGANEIAISNPETPFGGVKHSGFGRENGHYGMEEYIQVKFINLKYRD

SEQ ID NO: 12472 - DNA, 3558 bp, Helicobacter pylori
  CDS (1)..(3558)
atgcaaaaaatcattgaggattcattagaattagctaaaaaactgcaagatagtatcagtaaccatttgagcgagcaagaaaaagcgttccattttaaaatgcaaaagcttttaaacaaccccgaaaacaaagtcatgcttatagagcttatggatcggagttttaggtgtttggacaataaagcccgctttgaaatgattgagcatgttttagacaaatacaaaagccgtgagattttttcttcgtttgaaaaatggcttttaatggggtttttaagctttgggaaaatgctgcctgatatgagcgtgcctttctttgtcaataaaatcagaagcgacacgaaagcaatggtcttggatcaagaagagagccaattaagagagcggattttaaaaagaaaaaatgagaaaatcattttgaacgtgaattttattggcgaggaagttttaggcgaagaagaagcgtctgcgcgttttgaaaaatactctcaagccctaaaatccaactacatccaatacatttccattaaaatcacaacgattttttctcaaatcaatatccttgattttgaatactctaaaaaagagattgtcaaacgcttagacgctctttatgctttagctttagaagaagaaaaaaagcaaggcatgcctaaattcatcaacttggatatggaggaatttagggatttagagcttacggtggaatcgtttatggagtctatcgccaaatttgatttgaacgccggtattgtgttgcaagcttatatccctgattcttatgaatatttgaaaaaactgcacgctttttctaaagaaagggttttaaaagggttaaagcctattaaaatccgctttgttaagggagcgaacatggagagcgaagagacgatcgcttctatgaaagactgggcgttacccacattttctagtaagcaagacaccgattctaattacaacaaaatgctggattttgttttagagggcgacaattataaatacattcatattggtgcagcgagccataatatttttgaaatcgcctatgtctatacgcgcatccatgcccttaatgaccctgttgtgttagagcattttagctttgaaatgctagagggcatgagcttgcaagcgagccaggaattaaaagagatgcacaaactcattctttatgcgccggtgtgcgatgaagcgcatttcaacaatgcaatcgcttacttggtgaggaggctagatgaaaacacttcaagcgataatttcatgaaagctttctttaacctcaaagtaggcacgagcgaatggaaagaccaagagcaacgctttttaaacagccttaaagggatcgccactttagacaataccacccacaggacccaagacagaaacgccaaacaaaccgggcataccacctacccaaaccactcctttaaaaacgaaagcgataccgattttattttaaaagccaaccgagaatgggctaaaaaagtgcgcgataaaatgcataacgcccctattttagagctttacccagaaatagatgggaggtttgaagatcctaatttaacccctttagaagtctttgatagaatccatcataaaaaaatcgccagcgtgcatttagcggataaagaagcgattttaaaagccctagaagtggctaaaagcgataagagccgtttcagtcaaaaaagcttcacagaaatccatgctttattgagtcaaaccgctcagctttttagagaaagaagaggcgatttaatagggatttccgctttagaagtgggtaagactttcgctgaaacggacgctgaagtgagcgaagccattgactttttagagttttacccttacagcttaagggtgttacaagagcaaaataaaaaaacgaaattcacccccaaaggcgtgggtgtggtcatcgctccatggaatttccctgtgggcatttctgtaggcactatcgctgcccccctagccgctggcaatcgggtgatttacaagccctcaagtttgtctagcgtaacgggttataagctttgcgagtgcttttgggatgcgggcgtgcctagagatgcgctcatttacttgccctctaaagggagcgatattagcgagcatcttttaaaagatgaaagcatcaagtttgccattttaacagggggtgaagacaccgcttataaaatgctcaaggctaaccccactttagccttaagcgctgaaacaggcggtaaaaacgccactattgtgagcaaaatggcagacagagaccaggcgattaagaatgttatccattcagcttttagcaattcggggcaaaaatgctccgccacttcgcttttagtgttagaaaaagaagtctatgaagatgagaatttcaaaaagactctaatagatgcgactctaagccttagcgtgggcgatccttttgatttcaaaaacaaaatcggtgctctagcggacaagcctaatgaaaaggtcatcaaagccatagatgaattgaaaagctatgaaaattacgaaatcccagcaagctttgttgatgataacccctatttgatgaagccaagcatcaaatacggcactaaaaaaggcgatttcacgcaccaaactgagctttttacgcccattttatccgtgatgaaagcaaaagatttagacgaggcgatagaaatagtcaattctaccggttacgggctgactagcgcgttagagtctttggacgaaagggagtgggaatattatttagaacgcattgaagccggtaatatctatatcaacaaacccaccacaggagcgattgtcttgcgccagccttttgggggggttaaaaaatccgctgtggggtttgggaggaaagtaggcattttcaactatatcacgcaatttgtgaatatccatcaagaagaagaagatgaaaacgccttaaaaaaccccttaagcgaagctttagagggcttgactcaaaaaggctatgatgaacacacgcatgagttgaaacgcgcgatttttatggcaaaaagctacgcttatcattataagcatgaattcagccaagctaaagactatgtcaaaatcagaggcgaagacaaccttttttcctacactaaagttacaagcgtgggctatcgcatcaccgaaaaggacactttaagcgacatgttaggcgttgctttagcatgcttaatttctcaaatccctttaacgatcagcatagaaaacgaacgagcgaacaaagatttaaccttttttttagaatgcttaaaagcactccaagcaaacgcccctatcgtttatgaaagcttgcaaaaatttagcgagaagttgaacgctttcaatcgtgtccgttatctcaaaagcgatttggatttattgcacgaacaagcaagcagattagggatggttttagccacggctaaaccctgcttgaatgggcgttttgaattgctgtattaccacttagagcgatcggttagcatttcgtatcatcgttatgggaatttaggctcaagggttttaaggcaacccacttgccacaaatcatgctgtgctgaaaaataa

SEQ ID NO: 12473 - protein, 1185 aa, Helicobacter pylori
MQKIIEDSLELAKKLQDSISNHLSEQEKAFHFKMQKLLNNPENKVMLIELMDRSFRCLDNKARFEMIEHVLDKYKSREIFSSFEKWLLMGFLSFGKMLPDMSVPFFVNKIRSDTKAMVLDQEESQLRERILKRKNEKIILNVNFIGEEVLGEEEASARFEKYSQALKSNYIQYISIKITTIFSQINILDFEYSKKEIVKRLDALYALALEEEKKQGMPKFINLDMEEFRDLELTVESFMESIAKFDLNAGIVLQAYIPDSYEYLKKLHAFSKERVLKGLKPIKIRFVKGANMESEETIASMKDWALPTFSSKQDTDSNYNKMLDFVLEGDNYKYIHIGAASHNIFEIAYVYTRIHALNDPVVLEHFSFEMLEGMSLQASQELKEMHKLILYAPVCDEAHFNNAIAYLVRRLDENTSSDNFMKAFFNLKVGTSEWKDQEQRFLNSLKGIATLDNTTHRTQDRNAKQTGHTTYPNHSFKNESDTDFILKANREWAKKVRDKMHNAPILELYPEIDGRFEDPNLTPLEVFDRIHHKKIASVHLADKEAILKALEVAKSDKSRFSQKSFTEIHALLSQTAQLFRERRGDLIGISALEVGKTFAETDAEVSEAIDFLEFYPYSLRVLQEQNKKTKFTPKGVGVVIAPWNFPVGISVGTIAAPLAAGNRVIYKPSSLSSVTGYKLCECFWDAGVPRDALIYLPSKGSDISEHLLKDESIKFAILTGGEDTAYKMLKANPTLALSAETGGKNATIVSKMADRDQAIKNVIHSAFSNSGQKCSATSLLVLEKEVYEDENFKKTLIDATLSLSVGDPFDFKNKIGALADKPNEKVIKAIDELKSYENYEIPASFVDDNPYLMKPSIKYGTKKGDFTHQTELFTPILSVMKAKDLDEAIEIVNSTGYGLTSALESLDEREWEYYLERIEAGNIYINKPTTGAIVLRQPFGGVKKSAVGFGRKVGIFNYITQFVNIHQEEEDENALKNPLSEALEGLTQKGYDEHTHELKRAIFMAKSYAYHYKHEFSQAKDYVKIRGEDNLFSYTKVTSVGYRITEKDTLSDMLGVALACLISQIPLTISIENERANKDLTFFLECLKALQANAPIVYESLQKFSEKLNAFNRVRYLKSDLDLLHEQASRLGMVLATAKPCLNGRFELLYYHLERSVSISYHRYGNLGSRVLRQPTCHKSCCAEK

SEQ ID NO: 12474 - DNA, 1632 bp, Mycobacterium tuberculosis
  CDS (1)..(1632)
atggacgcgatcacccaggtgccggttccggccaacgagccggtgcacgactatgcgccgaaatccccggaacggacccggctgcgcaccgaactggcctccctggccgatcaccccatcgacctgccgcacgtcatcggcggccgacaccggatgggcgacggcgagcgaatcgacgtcgtgcagccgcaccggcacgccgccaggctgggcaccctgaccaacgccacccacgccgacgccgcggccgccgtcgaagccgccatgtctgccaaaagtgactgggcggcactgccgttcgatgaacgtgccgcggtgttcctgcgcgccgccgatctgttggccgggccgtggcgggaaaagatcgccgccgcaaccatgctcggccaatccaagtcggtgtaccaggccgagatcgacgcggtctgcgagctgatcgacttctggcggttcaacgtcgctttcgcccgacagattttggagcagcagccgatcagtggcccgggggaatggaaccggatcgactaccgcccgctggacggtttcgtctacgcgatcacgccgttcaacttcacctcgatcgccggcaatctgccgaccgccccggctctgatgggcaacaccgtgatctggaagccgtcgatcacccagacgctggcggcctatctgaccatgcaactgctcgaggccgccgggttgccgcccggggtgatcaacctggtcactggcgacggattcgcggtttccgatgtggcactggccgatccacggctggccggcatccacttcaccgggtcgacggctaccttcggccacctatggcagtgggtgggtaccaatatcggccgctaccatagctatccgcgactggtcggcgagaccgggggcaaggacttcgtggtggcgcacgcctcggcccgcccggatgtgctgcgcacggccctgattcgcggagcattcgattaccagggccagaagtgctcggcggtgtcgcgagcgtttatcgcgcattcggtgtggcagcggatgggcgatgagttgctggccaaagccgccgagctgcgctacggtgacatcaccgacctgtccaactacggtggtgcgctgatcgaccagcgcgccttcgtcaagaacgtcgacgccatcgaacgggccaaaggcgcggccgcggtcaccgtcgccgtcggcggcgaatacgacgacagcgaaggctatttcgtgcgccccacggtgttgctctccgacgacccgaccgacgagtcgtttgtcatcgagtacttcggtccgctgctgtcggtgcatgtctaccccgacgagcgctacgagcagatcctcgacgtcatcgacaccggatcccgctacgcgctgaccggcgcggtcatcgccgacgaccggcaggccgtgctgaccgcgctggatcggctgcggttcgcggcggggaacttctatgtcaacgacaagccgacgggggcggtggtggggcgtcagccgttcggcggtgcacgcggatcgggcaccaacgacaaggccggttcgccgttgaacctgctgcggtggacgtcggcgcgcagcatcaaggagacgttcgtcgcggccaccgaccacatctacccgcacatggcggtcgactga

SEQ ID NO: 12475 - protein, 543 aa, Mycobacterium tuberculosis
MDAITQVPVPANEPVHDYAPKSPERTRLRTELASLADHPIDLPHVIGGRHRMGDGERIDVVQPHRHAARLGTLTNATHADAAAAVEAAMSAKSDWAALPFDERAAVFLRAADLLAGPWREKIAAATMLGQSKSVYQAEIDAVCELIDFWRFNVAFARQILEQQPISGPGEWNRIDYRPLDGFVYAITPFNFTSIAGNLPTAPALMGNTVIWKPSITQTLAAYLTMQLLEAAGLPPGVINLVTGDGFAVSDVALADPRLAGIHFTGSTATFGHLWQWVGTNIGRYHSYPRLVGETGGKDFVVAHASARPDVLRTALIRGAFDYQGQKCSAVSRAFIAHSVWQRMGDELLAKAAELRYGDITDLSNYGGALIDQRAFVKNVDAIERAKGAAAVTVAVGGEYDDSEGYFVRPTVLLSDDPTDESFVIEYFGPLLSVHVYPDERYEQILDVIDTGSRYALTGAVIADDRQAVLTALDRLRFAAGNFYVNDKPTGAVVGRQPFGGARGSGTNDKAGSPLNLLRWTSARSIKETFVAATDHIYPHMAVD

SEQ ID NO: 12476 - DNA, 1572 bp, Deinococcus radiodurans
  CDS (1)..(1572)
atgattaaagttcaggactaccgcccccagcctttcaccgacttcaccaaagaagaaaacgtccaggcgtaccaggccgccctcgccaaagttcggaaagaactccttggcaagcactacccgctgattatcgacgggcaggaagtggacaccgaagggaaaattcagagcatcaacccctgcgacacctccgaagtggtgggcaccaccgccaaagcgaccataggtgacgccgaaaacgctctacaaggcgcctggaaagctttcgagagctggaagaagtgggacatggacgcccgcgcccgcattctgctgaaggccgccgccatcctcaagcgccgccgcctggaagcctgcgccctgatgagcatcgaagtgggcaagaactacgctgaggccgacgtggaagtggccgaagcgattgactttctggagtactacgcccgcagcgccatgaagtacgcgggctttggcagcagcgaaacgacgtggtttgaaggcgaggaaaacggcctgatgagcattccgctgggcgtgggcgtcagcatcagcccctggaacttcccctgcgccattttcgtgggcatggcggcggcgcccatcgtggcgggcaactgcgtcgtggtgaaacccgccgaggatgcgggcctgatcgccgggttcatggtggacatcctgcgcgaggccgggctgccggccggcgtgctgcaattcctgcccggcgtgggcaaggaagtgggcgaatacctgaccacgcacgccaaaacccgcttcatcaccttcaccggcagccgtgcggtgggcctgcacatcaacgaggtggcggccaaagtgcagccgggccagaagtggatcaagcgcgtgatcatggaactcggcggcaaagacggcctgatcgtggacgaaaccgccgacatcgaaaacgccattaccgccgccacgcagggcgcgttcggcttcaacggccagaagtgcagcgccatgagccgcctgatcgtggtggacagcgtgtacgacgaagtggtcaacggcttcgtggaacgggctaaagccctcaagatggggacgggcgaggaaaacgccaacgtgaccgccgtcgtgaaccagatgagcttcaacaagatcaagggctatctggaactggcccccagcgaaggcaaagtgctgctgggcggcgaggccacgggcgaagcgaacggcaagcagggctactacattcagccgaccatcgtgggcgacgtagaccggaactcccgtctggcgcaggaagaaatcttcgggccagtggtcgccgtgctgcgggccaaagactggcaagacgcgctcgacatcgccaactccaccgagtacgggctgacggggggcgtgtgcagcaactcccgcgagcggctggagcaggcccgcgccgagtttgaagtgggcaacctgtacttcaaccgcaagatcaccggcgccatcgtgggcgtgcagcccttcggcggctacaacatgagcggcacggacagtaaggcgggcggcccggattacctgagcaacttcatgcagctcaagacggtgacggaacgctggtga

SEQ ID NO: 12477 - protein, 523 aa, Deinococcus radiodurans
MIKVQDYRPQPFTDFTKEENVQAYQAALAKVRKELLGKHYPLIIDGQEVDTEGKIQSINPCDTSEVVGTTAKATIGDAENALQGAWKAFESWKKWDMDARARILLKAAAILKRRRLEACALMSIEVGKNYAEADVEVAEAIDFLEYYARSAMKYAGFGSSETTWFEGEENGLMSIPLGVGVSISPWNFPCAIFVGMAAAPIVAGNCVVVKPAEDAGLIAGFMVDILREAGLPAGVLQFLPGVGKEVGEYLTTHAKTRFITFTGSRAVGLHINEVAAKVQPGQKWIKRVIMELGGKDGLIVDETADIENAITAATQGAFGFNGQKCSAMSRLIVVDSVYDEVVNGFVERAKALKMGTGEENANVTAVVNQMSFNKIKGYLELAPSEGKVLLGGEATGEANGKQGYYIQPTIVGDVDRNSRLAQEEIFGPVVAVLRAKDWQDALDIANSTEYGLTGGVCSNSRERLEQARAEFEVGNLYFNRKITGAIVGVQPFGGYNMSGTDSKAGGPDYLSNFMQLKTVTERW

SEQ ID NO: 12478 - DNA, 3489 bp, Campylobacter jejuni
  CDS (1)..(3489)
atgatacaaaaagctttagccttagctgaagaattacaaggacaaatagaagccaatatttcaaattctgaaaaagaatttcatgctaaaatgcaaaaacttcttaataatcccaaaaataaagttatgcttatagagcttttagatcgttcttttagatgtaaagataaaaatgcaagttttgagcttatagaatatactttgagtaaatatggcatagcggatttttttagcacttttgaaaaattcctactttttagctttttaaattttggcaaatttgctcctaatttaagtgtacctttttttgtcaaacatttaagagaagatactaaagctatggttctagatgcaaatcctagtgttttagaaccacatattaagaaaagaaaagagcaagataaaattaccttaaatgtgaatttaatcggcgaagaggttttaggtgaagctgagagtaaatatcgtatgcaaaaatacgaagaagccttaaaatcaagctatatcacttatatttccataaaaattactactattttttcacaaattaatattatagattttaattattctaaagaagaggtcgtaaaaagactagattatctttatgctttagccttagaagaagagaaaaaacaaggtgtatctaaatttatcaatcttgatatggaagaatttagggatttagagctcaccgttgcagcttttatggaaagtgtggctaaatttgatattaaagcagggattgttttgcaagcttatattcctgattcttataagtatcttaaaaaactttttgctttttcaaaagagagggttttaaaaggtatgaagtctattaagatccgttttgttaagggtgctaatatggaaagtgaagaaaccattgcgtctcaaaggggttgggagcttcctactttttacaaaaaaatagatactgatagtaattataataaaatgcttgattttattcttgaaggagataattataaatacatcaacataggaattgcaagtcataatatctttgagattgcttatgcttatacacgcataagtgaagtgggtgctttggattcttttacttttgaaatgcttgaaggtatgagtttgcaatgttcttatgaattatctaaaatgcatgatctaatcctttataccccagtttgcgatgaagcacattttaacaatgccattgcttatcttgtaagacgccttgatgaaaatacaagtgaagataattttatgcgttattttttcaatcttaaagtaggagataagaactggaatatccaaaaagaactttttttaaaatctttagaaggcataaaaactcttgataatactacacatcgtaagcaagatagaaataaagaatcaaatatcataagttcttatgaaggtaaaaaatttagcaatgaaagcgatacggattttattttagcacaaaatagagtgtgggctaaagaaattaaaactaaatatgaaaatttaaaagattatgatgtttatcctgttataggcgaacttgattttaaagcagaaaatttaaatgttttagaagttaaagataagatcgaagatagagttataggaaaggcttatttagcaggagaaaaagaaatcaaacaagctttagaagtagctaaaaattccaaatttacacaaaaaagtcatgatgaaatttatcaaattttagccaaaagtgcaaaactgatgagagaaagaagaggggatttgataggtttggcagctttagaagtgggcaaaacctttttagagatcgatcctgaagtaagcgaggctattgattttatagagttttatccgcactctttagaagagcttaaaaaacaaaatccaaaagttacattcacacctaaaggtataggggttaccatagctccttggaattttcctataggaatttcagtaggtactatagctgcaccactagccgcaggtaatgtggtgatttacaaaccttcttcactttcaactctaacaggttatatgctttgtaagtgtttttgggattcgggtattccaaaagatgctttgattttcttaccttcaaaaggaagtgatatttctaaatatttacttattgatgaagcgattaaattttcaattcttacaggaggagaggatactgcttatgccatgttaaaagctaatccaaccttgcttttaagtgctgaaactggcggaaagaatgcgactatagtttctaaatttgctgatcgtgatagtgcgattaaaaatatcattcattctgcttttagcaatagcggtcaaaaatgttcagctacttctttgctagtcttagaagaagaggtttatcatgatgaagaatttaaaaagactttagtggatgctgcgagttctatggcagtgggcaatccttttgaatttaaaaataaattaggtactttagctgataagccaagttctaaagttcaaaaggccttagatgaattacaaccttatgaagaatgggcattaaaacctaagtttttagaggataatccttatttgatgactccaggcataaaatatggcactaaaaagggtgattttactcatatgaatgaactttttgtaccgattttaagtgtgatgaaggctaaagacttaaaagaagctattgatatagtaaattccacaggttatggtttaactgcaggttttgaaagcttagatgaaagagaatgggagtattttcacactcacatagaagcaggaaatatttatatcaataaaccaaccacaggggctatagtgctgcgtcaaccttttggtgggattaaaaaatcagctataggtttgggtagaaaagtgggaatttataattatatcactcaatttttagagattaagcaagaagattttgatgatcatttaattgaagataaattttcaaaaaaattagcacaaatagatttaaaagaagcacaagattttataaacaatttaattaaaatgtctcaatcttatgcttatcattataaaaacgagtttagtgtttcaaaagattatgtcaatattcgtggagaagataatcttttttcttatactaaaataaagaatatggttttaagactttgtggaaatgaaagcttaaaagatgttttaggtgtggttttaggtgcaaatattgcaaatattgatctaagtatcagttatgatgaacaagatgttagtatgatagaacgaattgttcaaagcataggagcaaaagtattgtttttaaaagaaaataaagaaaattttatcaagagtattaaagaatatgaaagagtgcgttatttagcaaagccagatgtaaatgatgagatttataaagaggctgcaaagcttgctaaaatcattataagagaaaagccattattaaatggtcgttttgaacttttaaattattttaatgaaaaagctttaagtatatcttttcatcgttatggaaatttaggcattagagcaatatcttaa

SEQ ID NO: 12479 - protein, 1162 aa, Campylobacter jejuni
MIQKALALAEELQGQIEANISNSEKEFHAKMQKLLNNPKNKVMLIELLDRSFRCKDKNASFELIEYTLSKYGIADFFSTFEKFLLFSFLNFGKFAPNLSVPFFVKHLREDTKAMVLDANPSVLEPHIKKRKEQDKITLNVNLIGEEVLGEAESKYRMQKYEEALKSSYITYISIKITTIFSQINIIDFNYSKEEVVKRLDYLYALALEEEKKQGVSKFINLDMEEFRDLELTVAAFMESVAKFDIKAGIVLQAYIPDSYKYLKKLFAFSKERVLKGMKSIKIRFVKGANMESEETIASQRGWELPTFYKKIDTDSNYNKMLDFILEGDNYKYINIGIASHNIFEIAYAYTRISEVGALDSFTFEMLEGMSLQCSYELSKMHDLILYTPVCDEAHFNNAIAYLVRRLDENTSEDNFMRYFFNLKVGDKNWNIQKELFLKSLEGIKTLDNTTHRKQDRNKESNIISSYEGKKFSNESDTDFILAQNRVWAKEIKTKYENLKDYDVYPVIGELDFKAENLNVLEVKDKIEDRVIGKAYLAGEKEIKQALEVAKNSKFTQKSHDEIYQILAKSAKLMRERRGDLIGLAALEVGKTFLEIDPEVSEAIDFIEFYPHSLEELKKQNPKVTFTPKGIGVTIAPWNFPIGISVGTIAAPLAAGNVVIYKPSSLSTLTGYMLCKCFWDSGIPKDALIFLPSKGSDISKYLLIDEAIKFSILTGGEDTAYAMLKANPTLLLSAETGGKNATIVSKFADRDSAIKNIIHSAFSNSGQKCSATSLLVLEEEVYHDEEFKKTLVDAASSMAVGNPFEFKNKLGTLADKPSSKVQKALDELQPYEEWALKPKFLEDNPYLMTPGIKYGTKKGDFTHMNELFVPILSVMKAKDLKEAIDIVNSTGYGLTAGFESLDEREWEYFHTHIEAGNIYINKPTTGAIVLRQPFGGIKKSAIGLGRKVGIYNYITQFLEIKQEDFDDHLIEDKFSKKLAQIDLKEAQDFINNLIKMSQSYAYHYKNEFSVSKDYVNIRGEDNLFSYTKIKNMVLRLCGNESLKDVLGVVLGANIANIDLSISYDEQDVSMIERIVQSIGAKVLFLKENKENFIKSIKEYERVRYLAKPDVNDEIYKEAAKLAKIIIREKPLLNGRFELLNYFNEKALSISFHRYGNLGIRAIS

SEQ ID NO: 12480 - DNA, 1497 bp, Bacillus halodurans
  CDS (1)..(1497)
atgcaaaaaatctcaacaaacgatagcaaattaaatccaaggttagtggcgtttttaaacggtggaccaaagaagctatttattaatggggaatgggttgattcattctctggacaatcttttgaaacgatgaatccagcaaccggagaaacattagctctcgtagcagaagctgggtcagaggacatcgattttgcagtgaaagcggcaaggaaagcgttcgatgaagggccttggtctaaaatgagcgcagcggaaagaagtcgactcatatacaagctggctgatttgattgaggatcataaagaagcgttagctcagcttgagacgttagataatggtaagccaattcgtgagacggccaatgctgatattccattagtaattgaacactttcgttactttgcagggtgggcgacaaaaattgtgggccaaaccatccctgtacaaggccattattttaactacacgcgccatgaagccattggcgttgtgggccaaatcattccttggaatttcccgttattgatggctgcttggaaacttggtgccgctctagctacaggttgtacggttgtgttaaaaccggcagagcagactccactttccgccttatatttaggagaattgatcaatgaagcaggttttccaaaaggggttgtgaacattgtccctggatttgggcattcggctggaactccccttgtgaatcacccagctgtagataaagtggcttttacagggtcgactgatgtcggaaagttaattatgaaacaagcgagtgaatcattaaaaagagtaacgcttgaacttgggggcaagtcaccaaatatcattttacctgatgctgatttgtcaaaggccgttcctggctcacttatgggcattatgttcaatcaaggccaagtgtgttgcgcaggaagtcgtttatatgtacaaaagaaacagtatgatcatgtcgttgctgacctggtgtcgttaacgaacgagattcagcaaggggatggattattagaacaaacgaccatgggacctctgatttcaaatcaacaacaaagtcgagtgaaaaattacatcgatcgtggggttgaggaaggggcagaactactaacaggtgggaacattccgtatgatcaagggtattttgtcgccccaaccatttttgctgacgtggatcattccatgacgatcgccaaggaggaaatttttggtccagttgtagccgcaatgccgtttgatagcatagacgacctaattgataaagccaacgattctgattatggactagctgccggtgtttggacacaggatattaaaaaagcacactacattgcccaccgaatcaaggcagggaccatttgggtgaattgctacaatgtattcgatgccgcgagcccgtttggtggttacaaacaatcggggattggccgggaaatggggagctatgcattagaaaattatactgaagtgaaaagtgtttgggtgaatatggattaa

SEQ ID NO: 12481 - protein, 498 aa, Bacillus halodurans
MQKISTNDSKLNPRLVAFLNGGPKKLFINGEWVDSFSGQSFETMNPATGETLALVAEAGSEDIDFAVKAARKAFDEGPWSKMSAAERSRLIYKLADLIEDHKEALAQLETLDNGKPIRETANADIPLVIEHFRYFAGWATKIVGQTIPVQGHYFNYTRHEAIGVVGQIIPWNFPLLMAAWKLGAALATGCTVVLKPAEQTPLSALYLGELINEAGFPKGVVNIVPGFGHSAGTPLVNHPAVDKVAFTGSTDVGKLIMKQASESLKRVTLELGGKSPNIILPDADLSKAVPGSLMGIMFNQGQVCCAGSRLYVQKKQYDHVVADLVSLTNEIQQGDGLLEQTTMGPLISNQQQSRVKNYIDRGVEEGAELLTGGNIPYDQGYFVAPTIFADVDHSMTIAKEEIFGPVVAAMPFDSIDDLIDKANDSDYGLAAGVWTQDIKKAHYIAHRIKAGTIWVNCYNVFDAASPFGGYKQSGIGREMGSYALENYTEVKSVWVNMD

SEQ ID NO: 12482 - DNA, 3687 bp, Agrobacterium tumefaciens
  CDS (1)..(3687)
atggccgatggtgcaagcaatgccggtgtaactatccagcaggtgggaaacagtatcttccagaattttgcgccgccggtgcgcgaacagagcctgctgcgcaaggcggtcactgccgcctaccgccgggcagaagaagaatgcatggcgcctttgatcgaagcggcgacggtgacggctgaccaggcgaaagccattcgcgacaccgcccgcaagctgatcgaggcgctgcgtgccaaaaccaagggcacaggcgtcgaagggctggtgcaggaatattcgctttccagccatgagggcgtggcgctgatgtgccttgccgaagcgctgctgcgcattcctgacaccgccacccgcgacgcgctgatccgcgacaagatcgcgcgtggcgactggaagtcccatattggcggcgggcgttcgcttttcgtcaatgccgccacctggggtctcgtcatcacaggcaagctcacttcgaccgtcaatgacagcggcctttcagcggcgctgacgaagctgatcgcccgcgccggcgaacccgtcatccgccgtggcgtcgacatggcgatgcgtatgatgggcgagcagttcgtgaccggcgaaaccatcggtgaggcgatcaagcggtcgaagccgcttgaggagcagggcttccaatattcctacgacatgctgggcgaagccgcgaccaccgcaaaggatgccgagcgttattacaaggattatgaaaacgccatccacgccattggcaaggcctccgccggccgcggcatctatggcgggccgggcatttccatcaagctttcggcgctgcatccacgctacgcccgcgcgcaggccgagcgggtgatggcggagcttctgccgcgcgtgaaatcgctgatgctgctcagcaagacatacgatatcggcctcaatatcgatgcggaagaagccgaccggctggaactgtcactcgatcttctcgaagaactggcgctggacaaggaccttgctggctggaacggcctcggtttcgtggtgcaggcctatggccgccgctgccccttcgttctcgactacatcatcgacctcgcccgccgttcgggccgccgcatcatggtgcgcctcgtcaagggcgcttattgggatgcggaaatcaagcgcgcgcaggtggaggggctggaagacttcccggtctttacccggaaagtgcataccgatgtctcctacatcgcctgcgcccgcaagctgctcgacgcgcgcgatctggtcttcccgcaatttgcgacccacaatgcgcagtccatggcgaccatctatcacctcgccggtcccgatttcaaactcggcgactacgagttccagtgcctgcacggcatgggcgaaccgctttacagcgaagtcgtcggcaaaaagaaactcgaccgcccctgccgtttctatgcccctgtcggcacgcatgagacgctgctggcctatctcgtgcgccgccttctggagaacggcgcgaactcctccttcgtcaatcgcattgccgatccggccgtgccggtggattccctgctggaagacccggtcgcggtggtgaaggcctatgccgttcccggtgcgcagcacgaccgtatcgccgcccccgccgatctcttcggcccggaacggaaaaactccgccggcgtcgacctctccaatgaaacaacgctctctgccctcgacaaaacactgaaggcgggtgcagcaacggaatggaaggctgcggcgccacaggctggcggccagacgcgcccggtcctcaaccccggcgaccacagcgatatcgtcggccatgtgacggaacccaccgaggccgatgtcgaagcggccatgcagcgggcggcggcttcaagctggccctctatgccagtggaagaccgtgccgcctgcctggagcgcgcggccgacgccatgcaggccgaaatgcccacactgctcggcctcatcatgcgcgaggcgggaaaatccatgcccaacgccattgccgaggtgcgcgaagccatcgatttcctgcgttactacgcggcagaagcccgcaggaatttcaaatcggatgaaaaatcgctcggtcccgtcgtctgcattagcccgtggaacttcccgctcgccatcttcatcggtcaggtggccgcagcgctggtcgccggcaacccggttctggcaaaacccgctgaggagactccgctgatcgccgcgcagggtgtgcgcctgctccatgaggcgggcgttccgcaagacgccgtgcagcttctgccgggcgatggcaagacgggtgcggcgctggtcggctcaccactgacggcgggcgtgatgttcaccggctccactgaggtggcgcggctcattcaggggcagcttgccggccgggttctggccaatggccagccggtgccgctgattgccgagaccggtggtcagaacgccatgatcgtcgattcctccgcgcttgccgaacaggttgtcgccgatgtcatcgcgtctgccttcgacagtgccggacagcgctgctcggcactgcgcatcctctgcctgcaggaagatgtggcggaccgcacgctgaccatgctgaaaggcgcgctgcacgaattgcgcatcggccgcacggatcagctctccgtcgatgtcggccccgtcatcaccgccgaggccaagggcatcatcgaaaagcatattgacggcatgcggtcgctcggtcaccgcatcgagcagattgcgcttgcgggggaaaccggcaagggcaccttcgtaccgccaaccatcatcgagatgaaatcgctcgccgatctgaagcgcgaggtcttcgggccggtgctgcacgtcatccgcttcaagcgcgatcatctcgaccggctgatcgatgagatcaacgccaccggctacggcctgaccttcggcctgcatacgcgtctcgacgatacgatccagcatgtgctctcccgcgttgcggccggcaatctttatgtgaaccgcaacatcatcggcgcggtggtcggtgtgcagccctttggcggacgcggcctttccggcaccggccccaaggccggcggtccgctttatctcggccgcatgacggagaaagcgccaaagatagaccgcatcgccagccagcaggatcaggctgcggtcgatctcgcccgctggctggatgaaaatggtcagactgttgcggcagaagccgcacgccaggcggctgcgctttcaggccttggctttgagaccgagctggccggccccgtcggcgagcgcaatgtctatgcgctgcatccgcgcggcaagatcctgctggtgccggcaaccgaacaggggctttaccgtcagcttgcggcagcgctatctaccggcaactctgttgtcatcgacaatgcttcgggactggaaaaggcgatctacggcctgccggcaagcgtgacctcgcgcatcgtctgggcggatgactgggaaaaatcggcacccttcgccggtgcgctggtcgagggcgatgcggaacgcgtggttgcgatcaacaggaagatcgccgccctgcccggcccgctggttctctttcaggcagcgacgacggacgcactttccggcgaaagccagccctatactctcgactggctggtggaagaggtttcagtcagcgtcaacaccacggccgccggcggcaatgccagcctgatgagcattggctaa

SEQ ID NO: 12483 - protein, 1228 aa, Agrobacterium tumefaciens
MADGASNAGVTIQQVGNSIFQNFAPPVREQSLLRKAVTAAYRRAEEECMAPLIEAATVTADQAKAIRDTARKLIEALRAKTKGTGVEGLVQEYSLSSHEGVALMCLAEALLRIPDTATRDALIRDKIARGDWKSHIGGGRSLFVNAATWGLVITGKLTSTVNDSGLSAALTKLIARAGEPVIRRGVDMAMRMMGEQFVTGETIGEAIKRSKPLEEQGFQYSYDMLGEAATTAKDAERYYKDYENAIHAIGKASAGRGIYGGPGISIKLSALHPRYARAQAERVMAELLPRVKSLMLLSKTYDIGLNIDAEEADRLELSLDLLEELALDKDLAGWNGLGFVVQAYGRRCPFVLDYIIDLARRSGRRIMVRLVKGAYWDAEIKRAQVEGLEDFPVFTRKVHTDVSYIACARKLLDARDLVFPQFATHNAQSMATIYHLAGPDFKLGDYEFQCLHGMGEPLYSEVVGKKKLDRPCRFYAPVGTHETLLAYLVRRLLENGANSSFVNRIADPAVPVDSLLEDPVAVVKAYAVPGAQHDRIAAPADLFGPERKNSAGVDLSNETTLSALDKTLKAGAATEWKAAAPQAGGQTRPVLNPGDHSDIVGHVTEPTEADVEAAMQRAAASSWPSMPVEDRAACLERAADAMQAEMPTLLGLIMREAGKSMPNAIAEVREAIDFLRYYAAEARRNFKSDEKSLGPVVCISPWNFPLAIFIGQVAAALVAGNPVLAKPAEETPLIAAQGVRLLHEAGVPQDAVQLLPGDGKTGAALVGSPLTAGVMFTGSTEVARLIQGQLAGRVLANGQPVPLIAETGGQNAMIVDSSALAEQVVADVIASAFDSAGQRCSALRILCLQEDVADRTLTMLKGALHELRIGRTDQLSVDVGPVITAEAKGIIEKHIDGMRSLGHRIEQIALAGETGKGTFVPPTIIEMKSLADLKREVFGPVLHVIRFKRDHLDRLIDEINATGYGLTFGLHTRLDDTIQHVLSRVAAGNLYVNRNIIGAVVGVQPFGGRGLSGTGPKAGGPLYLGRMTEKAPKIDRIASQQDQAAVDLARWLDENGQTVAAEAARQAAALSGLGFETELAGPVGERNVYALHPRGKILLVPATEQGLYRQLAAALSTGNSVVIDNASGLEKAIYGLPASVTSRIVWADDWEKSAPFAGALVEGDAERVVAINRKIAALPGPLVLFQAATTDALSGESQPYTLDWLVEEVSVSVNTTAAGGNASLMSIG

SEQ ID NO: 12484 - DNA, 1548 bp, Bacillus halodurans
  CDS (1)..(1548)
atgttaacaccttataagcatgaaccgtttacagattttagtgtagaagaaaaccgcagcgcgtttgaggctgccttaaagaacgttgaaggggaattagggaaagactacccgttagtgatcaatggggaacgtgtgacgaccgatgataaaatcgtttccgtgaatcctgccatgaaagagcaagtgatcggcgtcgtctcaaaagcaagtcgcgagatagtagatgatgcatttaaatcggcagagacggcatttcatacgtggaaaaacgtcaatcctgaagagcgagcgaacatcttaatcagagcggccgcgatcattcgccggagaaagcatgagttttcggcatggctcgtgaaagaagcgggtaagccttggaaagaagccgatgcagacacagcggaagcgatcgactttttagagtactacgcccggcaaatgattacgctaaaggatggaaagccagtcaatagtcgcgagggtgagcataatcgctacttctatacaccgatcggggtatgtgtcacaatctcgccttggaatttcgccttggcgattatggctggaacgacggtagcgccaattgtaacagggaacaccgtcttactgaaaccagctagcacgacccctgttgtcgccgcaaagttcgtcgaagttcttgaagaagcaggtttgccaaagggtgtggtcaacttcgtcccaggaagtggaacagacatcggtgactacttgatcgatcatccaaaaacaagcttgatcacatttaccggttcgcgtgacgtgggagtccggctttatgaaagggcagcggttgttcatccaggtcaacagcatttgaagcgcgtcattgtagagatgggaggaaaagataccgttgttgtcgataaggatgccgatctcgatttagctgctcaatcgatcgtgacctcggccttcggcttttctggacaaaaatgttctgcaggttcgagagctgtcatccatcaagacgtctatgatgttgtgttagagaaggccgtggccctcacgaaacaactctcagtaggcgaaccgacggcacctgacgtctatatgggacctgtcgtcgatcaaggagctttttcgaaaattatgagctatatcgaagtggggaaagaggaaggccgattgatggtcggaggtgaaggagatgattcaaaaggcttcttcattcaaccgacgatctttgctgacgtagatccccatgcgcgaatcatgcaggaagagattttcggtccagtcgttgccttcagtaaggcaagggattttgatcatgcgctagaaatcgccaataataccgagtacggtctgacaggagctgtcattacaacgaaccgtcaccatatcgaaaaagcgaagcgagacttccatgtaggaaatctatactttaaccggaattgcacaggcgcgattgtcggctaccacccattcggcggctttaaaatgtcaggcaccgattcaaaagctggaggacctgattatttggcccttcatatgcaagcaaaaaccgtctccgaaatgtattaa

SEQ ID NO: 12485 - protein, 515 aa, Bacillus halodurans
MLTPYKHEPFTDFSVEENRSAFEAALKNVEGELGKDYPLVINGERVTTDDKIVSVNPAMKEQVIGVVSKASREIVDDAFKSAETAFHTWKNVNPEERANILIRAAAIIRRRKHEFSAWLVKEAGKPWKEADADTAEAIDFLEYYARQMITLKDGKPVNSREGEHNRYFYTPIGVCVTISPWNFALAIMAGTTVAPIVTGNTVLLKPASTTPVVAAKFVEVLEEAGLPKGVVNFVPGSGTDIGDYLIDHPKTSLITFTGSRDVGVRLYERAAVVHPGQQHLKRVIVEMGGKDTVVVDKDADLDLAAQSIVTSAFGFSGQKCSAGSRAVIHQDVYDVVLEKAVALTKQLSVGEPTAPDVYMGPVVDQGAFSKIMSYIEVGKEEGRLMVGGEGDDSKGFFIQPTIFADVDPHARIMQEEIFGPVVAFSKARDFDHALEIANNTEYGLTGAVITTNRHHIEKAKRDFHVGNLYFNRNCTGAIVGYHPFGGFKMSGTDSKAGGPDYLALHMQAKTVSEMY

SEQ ID NO: 12486 - DNA, 3183 bp, Pseudomonas aeruginosa
  CDS (1)..(3183)
atgttcaaagccagtcacgtcttgcagggcgaggaccagacccggtccgcagccgaattcttccctgtcatcagcgccaactacgcggtcgacgaggaagcctacctgggcgaactgctgcagctcgccgaccccggtcccgacggcatcgaggctatccgccgcaacgcccgcgcactgatcgaaaccgtgcgcagccgggacaacgccgtcgataccctcgacgcactcctgcgccaatacagcctggacacccaggaaggcctgatgctgatgtgtctggccgaggcgctgttgcgtgtgcctgacgcggcgaccgccgacgcgctgatccgcgacaagctgtccgccgccgactggcagcgccatctcggccagagcgacaacgttctggtcaatttcgccgcctggggcctggtgatgaccggcaaggtggtgaacatcgacgaacgcaccgacggccgcgccccgagcgtcatcagccggctggtgcagcgctctggcgaaccggtgatccgcgccgcgatgaaccaggcgatgaagctgatgggcaagcagttcgtgcttggccggaccatctccgaagcgctgaagaacggtcgtccatgccgcgagcagggctacacctattccttcgacatgctcggcgaggccgcgctgaccgccgccgacgccgagaaatacatggccgactaccgccaggccatcgacaccgtcggcgccgagccgcaggtcggtccggggccgcggccgtcgatctcgatcaagctctcggcgctgcatccgcgctacgaagtggcgcaacgcgagcgggtgctcagcgagctgttcgccaatgtcctggaactggcggtgcgcgcgcgcaagctgaacgtcggcatcaccatcgacgccgaggaagccgatcgcctggagctgtccctcgaactctacgagaagctgatgcgcgacccggccatcgccggctggggcgagttcggcctggtcatccaggcctactccaagcgctgcctgccggtgctggtatggctgaccctgctcggccgcgagcttggcgcacgcatcccgctgcgcctggtgaagggtgcctactgggacagcgagatcaagcagtgccaggtgcagggcgccgatggctaccccgtctacacccgcaaggaaggcaccgacacttcctacctggcctgcgcccgctacctgctcagcgagcacacccgcggggtgatctacccgcagttcgccagccacaacgcccacaccgtgaccgccatcctcgccctggccgacgaagccagggccgccggcggcgaggagcgcgacttcgagttccagcgcctgcacggcatgggcgacgcgctgtacgacacggtgatcgaaaagtaccgccgcaacgtgcgcatctacgccccggtcggcgcgcacaaggacctgctgccgtacctggtccgccgcctgctggagaacggcgccaactcttccttcgtgcacaagctggtggacccgcgcgtgccggtggagacgctgatccagcacccggttacccaactgcgccagttcaagacgctggccaacgaccgtatccctctgccccaggcgatcttcggcgccgggcggaaaaactcccagggcatcaacatgaacatccagaaccagtggaacgagctggagctcgcctacaagccgcacctgacccgccagtggcaagccgcgccgatcgtcaacggcgagaagctctccggcccggcccacgaagtgcgttgcccgtacgacctggagaggctggtcggcagcgtccagtacgcgtccgccgagcaggccggcaaggccctcgacgtgttgcaggcggcctggccgcgctggagcgccaccccggtggacgagcgtgccggcatcctcgagcgtctcgccgacctgctggaagcccagcgcggcgagctgatggcgctgtgcaccctggaagccggcaagtcgttgcaggatggtatcgacgagatccgcgaggcggtcgacttctgccgctactacgcccagcaggcccgccagcgcctggtccgcgaggaactgcgcggcccgaccggcgagcgcaacgagctgttctacgaaggccgcggcatcttcgcctgcgtcagcccgtggaacttcccgctggcgatcttcctcggccagatcagcgccgcgctggtggccggcaacaccgtgctggccaagccggccgagcagaccagcctgatcgccgcgcgcaccgtcgaactgatgttcgaagccggcctgccgaaggacgttatcgccctgctgccgggcgacggcgccaccctcggcggcgtgttctgccgtgacgcgcgggtcgccggggtggccttcaccggctccaccgacaccgcccgcatcatcaaccgccaactggccgagaagcccggcgccatcgccaccctgatcgccgagaccggcgggcagaacgcgatgatcgtcgattccaccgctttgccggaacaggtgatcaaggatgcggtacaatccgcgttcaccagcgccggccagcgctgctccgcgctgcgcgtgatgtacgtgcagcaggacatcgccgagcgggtgatcgagttgctgaagggcgccatggccgagctgaaggtcggcccgaccgaggtgcgcgtcagcgacgtcggcccggtgatcgacgccgaggccaaggccggcctggagcagcacatcgccgcgctgaaggccgccggcaagctgatcgccgagaccaaggtgccgggcaacctgaacggtcacttcgtcgctcccgtcgcgttcgagatcagcggcatcgacgagctgaagaaagagaacttcggcccggtgctgcacgtggtgcgttatgccgcgcaggacctggaaaaggtcgtgcaggcgatcaacgccaccggtttcggcctgaccatgggggtccatagccgcaacgaggaaaccgcccgtcgcatcgaagagctggcgcgggtcggcaacctctacatcaaccgcaaccagatcggcgcggtggtgggcgtgcaaccgttcggcggccacggcctgtccggcaccggtcccaaggccggcgggccgaactacctgctgcgtttcgtcagcgagcgcaccacgtcggtgaacaccaccgcggtgggcggcaacgcgtcgctgctgtcgctggccgacgccgagtga

SEQ ID NO: 12487 - protein, 1060 aa, Pseudomonas aeruginosa
MFKASHVLQGEDQTRSAAEFFPVISANYAVDEEAYLGELLQLADPGPDGIEAIRRNARALIETVRSRDNAVDTLDALLRQYSLDTQEGLMLMCLAEALLRVPDAATADALIRDKLSAADWQRHLGQSDNVLVNFAAWGLVMTGKVVNIDERTDGRAPSVISRLVQRSGEPVIRAAMNQAMKLMGKQFVLGRTISEALKNGRPCREQGYTYSFDMLGEAALTAADAEKYMADYRQAIDTVGAEPQVGPGPRPSISIKLSALHPRYEVAQRERVLSELFANVLELAVRARKLNVGITIDAEEADRLELSLELYEKLMRDPAIAGWGEFGLVIQAYSKRCLPVLVWLTLLGRELGARIPLRLVKGAYWDSEIKQCQVQGADGYPVYTRKEGTDTSYLACARYLLSEHTRGVIYPQFASHNAHTVTAILALADEARAAGGEERDFEFQRLHGMGDALYDTVIEKYRRNVRIYAPVGAHKDLLPYLVRRLLENGANSSFVHKLVDPRVPVETLIQHPVTQLRQFKTLANDRIPLPQAIFGAGRKNSQGINMNIQNQWNELELAYKPHLTRQWQAAPIVNGEKLSGPAHEVRCPYDLERLVGSVQYASAEQAGKALDVLQAAWPRWSATPVDERAGILERLADLLEAQRGELMALCTLEAGKSLQDGIDEIREAVDFCRYYAQQARQRLVREELRGPTGERNELFYEGRGIFACVSPWNFPLAIFLGQISAALVAGNTVLAKPAEQTSLIAARTVELMFEAGLPKDVIALLPGDGATLGGVFCRDARVAGVAFTGSTDTARIINRQLAEKPGAIATLIAETGGQNAMIVDSTALPEQVIKDAVQSAFTSAGQRCSALRVMYVQQDIAERVIELLKGAMAELKVGPTEVRVSDVGPVIDAEAKAGLEQHIAALKAAGKLIAETKVPGNLNGHFVAPVAFEISGIDELKKENFGPVLHVVRYAAQDLEKVVQAINATGFGLTMGVHSRNEETARRIEELARVGNLYINRNQIGAVVGVQPFGGHGLSGTGPKAGGPNYLLRFVSERTTSVNTTAVGGNASLLSLADAE

SEQ ID NO: 12488 - DNA, 1437 bp, Sulfolobus solfataricus
  CDS (1)..(1437)
atgaaatcgtatcagggattggctgacaagtggattaagggcagtggggaagaataccttgatattaatccggctgataaggatcacgtattagctaagataagattatatacaaaagatgacgttaaagaagctataaacaaggctgtagccaaattcgacgaatggtcaaggactccagcacctaaaagaggctcaatattacttaaggcaggggaattaatggaacaagaagcccaagagtttgcgctattgatgacattagaggagggtaagactctcaaggatagtatgtttgaagtgacaagaagttataatttactgaaattttatggagcattagcatttaagatatctgggaaaacgcttccttcagcagatcctaatactaggatatttacagtaaaggaacccttaggcgtagtagctttaattacgccgtggaatttcccattatcaataccagtatggaaattggctccagccttggctgcgggtaacactgcagtaataaaaccagcgacgaaaacaccgttaatggtagccaaattggtagaagtgttgtctaaagctggattgccagagggtgtcgtgaatttagtagttggtaagggaagtgaagtcggagataccatagtaagtgatgataatatagctgcagtatcatttactggatcaaccgaggtaggtaagagaatttacaaactcgtaggaaataaaaatagaatgacaagaattcaactagagctaggaggtaaaaacgcgttatatgtggataagagcgctgacttaacgttagctgctgaattagccgtaagaggaggatttggactaaccggtcaatcatgtactgcaactagtaggttaataattaacaaggatgtatatactcaatttaaacaaagactactagaaagagttaagaagtggagagtaggaccgggtactgaagatgttgatatgggtccagttgtagatgaaggtcaatttaagaaagacttagaatatatagaatacggaaagaatgtgggagcaaaactaatttatggtggaaatataataccagggaagggatatttcctagaacctacaattttcgaaggagtcacatctgatatgaggctatttaaagaagagattttcggtccagtacttagtgtcactgaggcaaaagatttagatgaggctataaggctagttaacgctgtagactatggacatacagctggaatagtcgcaagcgatatcaaggcgattaacgagttcgttagtagggtagaggcaggagttataaaggttaataagccaacagtcggactggaattgcaagcaccatttggtggttttaagaattctggagccactacgtggaaagagatgggagaagatgctttagagttctaccttaaggagaagacagtatacgaaggctggtaa

SEQ ID NO: 12489 - protein, 478 aa, Sulfolobus solfataricus
MKSYQGLADKWIKGSGEEYLDINPADKDHVLAKIRLYTKDDVKEAINKAVAKFDEWSRTPAPKRGSILLKAGELMEQEAQEFALLMTLEEGKTLKDSMFEVTRSYNLLKFYGALAFKISGKTLPSADPNTRIFTVKEPLGVVALITPWNFPLSIPVWKLAPALAAGNTAVIKPATKTPLMVAKLVEVLSKAGLPEGVVNLVVGKGSEVGDTIVSDDNIAAVSFTGSTEVGKRIYKLVGNKNRMTRIQLELGGKNALYVDKSADLTLAAELAVRGGFGLTGQSCTATSRLIINKDVYTQFKQRLLERVKKWRVGPGTEDVDMGPVVDEGQFKKDLEYIEYGKNVGAKLIYGGNIIPGKGYFLEPTIFEGVTSDMRLFKEEIFGPVLSVTEAKDLDEAIRLVNAVDYGHTAGIVASDIKAINEFVSRVEAGVIKVNKPTVGLELQAPFGGFKNSGATTWKEMGEDALEFYLKEKTVYEGW

SEQ ID NO: 12490 - DNA, 3606 bp, Neisseria meningitidis
  CDS (1)..(3606)
atgtttcattttgcatttccggcacaaactgccctgcgccaagcgataaccgatgcctaccgccgtaatgaaatcgaagccgtacaggatatgttgcaacgtgcacagatgagcgacgaagagcgcaacgccgcctccgagcttgcccgccgtttggttacccaagtccgcgccggccgcaccaaagccggcggcgtggatgcgctgatgcacgagttttcactctccagcgaagaaggcatcgcgctgatgtgtctggcagaagccctgctgcgtatccccgacaacgccacgcgcgaccgcctgattgccgacaagatttcagacggcaactggaaaagccatttgaacaacagcccttccctcttcgtcaatgctgccgcctggggcctgctgattaccggcaaactgaccgccacaaacgacaaacaaatgagttccgcactcagccgcctgatcagcaaaggcggcgcaccgctcatccgccaaggcgtaaattacgccatgcggcttctgggcaaacagttcgtaaccggacagaccattgaagaagccctgcaaaacggcaaagaacgcgaaaaaatgggctaccgcttctccttcgatatgttgggcgaagccgcctacacccaagccgatgccgaccgctactaccgcgactatgtcgaagccatccacgccatcggcaaagatgcggcaggacaaggcgtttacgaaggtaacggtatttccgtcaaactttccgccatccatccgcgctactcgcgcacccaacacggccgcgtgatgggcgaactgttgccgcgcctgaaagagctgttccttttgggtaaaaaatacgatatcggtatcaacatcgatgccgaagaagccaaccgtctggagctgtctttggatttgatggaggctttggtttcagaccctgacttggctggctacaaaggtatcggtttcgttgtccaagcctaccaaaaacgttgtccgttcgttatcgactacctgatcgaccttgcccgccgcaacaaccaaaaactaatgatccgcctcgtcaaaggcgcgtattgggacagcgaaatcaaatgggcgcaagtggacggcttgaacggctatccgacctacacccgcaaagtccacaccgacatctcctacctcgcctgcgcgcgcaaactgctttccgcgcaagacgcggtattcccgcaatttgccacccacaacgcctacactttgggcgcaatctaccaaatgggtaaaggcaaagattttgaacaccaatgcctgcacggtatgggcgaaaccctgtacgaccaagtcgtcggcccgcaaaacttaggccgccgcgtgcgcgtgtacgccccagtcggcacacacgaaaccctgctcgcctacttggtgcgccgcctgttggaaaacggcgcgaactcgtctttcgtcaaccaaatcgtcgatgaaaacatcagcatcgacacgctcatccgcagcccgttcgacaccatcgccgaacaaggcatccacctgcacaacgccctgccgctgccgcgcgatttgtacggcaaatgccgtctgaactcgcaaggcgtggacttgagcaacgaaaacgtattgcagcagcttcaagaacagatgaacaaagccgccgcgcaagacttccacgccgcatccatcgtcaacggcaaagcccgcgatgtcggcgaagcgcaaccgattaaaaaccctgccgaccacgacgacatcgtcggcacagtcagctttgccgatgccgcgcttgcccaagaagcggttggcgcagccgttgccgcgttccccgaatggagtgcgacacctgccgccgaacgcgccgcctgcctgcgccgttttgccgatttgctggagcagcacaccccagcactgatgatgcttgccgtgcgcgaagcaggcaaaacgctgaacaacgccattgccgaagtgcgcgaagccgtcgatttctgccgctactacgcaaacgaagccgaacataccctgcctcaagacgcaaaagccgtcggcgcgattgtcgccatcagcccgtggaacttcccgctcgccatctttaccggcgaagtcgtttccgcattggcggcaggcaacaccgtcatcgccaaacccgccgaacaaaccagcctgattgccggttatgccgtttccctcatgcacgaagccggcatcccgacttccgccctgcaactcgtcctcggcgcaggcgacgtgggtgcggcattgaccaacgatgcccgcatcggcggcgtgattttcaccggctcgaccgaagtggcgcgcctgatcaacaaagcccttgccaaacgcggcgacaatcccgtcctgattgccgaaaccggcggacaaaacgccatgattgtcgattccaccgcacttgccgagcaagtctgcgccgacgtattgaactccgccttcgacagcgcgggacaacgctgctccgccctgcgcattttgtgcgtccaagaagacgttgccgaccgtatgctcgacatgatcaaaggcgctatggacgaactcgtcgtcggcaaaccgattcagctcactaccgatgtcggccccgtcatcgatgccgaagcacagcaaaacctgttgaaccacatcaacaaaatgaaaggtgttgccaagtcctaccacgaagtcaaaaccgccgccgatgtcgattccaaaaaatccacgttcgttcgccccatcctgtttgaattgaacaacctcaacgaactgcaacgcgaagtcttcggtcccgtcctgcacgtcgtccgctaccgcgccgacgaactcgacaacgtcatcgaccaaatcaacagcaaaggctacgccctgacccacggcgtacacagccgcatcgaaggcacggtacgccacatccgcagccgcatcgaagccggcaacgtttacgtcaaccgcaacatcgtcggcgcagtcgtcggcgtacagcccttcggcggacacggtctgtccggcacaggccccaaagcaggcggttcgttctacctgcaaaaactgacccgcgccggcgaatgggttgccccgaccctgagccaaatcggacaggcggacgaagccgcactcaaacgcctcgaagcactggttcacaaactaccgttcaacgccgaagagaaaaaagccgcagcggccgctttgggacacgcccgcatccgcaccctgcgccgtgccgaaaccgtccttaccggaccgaccggcgagcgcaacagcatctcatggcacgcgcccaaacgcgtttggatacacggcggcagcacggttcaagcctttgccgcactgaccgaacttgccgcctccggcatacaggcagtggtcgaacccgacagccccttggcttcctacactgccgacttggaaggtctgctgctggtcaacggcaaacccgaaaccgccggcatcagccacgttgccgccctgtcgcctttggacagcgcgcgcaaacaggaacttgccgcccacgacggcgcactcatccgcatcctcccttcggaaaacggactcgacatcctgcaagtgtttgaagaaatctcttgcagcgtcaacaccacagccgccggcggcaacgccagcctgatggcggtcgccgactga

SEQ ID NO: 12491 - protein, 1201 aa, Neisseria meningitidis
MFHFAFPAQTALRQAITDAYRRNEIEAVQDMLQRAQMSDEERNAASELARRLVTQVRAGRTKAGGVDALMHEFSLSSEEGIALMCLAEALLRIPDNATRDRLIADKISDGNWKSHLNNSPSLFVNAAAWGLLITGKLTATNDKQMSSALSRLISKGGAPLIRQGVNYAMRLLGKQFVTGQTIEEALQNGKEREKMGYRFSFDMLGEAAYTQADADRYYRDYVEAIHAIGKDAAGQGVYEGNGISVKLSAIHPRYSRTQHGRVMGELLPRLKELFLLGKKYDIGINIDAEEANRLELSLDLMEALVSDPDLAGYKGIGFVVQAYQKRCPFVIDYLIDLARRNNQKLMIRLVKGAYWDSEIKWAQVDGLNGYPTYTRKVHTDISYLACARKLLSAQDAVFPQFATHNAYTLGAIYQMGKGKDFEHQCLHGMGETLYDQVVGPQNLGRRVRVYAPVGTHETLLAYLVRRLLENGANSSFVNQIVDENISIDTLIRSPFDTIAEQGIHLHNALPLPRDLYGKCRLNSQGVDLSNENVLQQLQEQMNKAAAQDFHAASIVNGKARDVGEAQPIKNPADHDDIVGTVSFADAALAQEAVGAAVAAFPEWSATPAAERAACLRRFADLLEQHTPALMMLAVREAGKTLNNAIAEVREAVDFCRYYANEAEHTLPQDAKAVGAIVAISPWNFPLAIFTGEVVSALAAGNTVIAKPAEQTSLIAGYAVSLMHEAGIPTSALQLVLGAGDVGAALTNDARIGGVIFTGSTEVARLINKALAKRGDNPVLIAETGGQNAMIVDSTALAEQVCADVLNSAFDSAGQRCSALRILCVQEDVADRMLDMIKGAMDELVVGKPIQLTTDVGPVIDAEAQQNLLNHINKMKGVAKSYHEVKTAADVDSKKSTFVRPILFELNNLNELQREVFGPVLHVVRYRADELDNVIDQINSKGYALTHGVHSRIEGTVRHIRSRIEAGNVYVNRNIVGAVVGVQPFGGHGLSGTGPKAGGSFYLQKLTRAGEWVAPTLSQIGQADEAALKRLEALVHKLPFNAEEKKAAAAALGHARIRTLRRAETVLTGPTGERNSISWHAPKRVWIHGGSTVQAFAALTELAASGIQAVVEPDSPLASYTADLEGLLLVNGKPETAGISHVAALSPLDSARKQELAAHDGALIRILPSENGLDILQVFEEISCSVNTTAAGGNASLMAVAD

SEQ ID NO: 12492 - DNA, 3558 bp, Helicobacter pylori
  CDS (1)..(3558)
atgcaaaaaatcattgacgattcgctagaattagctaaaaaactgcaagatagtatcagtaaccatttgagcgatcaggaaaaagcgttccactctaaaatgcaaaagcttttaaacaaccctgaaaacaaagtcatgctcatagagcttatggatcggagtttcaggtgcttggacaataaagcccgctttgaaatgattgagcatgttttagacaaatacaaaagccgtgagattttttctccgtttgaaaaagtgcttttaatggggtttttaagctttgggaaaatgctccctgatatgagcgtgcctttctttgtcaataaaatcagaagcgacacgaaagcgatggtcttggatcaagaagagagccagttaaaagagcggattttaaaaagaaaaaatgaaaaaatcattttgaatgtgaattttattggcgaagaggttttaggcgaagaagaagctaatgcgcgttttgaaaaatactctcaagccctaaaatccaactacatccaatacatttccattaaaatcacgacgattttttctcaaatcaatatccttgattttgaatactctaaaaaagagattgtcaaacgcctagacgctctttacgccctggctttagaagaagaaaaaaaacaaggcatgcctaaattcatcaatttggatatggaagaatttagggatttagagctaacagtggagtcgtttatggaatccatcgctaaatttgatttgaacgctggtattgtgctgcaagcctatattccggattcttatgaatatttgaaaaaactgcacgctttttctaaagaaagggttttaaaagggttgaagcccattaaaatccgctttgttaagggagcgaacatggagagcgaagaaactatcgcttccgtgaaagattgggcgttacccacattttccaataagcaagacaccgattctaattacaataaaatgttggattttgttttagagggcgataattataaatacattcatattggcgcagcgagtcataatatttttgaaatcgcttatgtctatacgcgtatccatgccattaatgatcctgttgtgttagagcatttcagctttgaaatgctagagggcatgagtttgcaagcgagccaggaactaaaagagatgcacaagctcattctttatgcgccggtgtgcgatgaagcgcattttaacaatgcgatcgcttacttggtgaggaggttagacgaaaacacctcaagcgataatttcatgaaggctttctttaacctcaaagtaggcacgagcgaatggaaagatcaagaacaacgctttttaaacagccttaaaggaattgccactttagacaatgccacccataggactcaagataggaacgccaaacaaagcgggcataccacttacccaaaccactcctttaaaaacgaaagcgataccgattttattttaaaagccaaccgagaatgggctaaaaaagtgcgcgagaaaatgcgtaacgctcctattttagagctttacccagagatggatgggaggtttgaagatcctaatctaacccctttagaagtctttgatagaatccatcataaaaaaatcgctagcgtgcatttagcggataaggaagcgattttaaaagccctagaagtggctaaaagcgataagagccgtttcagtcaaaaaagctttacagaaatccatgccttaatgagtcaaaccgcccagctttttagagaaagaagaggcgatttgatagggatttccgctttagaagtgggtaagactttcgctgaaacggacgctgaagtgagcgaagccattgactttttagagttttacccttacagcttaagggtgttgcaagagcaaaacacaaaaacgcaattcacccctaaaggcgtgggcgtggtcattgccccatggaatttccctgtgggcatttctgtaggcactatcgctgcccccctagctacgggcaatcgggtgatttacaagccctcaagtttgtctagcgtaacgggctataagctttgtgagtgcttttgggatgcgggcgtgcctagagatgcgctcatttacttgccctctaaagggagcgatattagcgaacatcttttaagagatgaaagcatccagtttgccattttaaccgggggcgaagacaccgcttataaaatgttaaaagctaaccccactttagccttgagcgctgaaacaggcggtaaaaacgccaccattgtgagcaaaatggcagacagagaccaggcgattaagaatgttatccattcagcttttagcaattcggggcaaaaatgctccgccacttcgcttttagtattagaaaaagaagtctatgaagatgagaactttaaaaagactctaatagatgcgactctaagccttagcgtgggcgatccttttgatttcaaaaacaaaatcggcgctctagcggacaagcctaatgaaaaggtcatcaaagccatagatgaattaaaaagctatgaaaattacgaaatcccggtaagctttgtcaatgataacccctatttgatgaagccaagcatcaaatacggcactaaaaaaggcgatttcacgcaccaaactgagctttttacgcccattttatccgtgatggaagcaaaagatttagacgaagcgatagaaatagccaattctaccggttacgggctgactagcgcgttagagtcgttggacgaaagggagtgggaatattatttagaacgcattgaagccggtaatatctatatcaacaagcccaccacaggagcgattgtcttgcgccagccttttgggggggttaaaaaatccgctgtggggtttgggaggaaagtaggcattttcaactatatcacgcaatttgtgaatatctgccaagaagaagaagacgaaaacgccttaaaaaaccccttaagcgaagccttagaaaacttaactcaaaaaggctatgatgagcatacgcatgagttgaagcgcgcgatttttatggcaaaaagctacgcttatcattacaaacatgaattcagccaaactaaagactatgtcaaaatcagaggcgaagacaaccttttttcctacactaaagttaaaagcgtgggctatcgcatcaccgaaaaggacactttaagcgacatgttaggcgttgctttagcatgtttaatttctcaaatccctttaacgctcagcatagaaaacgaacgaacgaacaaagatttaacctttttcttagaatgcttaaaagcgctccaagcaagcgcccctattgtttatgaaagcttgcaaaaatttagcgagaaattgaatactttcaatcgtgtccgttatctcaaaagcgatttggatttattgcacgaacaagcgagcgctttagggatggttttagccacggctaaaccatgcctaaatgggcgttttgaattgctgtattaccacttagagcgatcggttagcatctcttatcaccgttatgggaatttaggctcaagggttttaaggcaacccacttgccacaaatcatgctgtgctgaaaaataa

SEQ ID NO: 12493 - protein, 1185 aa, Helicobacter pylori
MQKIIDDSLELAKKLQDSISNHLSDQEKAFHSKMQKLLNNPENKVMLIELMDRSFRCLDNKARFEMIEHVLDKYKSREIFSPFEKVLLMGFLSFGKMLPDMSVPFFVNKIRSDTKAMVLDQEESQLKERILKRKNEKIILNVNFIGEEVLGEEEANARFEKYSQALKSNYIQYISIKITTIFSQINILDFEYSKKEIVKRLDALYALALEEEKKQGMPKFINLDMEEFRDLELTVESFMESIAKFDLNAGIVLQAYIPDSYEYLKKLHAFSKERVLKGLKPIKIRFVKGANMESEETIASVKDWALPTFSNKQDTDSNYNKMLDFVLEGDNYKYIHIGAASHNIFEIAYVYTRIHAINDPVVLEHFSFEMLEGMSLQASQELKEMHKLILYAPVCDEAHFNNAIAYLVRRLDENTSSDNFMKAFFNLKVGTSEWKDQEQRFLNSLKGIATLDNATHRTQDRNAKQSGHTTYPNHSFKNESDTDFILKANREWAKKVREKMRNAPILELYPEMDGRFEDPNLTPLEVFDRIHHKKIASVHLADKEAILKALEVAKSDKSRFSQKSFTEIHALMSQTAQLFRERRGDLIGISALEVGKTFAETDAEVSEAIDFLEFYPYSLRVLQEQNTKTQFTPKGVGVVIAPWNFPVGISVGTIAAPLATGNRVIYKPSSLSSVTGYKLCECFWDAGVPRDALIYLPSKGSDISEHLLRDESIQFAILTGGEDTAYKMLKANPTLALSAETGGKNATIVSKMADRDQAIKNVIHSAFSNSGQKCSATSLLVLEKEVYEDENFKKTLIDATLSLSVGDPFDFKNKIGALADKPNEKVIKAIDELKSYENYEIPVSFVNDNPYLMKPSIKYGTKKGDFTHQTELFTPILSVMEAKDLDEAIEIANSTGYGLTSALESLDEREWEYYLERIEAGNIYINKPTTGAIVLRQPFGGVKKSAVGFGRKVGIFNYITQFVNICQEEEDENALKNPLSEALENLTQKGYDEHTHELKRAIFMAKSYAYHYKHEFSQTKDYVKIRGEDNLFSYTKVKSVGYRITEKDTLSDMLGVALACLISQIPLTLSIENERTNKDLTFFLECLKALQASAPIVYESLQKFSEKLNTFNRVRYLKSDLDLLHEQASALGMVLATAKPCLNGRFELLYYHLERSVSISYHRYGNLGSRVLRQPTCHKSCCAEK

SEQ ID NO: 12494 - DNA, 1488 bp, Bacillus subtilis
  CDS (1)..(1488)
atgagttctttaacgatgcaagtgacgaaaaggctggagacatttttacagggaacaaagaagctttatattgacggaaagtttgttccgagtgcctcaggggcaacctttgacactccaaacccggcgaccggcgaaaccttgatgacgctgtatgaagcccaggctgcggatgtggacaaagctgttaaagctgcccggaaagcctttgaccaaggtgaatggagaacaatgtctccagcttcgagaagcagactgatgtataagctggcagacttaatggaagagcataaaactgagcttgctcagcttgaaacacttgataatgggaaaccgatcaatgaaacgactaatggagatattccgctggctattgagcatatgcgctattacgccggctggtgtacaaaaataacaggacagacgattccggtttccggcgcttattttaattatacgcgtcatgagcctgtcggtgtcgtcggccagatcattccatggaatttcccgctcctgatggcgatgtggaaaatgggcgcggcacttgcaacaggctgtacaatcgtcctcaaaccggctgaacaaacaccgctttcagctctttatttggcagaattaattgaccaagccggtttccctgccggtgtaatcaacatcatcccaggattcggtgaagatgcgggagaagcgctgacgaaccacgaagcggttgataaaattgcctttaccggttccactgaaatcggaaagaaaatcatgtccaccgcagcgaaaagcattaagcgtgtgacattggagctgggcggaaaatcgcctaatattcttctgccggatgcgaatttaaaaaaagccatcccgggcgctttaaacggtgtgatgtttaaccagggccaagtctgctgtgcgggctcacgtgtcttcattcataaagaccaatatgatgaagttgttgatgaaatggcatcctatgctgagtcactccgccaaggagcgggacttcataaagatactcaaatcgggcctctcgtaagcaaggaacagcatgagcgcgttctttcctatattcaaaaaggaaaagatgaaggagcaaaagcagtgaccggcggaagctgtccttttgaagcaggatattttgtcgcaccgactgtgtttgcgaatgttgaagacgaaatgaccatcgcaaaagaagaaattttcggacccgtgctgactgcaattccgtacgaaacagtcgatgaagttattgaacgggcaaaccattcagaatatgggcttgcagccggactatggacagagaacgtcaagcaggctcactatatcgcggaccgacttcaagccggaaccgtttgggtcaactgctataatgtgtttgacgcggcgtctccatttggcggttataaacagtcaggactcggacgagaaatgggatcatatgccttggataattacacagaagtcaaaagtgtatgggtaaaccttgaagactaa

SEQ ID NO: 12495 - protein, 495 aa, Bacillus subtilis
MSSLTMQVTKRLETFLQGTKKLYIDGKFVPSASGATFDTPNPATGETLMTLYEAQAADVDKAVKAARKAFDQGEWRTMSPASRSRLMYKLADLMEEHKTELAQLETLDNGKPINETTNGDIPLAIEHMRYYAGWCTKITGQTIPVSGAYFNYTRHEPVGVVGQIIPWNFPLLMAMWKMGAALATGCTIVLKPAEQTPLSALYLAELIDQAGFPAGVINIIPGFGEDAGEALTNHEAVDKIAFTGSTEIGKKIMSTAAKSIKRVTLELGGKSPNILLPDANLKKAIPGALNGVMFNQGQVCCAGSRVFIHKDQYDEVVDEMASYAESLRQGAGLHKDTQIGPLVSKEQHERVLSYIQKGKDEGAKAVTGGSCPFEAGYFVAPTVFANVEDEMTIAKEEIFGPVLTAIPYETVDEVIERANHSEYGLAAGLWTENVKQAHYIADRLQAGTVWVNCYNVFDAASPFGGYKQSGLGREMGSYALDNYTEVKSVWVNLED

SEQ ID NO: 12496 - DNA, 1581 bp, Deinococcus radiodurans
  CDS (1)..(1581)
atgtccaccctcttagacggcctgcttcccttccagcacgaaccctacttcgactttgccgaccccgctgtggccgaggcgcaaaccgccgcctacgcgcaggcccgtcagaaatacgccggacagacctttccgctgctcgtcggcgggcagcaggtgaagggcgacggcaccttgaccgtgaccaatcccgcgaccggcgaacagctctggcacttccagaacgcgacggcggcgcaactcgatgaggcggtcagggccgccaacgaggccttccagagctggcgcttttccgaccccctgcaacgcgcgagcatcttcttgcgggccgcgcaactgctgcgctcgcgccgcatggagctgaacgccgtcatgagcctcgaaaacggtaaaaactgggccgaggccgacggcgaaatcgccgagtgtgtggaccactgcgaggtgttcgcccgcgaaacgctgaagtgggcgcagggcaaacccgtctatcccatgcccgacgagcacgtgaccaccgtttacgagccgctcggcgccgtcgccgtcatcagcccctggaactatccgagcgcgattccgctggggatggccctcggcgcgctggcggcgggcaacacggtgatttggaaacccgcgagcgagacgccgctctcgtcctggctgctcattcgcctgctgttcgaggccgggctgccgcgtgactgcgttcagttcctcaccggaagcgacgatgtgctcggcgacccgctggtggaccacaaggacgtgcggatggtcgccttcaccgggagccgcgaaatcggctgccgcatctacgaacgggcggcgaaggtgcagcccggccagaaattccttaagcgcgtgattgccgaaatgggcggcaaggaccccaccgtggtctgcgctgatgccgacctagacgccgccgccgctggcatcgtcgcttccaccttcggctacagcggccagaagtgcagcgcgtgcagccgcgtcatcgctgaggcaagcgtgtacgacacactgcttgaaaaggtcaagacgctgaccgaagcgctgaaggtgggtttgcccgagcacaacgccgccgtcggcccggtcatccaccaggggagcgccaaccgaattcggcagtacatcgaaaacggcaaagggacggcccgcctcgtctgcggcggcggagaaatggaggtggcagacagtggcgaggcgagcgccaactacatccagcccaccatcttcgccgacgtggacgcgaaagacccgctgtttcaggaggaaattttcggcccggtcctcgccttcgctaaagccgacgactggcggcacgcgattgacctcgccaacgattcggactacggcctgaccgccgccttttattcgcgcgacccccacaaactgaccgaggcgcggcggctgatgcacgtcggcaacctctatctcaatcgcaaatgcactggtgcgctcagtggctcgcattccttcggcggctacggcatgagcggcacgaacgctaaggtgggcggccctgattacctgttttggttcctccagacgaagacggtggcgcaaaagtattga

SEQ ID NO: 12497 - protein, 526 aa, Deinococcus radiodurans
MSTLLDGLLPFQHEPYFDFADPAVAEAQTAAYAQARQKYAGQTFPLLVGGQQVKGDGTLTVTNPATGEQLWHFQNATAAQLDEAVRAANEAFQSWRFSDPLQRASIFLRAAQLLRSRRMELNAVMSLENGKNWAEADGEIAECVDHCEVFARETLKWAQGKPVYPMPDEHVTTVYEPLGAVAVISPWNYPSAIPLGMALGALAAGNTVIWKPASETPLSSWLLIRLLFEAGLPRDCVQFLTGSDDVLGDPLVDHKDVRMVAFTGSREIGCRIYERAAKVQPGQKFLKRVIAEMGGKDPTVVCADADLDAAAAGIVASTFGYSGQKCSACSRVIAEASVYDTLLEKVKTLTEALKVGLPEHNAAVGPVIHQGSANRIRQYIENGKGTARLVCGGGEMEVADSGEASANYIQPTIFADVDAKDPLFQEEIFGPVLAFAKADDWRHAIDLANDSDYGLTAAFYSRDPHKLTEARRLMHVGNLYLNRKCTGALSGSHSFGGYGMSGTNAKVGGPDYLFWFLQTKTVAQKY

SEQ ID NO: 12498 - DNA, 1548 bp, Bacillus subtilis
  CDS (1)..(1548)
atgacagtcacatacgcgcacgaaccatttaccgattttacggaagcaaagaataaaactgcatttggggagtcattggcctttgtaaacactcagctcggcaagcattatccgcttgtcataaatggagaaaaaattgaaacggaccgcaaaatcatttctattaacccggcaaataaagaagagatcattgggtacgcgtctacagcggatcaagagcttgctgaaaaagcgatgcaagccgcattgcaggcatttgattcctggaaaaaacaaagaccggagcaccgcgcaaatattctctttaaggcagcggctattttgcgcagaagaaagcatgaattttcaagctatcttgtgaaggaagcaggaaaaccgtggaaggaagcagatgcggacacggctgaagcgatagactttttagagttctacgcgcgccaaatgttaaagctcaaggaaggggctccggtgaagagccgtgctggcgaggtcaatcaatatcattacgaagcgcttggcgtcggcatcgtcatttctccatttaacttcccgctcgcgattatggcgggaacagcggtggcagcgattgtgacaggaaatacgattctcttaaaaccggctgacgcagccccggtagtggcagcaaaatttgtcgaggtcatggaggaagcgggtctgccaaacggcgttctgaattacattccgggagatggtgcggagatcggtgatttcttagttgagcatccgaagacacggtttgtctcatttacaggttcccgtgcagtcggctgccggatttatgagcgagctgccaaagtgcagccgggccaaaaatggctcaaacgggtaattgcagaaatgggcggaaaagacacagtgcttgtcgacaaggacgctgatcttgaccttgctgcatcctctatcgtgtattcagcatttggatattcaggacagaagtgttctgcgggctcccgcgcggtcattcatcaggatgtgtatgatgaagtggtggaaaaagctgtggcgctgaccaaaacgctgactgtcggcaatccagaagatcctgatacgtatatgggtcccgtgattcatgaagcatcctacaacaaagtgatgaaatacattgaaatcggcaaatctgaaggcaagctattggccggcggagaaggcgatgattcaaaaggctactttattcagccgacgatctttgcagatgttgatgaaaacgcccgcttgatgcaggaagaaattttcggcccggttgttgcgatttgcaaagcgcgtgatttcgatcatatgctggagattgccaataacacggaatacggattaacaggtgcgcttctgacgaaaaaccgtgcgcacattgaacgggcgcgcgaggatttccatgtcggaaacctatattttaacagaggatgtaccggagcaattgtcggctatcagccgttcggcggttttaatatgtcaggaacagactcaaaagcaggcggtcccgattacttaattcttcatatgcaagccaaaacaacgtccgaagctttttga

SEQ ID NO: 12499 - protein, 515 aa, Bacillus subtilis
MTVTYAHEPFTDFTEAKNKTAFGESLAFVNTQLGKHYPLVINGEKIETDRKIISINPANKEEIIGYASTADQELAEKAMQAALQAFDSWKKQRPEHRANILFKAAAILRRRKHEFSSYLVKEAGKPWKEADADTAEAIDFLEFYARQMLKLKEGAPVKSRAGEVNQYHYEALGVGIVISPFNFPLAIMAGTAVAAIVTGNTILLKPADAAPVVAAKFVEVMEEAGLPNGVLNYIPGDGAEIGDFLVEHPKTRFVSFTGSRAVGCRIYERAAKVQPGQKWLKRVIAEMGGKDTVLVDKDADLDLAASSIVYSAFGYSGQKCSAGSRAVIHQDVYDEVVEKAVALTKTLTVGNPEDPDTYMGPVIHEASYNKVMKYIEIGKSEGKLLAGGEGDDSKGYFIQPTIFADVDENARLMQEEIFGPVVAICKARDFDHMLEIANNTEYGLTGALLTKNRAHIERAREDFHVGNLYFNRGCTGAIVGYQPFGGFNMSGTDSKAGGPDYLILHMQAKTTSEAF

SEQ ID NO: 12500 - DNA, 2973 bp, Synechocystis sp
  CDS (1)..(2973)
atggttgcacaaatcgattcacaacaacagtatgaacaggccacccaggcgatcgccaaggaactattagcccagaccagggagaaaagatcgctgtgggacaaaattggcgataatctgcggctcgatgacaagttgctggattggaccatgggtcatcctggattgcgggtgcaattgttcaaatttatcgactgtctgccagcgttgcagagtaacagtgagattgccaaccatctccagcagtatatgagcgaagaggaggtggaattaccagaagcactgaaaaaattgttgaattttgccgatgcccactcgacgccggcccagattgcagcgggaacggtgagtaaagcgacggaacagttggcttttaaatacattgctggggaaacgatcgcccaggtgatcaaaacagtggaacggctccgcaaggaaaaaatgggctttaccattgatttactgggggaagcggtaattacggaatcggaggcggcggaatattggcaaaattatttggacctgatggcccagttatcccagcaagccaaatcctggtcgaaggtgccccaaattgatcaggcagacggggaaatattgccccaggtgcaggtatcggtaaagttaacggctttttattcccagtttgatcccctggaccccgcaggtagtaaagccaaggtttgtgagcggattcgggaattgttgcggcgagcccaagaattaggtgtcgctgttcactttgacatggagcagtaccactacaaagacctgattttaaatattctcaaggaattgttagtggaagaagagttccgctcccgcaccgatgtgggcattaccatgcaggcctatctgcgggattcgaccgaagatttggaagcattaattccctgggctaaacatcggggttatcccgtgactgtgcgcttggtgaaaggagcctattgggatcaagaaaccatcaaagcccaacagaatcattggcaaattccggtttatgtggaaaaagcccaaaccgatgccaactacgagcgcatgactcggctattactggaaaaccacgaatatttgtacgccgccattggtagtcataatgtccgttcccaagccctggcctgtgcgatcgccgaagagttgaatattcccaaacgtcgttatgaaatgcagattctttacggcatgggagaacccctggcccgggccattgttaaacggggtcatcgggtgcgggtctatgcaccctacggtcggctgttaccggggatggcttatttaatccgacgcttattggaaaatactgctaacagttcttttctacgccaaaacctagaagagcggcccattgaagaattaattgctccgccccaagttaaaggcattaatgacctacccaccaagggttatggcaacgctcccgacaccgattacgccgatgctgatttacgccagcaagcatttcaagccctaaccagggttaaacaacaattgggcaaaacctatctgccctacattaacggcgagtacgtggaaacggctaactacattgattccgttaatccctgtcgtccatcccaggcgatcgggaaagtggggttaatcagtgttgaacaggcagaccatgccctggaaatagccaaggctgcgtttcctgcttggaaaaaaactccagtacgggaacggtgtggcattctccgcaaagcggcagacattatggaagagcgtcgccatgagttaaacgcctggatttgtttggaagtgggcaaaattattccccaagctgatgcggaggtgtccgaggcgatcgatttttgtcgctactatgccgatgaaatggaacggctagaccaaggcgttaacctcgatattcccggtgaaaccaaccgttatttctatcaaccccggggcattgccctagtgatttccccctggaatttccccatggcgatcgccgttggtatgacggtggcggcgttggtgacgggcaattgtacgttactaaaaccagcggaaacttccacggtaattgcggctaaaattgcggaaattcttattgcagcgggggttccccctggggtcttccaatatgtacctggtaaggggtcggtggtgggttcccacatggtcaatcatcccgacgtacatttgattgctttcactggctccagggaagtgggctgtcgcatttacgccgatgccgctttggtacaaccaggacaaaaacacctcaaacgggtaattgcagaaatgggcggcaaaaacgccatcatcgttgatgaaagtgcggatctcgatcaagcggtggccggggcagtgtattccgcctttggttacacgggccaaaaatgttctgcctgttcccgggtggtggtgctttcccccgtacacgatgcctttgtggagcggtttgtagaggcaacccgttccctcaatgtgggccccaccgatgaccccagcacccaggttggtccggtaattgatgccaaggcccaagcccgcattcaggaatacatcgaacagggtaaggcggaatgtgaattggcgatcgcctgtgatgctcctagtgaaggctatttcgtcggtcccacggtgttcaaaaatgttgaccgccatgccaccattgcccaggaggaaatttttggtccagtggtaaccattattcgggcggccaattttgacgaagcgttggaaattgccaatggtaccgactacgctttaacggggggtctctattcccgtaccccagatcacattaatcgtgccgcggcggagtttgaagtaggcaatctttacatcaaccgcaccatcaccggggcgatcgtttcccgccaaccttttggggggttcaaaatgtctggggttggttccaaagcgggtggaccagattatttgttacagttcttagaaccacgccatgtaacggagaatattcaacggcaaggatttgcaccaattgagggggcagatcagtaa

SEQ ID NO: 12501 - protein, 990 aa, Synechocystis sp
MVAQIDSQQQYEQATQAIAKELLAQTREKRSLWDKIGDNLRLDDKLLDWTMGHPGLRVQLFKFIDCLPALQSNSEIANHLQQYMSEEEVELPEALKKLLNFADAHSTPAQIAAGTVSKATEQLAFKYIAGETIAQVIKTVERLRKEKMGFTIDLLGEAVITESEAAEYWQNYLDLMAQLSQQAKSWSKVPQIDQADGEILPQVQVSVKLTAFYSQFDPLDPAGSKAKVCERIRELLRRAQELGVAVHFDMEQYHYKDLILNILKELLVEEEFRSRTDVGITMQAYLRDSTEDLEALIPWAKHRGYPVTVRLVKGAYWDQETIKAQQNHWQIPVYVEKAQTDANYERMTRLLLENHEYLYAAIGSHNVRSQALACAIAEELNIPKRRYEMQILYGMGEPLARAIVKRGHRVRVYAPYGRLLPGMAYLIRRLLENTANSSFLRQNLEERPIEELIAPPQVKGINDLPTKGYGNAPDTDYADADLRQQAFQALTRVKQQLGKTYLPYINGEYVETANYIDSVNPCRPSQAIGKVGLISVEQADHALEIAKAAFPAWKKTPVRERCGILRKAADIMEERRHELNAWICLEVGKIIPQADAEVSEAIDFCRYYADEMERLDQGVNLDIPGETNRYFYQPRGIALVISPWNFPMAIAVGMTVAALVTGNCTLLKPAETSTVIAAKIAEILIAAGVPPGVFQYVPGKGSVVGSHMVNHPDVHLIAFTGSREVGCRIYADAALVQPGQKHLKRVIAEMGGKNAIIVDESADLDQAVAGAVYSAFGYTGQKCSACSRVVVLSPVHDAFVERFVEATRSLNVGPTDDPSTQVGPVIDAKAQARIQEYIEQGKAECELAIACDAPSEGYFVGPTVFKNVDRHATIAQEEIFGPVVTIIRAANFDEALEIANGTDYALTGGLYSRTPDHINRAAAEFEVGNLYINRTITGAIVSRQPFGGFKMSGVGSKAGGPDYLLQFLEPRHVTENIQRQGFAPIEGADQ

SEQ ID NO: 12502 - DNA, 4357 bp, Rhodobacter capsulatus
  CDS (966)..(4349)
gcatgcgatgaccgatgtgacgggcttcggccttggcggccatggtcttgaaatggcgcgcggatcgggctgcgacatcgagatttgctgggccgccgtgccgcgtctgcccggggtgatggaggccgccgccgagggccatctgaccggcgcttcggggcgcaactgggcgagttatggcgccgggatcgacctgcccgcggatctgggcgatctggaccgcgggatcctgaccgatccgcagacctcgggcgggcttctcgtcgcctgcgcgcccgaagcgctgggggaggtgcttgcgaccttccgccgtcacggcttcgatcacgccgcggcggtgggccgggtgctgggggaaagcgccacgccgcggctgcgcatcgtctgagctcacaggctggggctgttctgctccaccaccgcctccatcgcgacatagcttgaggttgccgcaacatgcggcagtgccgagagcttttcccccatgatcttgcggtattccgcaatgtcatggctgcgcaccttcagcaggtaatcaaagccgcccgcgatcatgtagcattcctcgacctcggggatttcgcgcacggcggcgttgaattgctccagcgctttttggcgcgtgtcgttcagcctcacctcgacataggtgacatggatcagccccagccggatcggcgagagcatcgcccggtagccggtgatcaggcccatctcctccattgcgcggatgcgggcggcgaccggggttttcgacagcccgaccttgcgagcaagctcggtgaccgggatgcgcgcattcgcgcaaagctcgtgcaggatgcgccggtcggtggcgtcgatcaggtcggtcatggtcttggcccctttttggtcggatcgcctgtgatgatggccttgaatggtcacatcgtccagcgccttgctggtatcatcggggaaacgcccaaggagtgccccgacccatgaccgacctttccgcccttggcccgaaggccaaattcgcccccgaggccgaggttctgcaggcgcttgtcgcgcaggcggcgctgccgcagccgcagcttgaccggatcgcggcacgcggcgccgatctggtggcgcggatccgggccgaggcgaagccgagcctgatggaacattttctggcgcaatacgggctgtcgacgcgcgagggcgtggcgctgatgtgtctggccgaggcgatgctgcgcgtgcccgacaccgccacgatcgacgcgctgatcgaggacaagatcgcgccctcggactggggcaagcatctgggcacggcggcctcctcgctggtcaatgcctcgacctgggccctgatgctgacgggcaaggtgctggatgacggcgcgggcggcatcgcgggcacgttgcggggcgccatgcggcggctgggcgagcccgtcatccgcgccgccgtgggtcaggcgatgcgcgagatgggccggcagtttgtcttgggcgaaaccattgaaaaggcgctggaacgcgccgaaaagcgcgaggcggagggctatacgttcagctatgacatgctgggcgaggcggcgctgacggcggcggatgccgagcgttaccggctggcctatgcgcaggcgatcacggcgatcggcaaggccgcgacccggggctcgatcgcggccaatccggggatttcgatcaagctttcggcgctgcatccgcgctatgaggtggcgcaggaggcgcgggtcatggccgagctggtgccggtcgtgcgcgatctggcgcgggcggcggcgcgggcggggattgcgctccatatcgacgccgaggaacaggaccggctggccttgtccctgcgggtgatggcggcggtgatcgccgatcccgagaccgcgggctgggagggctttggcgccgtcgtgcaggcctatggcaagcgcgccggggcggcgattgacgcgctcgccgcgatggcacgggcggccgggcggcgcatcaacatccggctggtgaagggcgcctattgggatgccgaaatgaagcgcgcccaggtcgaggggcacccgggctttccgcttttcacttcgaaaaccgggaccgatgtcgcctatatctgcctggctgcgaagctcttcgggctgaacgactgcatctatccgcaatttgcgacgcataatgcgcatacggtcgcggcggtgctggagatggcggcgggccgcccgttcgagttccagcgcctgcacgggatgggggcgcggctgcatgacatcgtgctgcgcgagaccggcgggcgctgccggatctacgcgccggtgggggcgcatcgcgacctgctcgcctatctggtgcggcggcttttggagaacggcgcgaattcgtctttcgtgaaccagatcgtcaatgaaagcgtgccgcctgccgaggtcgcggcctgtccctttgcggcgctgcccacggcgcgggcgccgcgcgggcttctggcgcctgcggatctgttcggcgcgggacgggtcaatgcgcaaggcttcgatctgagcgacccggaggttctggcgcggatcgaggcggcgcgggatgtgaccctgcccgatgcggcgccgatcgtggcggggccggtctcgggcaccttgcgcccggtgcggaacccggccaccggcgcggtcgtggcgcaggtgaccgaggccgatgcggcgacggtggctctggcgctggacgccgcgcaggtctggtcggcgcccgccgccacgcgggccgcggtgctgtgccgcgctgccgatctgtacgaggaaaacttcggcccgatctttgccgccttggcgcaagaggcgggcaagaccttgggcgatgccgtgtcggaactgcgcgaggctgttgatttcctgcgctattatgcggcagaaggggcggcggatacgcgccccccgcgcggtgccgtggtggcgatcagcccctggaactttccgcttgcgatcttcaccgggcaggtcgccgcggccctgatggcggggaatgcggtgctggccaagcccgccgaacagacgccgatcatcgcggcgctggcggtgcggctgctgcatcaggccggggttcccgagacggcgctgcagcttttgccgggcgatggccccaccgtcggcgccgcgctgacccgcgatccgcgcgtggcgggcgtggtcttcaccggctcgaccgagaccgcgcagatcatcgcccgtgccatggccgcgcatctggcgcccggcacgccgctgattgcggaaaccggcgggctcaatgcgatggtcgtcgacagcaccgcgctgcccgaacaggcggtgcgcgatgtcgtcgcctcggccttccgctcggccgggcaacgctgctcggcgctgcgctgtctttacgttcaggacgatatcgccccgcatctgatcgggatgctgaaaggcgcgatggaggagctggtttcgggcgatccggcgcggctttcgaccgatgtcggcccggtgatcgacgccgaggccaaggccgggatcgagacctatctggccgcgaacaaggcgcgcatcctgcatcgcagcaccgcgcccgagggcggccatttcgtcgccccggcgctgctgcaggtcggcggcattgccgatctggagcgcgaaatcttcggcccggtgttgcatcttgcaacattcgccgccgaggatctgcccgcggtgatcgcggcgatcaatgcgcgcggctacgggctgaccttcgggctgcattcgcgcatcgatgcccgtgtcgaaaccgtggccgagacgatccgggcgggcaacatctatgtgaatcgcaaccagatcggcgcggtcgtgggcagtcaaccctttggcggcgaggggctttccggcaccggcccgaaagcgggcgggccgctctatctgaaccgcttctacgcgccagagcctgtcgtggcggtcggcggctggacagaggctgcaacgcccatcctgcccgaagcgagagagacgcagctggacgagatcttcctgcccggcccgacgggcgagctgaaccggctgacgcggcatcaacgcggcccgatcctctgccttgggccgggggccgaagcagcttcggcgcaggcggcggcggttgtggcgctgggcgggcaggcggttcaggcaagcggggccgtgtcccccaaggctttggaaacgctgacacctttggccggtgtgctgtggtggggcgcggccgagatgggccgtgcctatgcgcaggcgctggcggtgcggcccgggccgctggtgccgctgatcactgccaaacccgatctggcccatgttgcgcatgaacgccatctctgcgtcgacacgacggccgcgggcggcaatgcggctttgctggccgggtgacttgccct

SEQ ID NO: 12503 - protein, 1127 aa, Rhodobacter capsulatus
MTDLSALGPKAKFAPEAEVLQALVAQAALPQPQLDRIAARGADLVARIRAEAKPSLMEHFLAQYGLSTREGVALMCLAEAMLRVPDTATIDALIEDKIAPSDWGKHLGTAASSLVNASTWALMLTGKVLDDGAGGIAGTLRGAMRRLGEPVIRAAVGQAMREMGRQFVLGETIEKALERAEKREAEGYTFSYDMLGEAALTAADAERYRLAYAQAITAIGKAATRGSIAANPGISIKLSALHPRYEVAQEARVMAELVPVVRDLARAAARAGIALHIDAEEQDRLALSLRVMAAVIADPETAGWEGFGAVVQAYGKRAGAAIDALAAMARAAGRRINIRLVKGAYWDAEMKRAQVEGHPGFPLFTSKTGTDVAYICLAAKLFGLNDCIYPQFATHNAHTVAAVLEMAAGRPFEFQRLHGMGARLHDIVLRETGGRCRIYAPVGAHRDLLAYLVRRLLENGANSSFVNQIVNESVPPAEVAACPFAALPTARAPRGLLAPADLFGAGRVNAQGFDLSDPEVLARIEAARDVTLPDAAPIVAGPVSGTLRPVRNPATGAVVAQVTEADAATVALALDAAQVWSAPAATRAAVLCRAADLYEENFGPIFAALAQEAGKTLGDAVSELREAVDFLRYYAAEGAADTRPPRGAVVAISPWNFPLAIFTGQVAAALMAGNAVLAKPAEQTPIIAALAVRLLHQAGVPETALQLLPGDGPTVGAALTRDPRVAGVVFTGSTETAQIIARAMAAHLAPGTPLIAETGGLNAMVVDSTALPEQAVRDVVASAFRSAGQRCSALRCLYVQDDIAPHLIGMLKGAMEELVSGDPARLSTDVGPVIDAEAKAGIETYLAANKARILHRSTAPEGGHFVAPALLQVGGIADLEREIFGPVLHLATFAAEDLPAVIAAINARGYGLTFGLHSRIDARVETVAETIRAGNIYVNRNQIGAVVGSQPFGGEGLSGTGPKAGGPLYLNRFYAPEPVVAVGGWTEAATPILPEARETQLDEIFLPGPTGELNRLTRHQRGPILCLGPGAEAASAQAAAVVALGGQAVQASGAVSPKALETLTPLAGVLWWGAAEMGRAYAQALAVRPGPLVPLITAKPDLAHVAHERHLCVDTTAAGGNAALLAG

SEQ ID NO: 12504 - DNA, 1647 bp, Schizosaccharomyces pombe
  CDS (1)..(1647)
atgtcacaatttgctgagttcaaattacctgccattaagaacgagcctcctaaacactatggtcccaatagtgctgacagagagggaatcgtcaaggcctacaaggagttagaggctgaattacctgtcactatccctgtcatcattgatggtaaggaagttgaaacgaataccattggtgagcagcgttgtccttttgagcacaaaaaggtcgttgctcgctatcaccgtgctggtgccaagcacgttgaagatgccattgaggcagcacttcgtggaaagaaggtctgggaatccttaccttttgctgaccgttctgccattttcttgaaggctgctcatttgataagcaccaagtaccgttacaagctcatggctgctacaatgattggccagggtaagaacatctggcaagctgaaattgacgctggaatggagatcattgacttccttcgcttcaataccaagtatgctagtgaattatatgccagccaacctcccgaaaacactcctggtgtctggaaccgtatggaatatcgtcctttggaaggtttcgtttatgccattactcctttcaactttacagctattgctggtaacttggctgctgccccccttctcatgggcaacgtcgttttaatgaagccttctgaccatgcagtcctttctagctacattgtttaccaaatcttccgtgaagctggtcttcccgctggagcacttcaatttatccctggtgacgctgttgaagtctccaaggtttgtttcaaccaccctgagtttgctggtcttcattttactggtagcacagccgtctttcgtagcctttggggaacaattggcgagaatgttgccaacggaaaataccgcacttaccccaaaatcgtcggtgagactggtggtaagaactttcatcttgtacattcttccgctgaaattaagagtgccgttgttaatgctgttcgtgctgctttcgaatatcaaggccaaaagtgctctgccctttctcgtctttacgtttctaagtatgcttgggaaaatggtttccgtgatgagcttaccaaacaggtcaagtctcttaaggtcggtgctcctttaactgattttgctaattttgtgggccctgttatccatcaagcaagctttaacaaactgaagaaggttcttgagagtgctgcttccgattctgaaattgaagttttggctggcggtaaagctgatgattccgaaggtttctttgttgaacctaccgttttactttctaaaaaccctaaacatgatatattcgttaacgaattgttcggccccgtactgtctgtttatgtatatgaggatgacaacttagacgctgtttgcgatctcatcgatactaccactccttatggtttaaccggatccatcttcgctcaggaccgtgttgttgtcagaaagttgactgaccgtctccgtaatgccgctggtaacttctatatcaatgataagtgtactggtgctgttgttggtgaacaaccttttggtggtgctcgtgccagtggtactaacgataaagctggtagcggaatgattctgtctcgattcgtttctcctcgctccatcaaagatacgtttgcttatgcagactctgttttatacccttccaacttttaa

SEQ ID NO: 12505 - protein, 548 aa, Schizosaccharomyces pombe
MSQFAEFKLPAIKNEPPKHYGPNSADREGIVKAYKELEAELPVTIPVIIDGKEVETNTIGEQRCPFEHKKVVARYHRAGAKHVEDAIEAALRGKKVWESLPFADRSAIFLKAAHLISTKYRYKLMAATMIGQGKNIWQAEIDAGMEIIDFLRFNTKYASELYASQPPENTPGVWNRMEYRPLEGFVYAITPFNFTAIAGNLAAAPLLMGNVVLMKPSDHAVLSSYIVYQIFREAGLPAGALQFIPGDAVEVSKVCFNHPEFAGLHFTGSTAVFRSLWGTIGENVANGKYRTYPKIVGETGGKNFHLVHSSAEIKSAVVNAVRAAFEYQGQKCSALSRLYVSKYAWENGFRDELTKQVKSLKVGAPLTDFANFVGPVIHQASFNKLKKVLESAASDSEIEVLAGGKADDSEGFFVEPTVLLSKNPKHDIFVNELFGPVLSVYVYEDDNLDAVCDLIDTTTPYGLTGSIFAQDRVVVRKLTDRLRNAAGNFYINDKCTGAVVGEQPFGGARASGTNDKAGSGMILSRFVSPRSIKDTFAYADSVLYPSNF

SEQ ID NO: 12506 - DNA, 3804 bp, Rhizobium meliloti
  CDS (130)..(3804)
tgtcgtggagaaacattcggccatcaggctaatttgccggatggatgttcggcgatggcacgcgtattttctgccacgacatcagggcgtcgaaagcgcccgctaccgttccgtggaggacagcgttcaatgagcccgaacccgcttcagaaacccgcgatcgacgccgcacctgcgcccttcgccgacttcgcaccgccagtccggccgcaaagcacgctgcgccgggcgatcacggccgcttaccgccgcccggaaacggaatgcctgccgcctctcgtcgaggcggccacgcaatcgaaggaaatacgggacgccgccgcaagcaccgcccgcaagctgatcgaggcgctgcgcggcaagcatagtggttccggcgtcgagggactggtgcaggaatattcgctttcgagccaggaaggcgtggcactcatgtgccttgcggaacggcctgtgcgcattcccgatacggcgacgcgcgacgcgctgatccgcgacaagattgccgacggcaactggaaatcgcatctcggcaggagccgttcgctcttcgtcaatgccgcgacctggggacttgtggtcaccggcaagctgacctcgacggtcaacgaccgcacgctcgcggcgcgcgtcacgcgtctcatctcgcgttgcggcgagccggtgatccggcgcggcgtcgacatggccatgcggatgatgggcgaacagttcgtcaccggcgagacgatcgaagcgctgaaacgttctaaggagctcgaggagaaaggcttcagctactcctacgacatgctgcgcgaacggcccacggccgccgacgccgaacgctattacagggactatgagagcgccattcacgcaactgcaaagcctcgcggccgcggcatctatgagggcccgggcatctccatcaagctctcggcgctgcatccccgctataggcaagccgcgcgcgtcatgggcgaattgttgccgagggtgaaggcgctcgctctcctcgccaagaattacgatatcggcctcaacatcgacgccgaggaagccgaccggctggaactgtcgctcgatctcctcgaggtgctctgcctcgacggcgatctctccggctggaacggcatgggcttcgtcgtgcaggcctatggcaaacgctgccccttcgttctcgacttcatcatcgatcttgcccggcgctccggccggcgcatcatggtgcggctggtgaagggtgcctattgggatgccgagatcaagcgggcgcagctcgacgggctcgcggatttcccggtcttcacgcgcaagatccacaccgacgtctcctatatgcctcggacccaagctgcttgccgcgaccgatgtggtgttccgcaattcgcgacacacaatgcccaaacgctcgccgccatctaccacatggccggcaaggactttcacgtgggcaaatacgaattccagtgcctgcacggcatgggcgagccgctttatgaagaggtcgtcggccgcggcaagctcgatcgcccctgccgcatctatgcgcctgtcggcacccatgagacgctgcttgcctatctggtccggcgcctcctcgaaaacggcgccaactcctccttcgtgcatcgcatcaacgacccgaaggtttcgatcgacgaactgatcgccgaccccgtcgaagtcgtccgcgccatgccggtcgtcggcgccaagcacgacaggatcgccttgccggccgtactcttcggcgatgcgcggaccaattccgccgggttcgatctttccaacgaggaaacgcttgcgtcgcttacggaagcgctgagggaaagcgcggcaatgaagtggaccgccctgccgcagttcgcaaccggccccgctgccggcgagacgcggacggttctgaaccccggcgaccatcgtgacgttgtcggctcggtgaccgagactcggaagaggacgcacggcgcgccgtgcgcttgccgcagacgcggcgccggattgggcggccgtctcgccgagcgggccgcctgcctcgaccgcgccgccgagctgatgcaggcccgcatgcccacgcttctcgggctgatcatccgcgaggcgggcaaatcggcgctgaacgccattgccgaggtgcgcgaggcgatcgatttcctgcgctactatgccgaacagacgcgccgcacgctcggcccggccacgccgctcggcccgatcgtctgcatcagcccatggaatttcccgctggcaatcttcaccgggcagatcgccgccgcactcgtcgccggcaatcccgtgctcgccaaacccgcggaagagacgccgctgatcgccgccgagggcgtgcgcatcctgcgtgaggccggcattccggcaagcgcgctgcagcttcttccgggcgacggacgcgtcggtgcggcgctggtcgccggccgagacgcgggcgtgatgttcaccggatcgacggaagtcgcgcggctgatccaggcacagcttgccgaccgcctttcgcccgccggccggccggtcccgctgatcgccgaaaccggtggccagaatgcgatgatcgtcgactcctcggcgcttgccggacaggtggtcggcgacgtgatcacctccgccttcgacagtgccggccagcgctgctcggcactgcgtgtgctgtgcctgcaggaggatgtggccggaccgcatcctgacgatgctgaagggcgcgctgcacgacactgcatatcggccgcaccgatcgtcttttccgtggatgtcggcccggtcatcacatcagaggcgaaggacaacatcgagaagcacatagagcggatgcgcgggctcggccgcaaggtcgagcagatcgggctcgcctcggagaccggagtgggcaccttcgtgccgccgacgatcatcgaactcgagaagctttccgatcttcaacgcgaggtcttcgggccggtgctgcacgtcatccgctaccggcgcgacgatctcgaccggctggtggacgacgtcaacgccaccggctacggcctgaccttcgggctccacacgcgcctcgacgagacgatcgcgcatgtgacgagccgtatcaaggcgggcaacctctacatcaaccgcaacatcatcggcgcggtcgtcggcgtccagcccttcggcggccgcggtctttccggtaccggtcccaaggccggcggtccgctttatctcggccgcctggttacgaccgcaccggtgccgccgcagcacagctcggtgcacacggacccggtccttctcgacttcgccaaatggctcgacggcaaaggcgcgcgcgcggaggtcgaagcggcccgcaacgccggcagcagctcggcacttggcctggatctggaactccccggccccgtcggcgaacgcaatctctatacgctccatgcgcgcggccgcatcctcctcgtgccggcgacggagagcggtctataccaccagctcgccgctgcgctcgcgaccggcaacagcgtcgcgatcgatgccgcctccggtctgcaggcttcgctgaagaacctgccgcagaccgtcggcctgcgtgtctcctggtccaaggactgggccgccgacggcccgttcgccggtgcgctggtcgaaggtgacgccgagcgcatccgcgcggtcaacaaggctatcgccgccctgcccggcccgctgctgctcgtgcaggccgcatcgagcggggagatcgcccgcaacccggacgcctattgcctgaactggctcgtggaagaggtttccgcctcgatcaacacggctgcagccggcgggaatgccagcctgatggcgatcggctga

SEQ ID NO: 12507 - protein, 1224 aa, Rhizobium meliloti
MSPNPLQKPAIDAAPAPFADFAPPVRPQSTLRRAITAAYRRPETECLPPLVEAATQSKEIRDAAASTARKLIEALRGKHSGSGVEGLVQEYSLSSQEGVALMCLAERPVRIPDTATRDALIRDKIADGNWKSHLGRSRSLFVNAATWGLVVTGKLTSTVNDRTLAARVTRLISRCGEPVIRRGVDMAMRMMGEQFVTGETIEALKRSKELEEKGFSYSYDMLRERPTAADAERYYRDYESAIHATAKPRGRGIYEGPGISIKLSALHPRYRQAARVMGELLPRVKALALLAKNYDIGLNIDAEEADRLELSLDLLEVLCLDGDLSGWNGMGFVVQAYGKRCPFVLDFIIDLARRSGRRIMVRLVKGAYWDAEIKRAQLDGLADFPVFTRKIHTDVSYMPRTQAACRDRCGVPQFATHNAQTLAAIYHMAGKDFHVGKYEFQCLHGMGEPLYEEVVGRGKLDRPCRIYAPVGTHETLLAYLVRRLLENGANSSFVHRINDPKVSIDELIADPVEVVRAMPVVGAKHDRIALPAVLFGDARTNSAGFDLSNEETLASLTEALRESAAMKWTALPQFATGPAAGETRTVLNPGDHRDVVGSVTETRKRTHGAPCACRRRGAGLGGRLAERAACLDRAAELMQARMPTLLGLIIREAGKSALNAIAEVREAIDFLRYYAEQTRRTLGPATPLGPIVCISPWNFPLAIFTGQIAAALVAGNPVLAKPAEETPLIAAEGVRILREAGIPASALQLLPGDGRVGAALVAGRDAGVMFTGSTEVARLIQAQLADRLSPAGRPVPLIAETGGQNAMIVDSSALAGQVVGDVITSAFDSAGQRCSALRVLCLQEDVAGPHPDDAEGRAARHCISAAPIVFSVDVGPVITSEAKDNIEKHIERMRGLGRKVEQIGLASETGVGTFVPPTIIELEKLSDLQREVFGPVLHVIRYRRDDLDRLVDDVNATGYGLTFGLHTRLDETIAHVTSRIKAGNLYINRNIIGAVVGVQPFGGRGLSGTGPKAGGPLYLGRLVTTAPVPPQHSSVHTDPVLLDFAKWLDGKGARAEVEAARNAGSSSALGLDLELPGPVGERNLYTLHARGRILLVPATESGLYHQLAAALATGNSVAIDAASGLQASLKNLPQTVGLRVSWSKDWAADGPFAGALVEGDAERIRAVNKAIAALPGPLLLVQAASSGEIARNPDAYCLNWLVEEVSASINTAAAGGNASLMAIG

SEQ ID NO: 12508 - DNA, 1509 bp, synthetic construct
  CDS (1)..(1509)
atgtcatcctcaggcacgccagacttacctgtcctactcaccgatttgaagattcaatatactaagatcttcataaacaatgaatggcatgattcagtgagtggcaagaaatttcctgtctttaatcctgcaactgaggaggagctctgccaggtagaagaaggagataaggaggatgttgacaaggcagtgaaggccgcaagacaggcttttcagattggatccccgtggcgtactatggatgcttccgagagggggcgactattatacaagttggctgatttaatcgaaagagatcgtctgctgctggcgacaatggagtcaatgaatggtggaaaactctattccaatgcatatctgaatgatttagcaggctgcatcaaaacattgcgctactgtgcaggttgggctgacaagatccagggccgtacaataccaattgatggaaatttttttacatatacaagacatgaacctattggtgtatgtggccaaatcattccttggaatttcccgttggttatgctcatttggaagatagggcctgcactgagctgtggaaacacagtggttgtcaaaccagcagagcaaactcctctcactgctctccacgtggcatctttaataaaagaggcagggtttcctcctggagtagtgaatattgttcctggttatgggcctacagcaggggcagccatttcttctcacatggatatagacaaagtagccttcacaggatcaacagaggttggcaagttgatcaaagaagctgccgggaaaagcaatctgaagagggtgaccctggagcttggaggaaagagcccttgcattgtgttagctgatgccgacttggacaatgctgttgaatttgcacaccatggggtattctaccaccagggccagtgttgtatagccgcatccaggatttttgtggaagaatcaatttatgatgagtttgttcgaaggagtgttgagcgggctaagaagtatatccttggaaatcctctgaccccaggagtcactcaaggccctcagattgacaaggaacaatatgataaaatacttgacctcattgagagtgggaagaaagaaggggccaaactggaatgtggaggaggcccgtgggggaataaaggctactttgtccagcccacagtgttctctaatgttacagatgagatgcgcattgccaaagaggagatttttggaccagtgcagcaaatcatgaagtttaaatctttagatgacgtgatcaaaagagcaaacaatactttctatggcttatcagcaggagtgtttaccaaagacattgataaagccataacaatctcctctgctctgcaggcaggaacagtgtgggtgaattgctatggcgtggtaagtgcccagtgcccctttggtggattcaagatgtctggaaatggaagagaactgggagagtacggtttccatgaatatacagaggtcaaaacagtcacagtgaaaatctctcagaagaactcattgtag

SEQ ID NO: 12509 - protein, 502 aa, synthetic construct
MSSSGTPDLPVLLTDLKIQYTKIFINNEWHDSVSGKKFPVFNPATEEELCQVEEGDKEDVDKAVKAARQAFQIGSPWRTMDASERGRLLYKLADLIERDRLLLATMESMNGGKLYSNAYLNDLAGCIKTLRYCAGWADKIQGRTIPIDGNFFTYTRHEPIGVCGQIIPWNFPLVMLIWKIGPALSCGNTVVVKPAEQTPLTALHVASLIKEAGFPPGVVNIVPGYGPTAGAAISSHMDIDKVAFTGSTEVGKLIKEAAGKSNLKRVTLELGGKSPCIVLADADLDNAVEFAHHGVFYHQGQCCIAASRIFVEESIYDEFVRRSVERAKKYILGNPLTPGVTQGPQIDKEQYDKILDLIESGKKEGAKLECGGGPWGNKGYFVQPTVFSNVTDEMRIAKEEIFGPVQQIMKFKSLDDVIKRANNTFYGLSAGVFTKDIDKAITISSALQAGTVWVNCYGVVSAQCPFGGFKMSGNGRELGEYGFHEYTEVKTVTVKISQKNSL

SEQ ID NO: 12510 - DNA, 1692 bp, Caenorhabditis elegans
  CDS (1)..(1692)
atgctctcattcgcagctcgacgctccttaatcacacaaaaatgcgccgccagcacgtacagcggtctaacatcggcggattttctcaaaaagaagacaaatgagccgattttagagtatcgaaaaggaagcaaagaacgacaggatttggaggcagcgttggcgttctacagcaagaacatcacagaagttccattgagaattggcgacaagaaaatcacgaataaattggagcagaagcaagttattccctctgaccatcgttcaacacttgccaagtacacttatgccaccggagagcaaattcaagaagccatcgatgtggctcttcaggcgagaggcgcctgggagagaaaaccgcttaaagaacgagctgaaattttgctccgcgccgccgatttggccgctggaaagtaccgaatgaagctgaacgcctccacgatgctcggccagggaaagaatattattcaggctgaaattgacgccgcctgtgagctcatcgatttcttccgattcaacgcggttttcgctatggagctggagcattatgagccgatttccacgaaaatcaccaaaaatacgatgcagttccgtggaatggagggattcgtcgccgcaatcgcaccgttcaattttacggcgatcggaggaaatttgccgactgctccggcgcttatgggtaacgtctccctctggaagccatcgaacaccgccgtgctctccaattatataatctacgaactcctcgaggaagctggtatgccacctggaattctctcattcttgccatcagatggccccgttttcggtgacgtcatcaccgcatctccacacttgagcgctgtcaatttcactggctccgtgccaactttcaagacgatttggagaaaagtcgccgagaatttggataactatgtgacttttccgaaactcatcggagaatgcggcggaaaaaacttccactttgtgcatccatccgcccacgtggacgctgtcgccgctggaaccgcccgttccgcctgggaatattcgggacaaaagtgctcggcgtgctccaggatgtacgcgccaaaatcgatttggccaaagattctcgagaaaatctcggcgattcacaaagagatcaagcttggagatgttcgcgatggatccgtctttctgtcggctgtgatcgatgataaggcgtttgccaggctcaaggcctacattgactttgcgaaaaccggagccgacggagcaaatgtggtgctcggcggaaaatgtgacgacaaaacgggatacttcatcgagccgaccctgatcactgtgacggatccgaagagcaagcttctcactgaggaaatgttcggaccggtggtgacggtactggtctacgaggattcgaaggttgatgaggtgctcgcgactgtgaaagacgcgacaccttatgggctgactggcgccgttttttcgcaggataaggagttcctttatagagctcgcgatgttctccgcgacgccgtcggcaacatgtacctcaacgacaaatcaactggatcaatcgtcggccagcagccattcggaggctccagattgtccggaaccaatgataaggccggtggcccccactatgggctccgatggacctcgccgctgacgattaaggagacgtcggtgtcattgactgactggaaatatccatcaatggaataa

SEQ ID NO: 12511 - protein, 563 aa, Caenorhabditis elegans
MLSFAARRSLITQKCAASTYSGLTSADFLKKKTNEPILEYRKGSKERQDLEAALAFYSKNITEVPLRIGDKKITNKLEQKQVIPSDHRSTLAKYTYATGEQIQEAIDVALQARGAWERKPLKERAEILLRAADLAAGKYRMKLNASTMLGQGKNIIQAEIDAACELIDFFRFNAVFAMELEHYEPISTKITKNTMQFRGMEGFVAAIAPFNFTAIGGNLPTAPALMGNVSLWKPSNTAVLSNYIIYELLEEAGMPPGILSFLPSDGPVFGDVITASPHLSAVNFTGSVPTFKTIWRKVAENLDNYVTFPKLIGECGGKNFHFVHPSAHVDAVAAGTARSAWEYSGQKCSACSRMYAPKSIWPKILEKISAIHKEIKLGDVRDGSVFLSAVIDDKAFARLKAYIDFAKTGADGANVVLGGKCDDKTGYFIEPTLITVTDPKSKLLTEEMFGPVVTVLVYEDSKVDEVLATVKDATPYGLTGAVFSQDKEFLYRARDVLRDAVGNMYLNDKSTGSIVGQQPFGGSRLSGTNDKAGGPHYGLRWTSPLTIKETSVSLTDWKYPSME

SEQ ID NO: 12512 - DNA, 4501 bp, Agrobacterium tumefaciens
  CDS (706)..(4392)
gaattcgcaaagcattagacgggtaggctcatgcctgcccgtttttcttcgccgcgtcgtcagataccggtctccttgaccgactgcatcacgacgaatgtcgaagtgttggaaaccgatggaaggctggagattttttcgccgagcacccttcggtatttgcggatatcgctggtgcgcaccttcagtagataatcgaaggcgccggcgatcatgtggcattcctccacctccttgatcttgcgcaccgccgtgttgaattcctcaagcgccttttcgcgtgtgtcggaaagcttgacctcggcgaaggcgatatggtcgacgcccagtttctgcggattgagcaccgcacggaagcccagaatataaccttcatccaccaaccgcttgagccgcgtctggcacggcgtcttggagaggccgacccttttcgacagttgcagcaccgacatgcgcccgtcttcgctgagggcctcgagaatcttgagatcgaagtggtccagatcgtctgttttatgactattagccatgtgatttcacgccaattttgaataataaaagttcatatggcctgttctatcctcaaaataggaccatagcaatttttacggcaatgatattgtacacagcagaatgacaagcggcgagcggaggacacgctgccgctgacagtctgtcttcaacagctttttcaggattttcagaatggccgatggtgcaagcaaagccgatgtaaacccgcagcagacggtgaacggtattttccagaattttgcaccgcccgtgcgcgagcagagcccgttgcgcaaagcaattaccgccgcttaccgccgcccagaggaagagtgcctggcgcctctgatcgatgctgcgaccgtcacgcccgagcaggccgcagccattcgcaccacggcaaccaagctgatcgaggcgttgcgcgccaagacgaaaggcaccggcgtcgaggggctggtgcaggaatattcgctctccagccatgagggcgtggccctgatgtgccttgccgaagcactgctgcgcattcccgacaccgccacccgcgacgcgctgatccgcgacaagatcgcccgcggcgactggaagtcccacatcggcggcgggcgctcgctgttcgtcaacgccgcaacctggggtcttgtcatcaccggcaagctgacctcgacggtcaatgacagcggcctttcggcggcgctgaccaagctgatcgccagggctggcgaacccgtcattcgccgcggcgtcgatatggcgatgcgcatgatgggcgaccaattcgtgaccggcgaaacgattggggaagcgatcaagcgctcgaaaccgctggaggaacagggtttccaatattcctacgacatgctcggcgaagcggcgaccaccgccaaggatgcggagcgttattacaaggactacgaaaacgcgatccacgccattggcaaggcctccgccgggcgtggcatctatggtggccccggaatttccatcaagctttcggccctgcatccgcgttatgcccgtgtgcaggcagagcgggtaatggcggagcttctgccgcgtgtgaaatccctgatgctgctcagcaagaaatacgatatcggcctcaacattgacgccgaggaagccgaccggctggaactgtcgctcgatcttctggaggaactggcgctcgacaaggatcttgccggttggaacggcctaggcttcgttgtgcaggcctatggccgccgctgcccctttgttctcgactacatcatcgatctcgcccaacgtgccggtcgccgcatcatggtgcgtcttgtcaagggcgcctactgggatgcggagatcaagcgcgcacaggtggacgggctggaagacttcccggtcttcacccgcaaagtgcacacggatgtctcctatatcgcctgcgcccgcaagctgcttgccgcgcgtgacgtcgtgttcccgcaatttgcgacccacaacgcccagtccatggctaccatctaccatctcgctggtccggacttcaaactcggtgattacgagttccagtgcctgcacggcatgggcgaaccgctttacagcgaagtcgtcggcaagaaaaagctcgatcgtccctgccgcttttatgcgcctgttggcacccacgagacgctgcttgcctatctcgtccgccgtctgctggaaaacggcgcgaactcctccttcgtcaaccgcatagcagatcccgccgtgccggtggcttccctgctggaagatccggtcaccgtggtcaaggcttaccccgttcccggcgcacggcacgaccgcattgctgcacccgctggtctcttcggccccgaacgggcaaattccgccggcctcgatctttcgaatgaaacggcacttgccgcgctggacaacgtccttaaggcaggtgcgacgacggaatggaaagccgcagcaccgcatgcaggcggaaagacacgcccggtcctcaatcccggcgaccacaatgatgtcgtcggttatgtaaccgaaccgacagaggccgatgtcgaagcggcaatgcaacgggccgcagcctccaactggtcttccacgccggtcgaggagcgcgccgcctgcctggagcgcgctgccgaccggatgcaggccgaaatgccggccctgcttggcctcatcatgcgcgaggccggaaaatccatgccgaacgccattgccgaggtgcgcgaagcgattgacttcctgcgttattacgcagcggaagcccggaagaccttcaaggccaacgagacaccgctcggcccggtcgtctgcatcagcccgtggaacttcccgcttgccatcttcatcggccaggtaacggcagcactggttgccggtaatccggtactggcaaagcccgccgaagaaaccccgttgatcgccgcgcagggggtacgcctgctgcatgaggcaggcgttccgcaggacgccgtgcagcttctgccaggtgacggcaagaccggtgcggcactagtcggctcagcgctcacggcgggtgtgatgttcaccggatccactgaagtggcgcggctcatccagggtcaactcgcaggccgggttctcgcaaacggccagcccgttcccctgattgccgagaccggcggccagaacgccatgatcgtcgattcctcagcgcttgccgagcaggtcgtcgccgacgtcatcgcctctgccttcgacagtgccggccagcgttgctcggcgcttcgcattctctgcctgcaggaagatgtggccgaccgaaccctgacgatgctgaagggcgcgctgcacgaattgcgcatcgggcgcaccgatagcctttccgtcgatgtcggccccgtgatcaccgctgaagctaaaggcatcatcgaaaaacacgttgacagcatgcgcgcactcggccaccggatcgagcagatttcgcttgccggcgaaaccggcaagggcaccttcgtgccaccgacaatcatcgagatgaaatcgctcgccgatcttaagaaagaggtcttcgggccggtgctgcacgtcatccggttcaagcgcgacaatctcgaccggctgatcgacgagatcaacgccaccggctatggcctgaccttcggcctgcatacgcgtcttgacgataccatccagcatgtcctgtcgcgcgtcgcggccggtaatctctatgtgaaccgcaacatcatcggcgccgtggtcggcgtccagccctttggcgggcgaggcctctccggcaccggccccaaggcgggcggtccgctctatctcggccgcgtcacacaaaccgcgccgaagatcgaccgcgttgccagccagcaggaccaggcggctgtcgatctcgcccgctggctggatgaaaacggccagagcgttgcagccgaagccgcaagacaggccgcagccctatccggcctcggtttcgaaaccgaactggcaggcccagtcggcgaacgcaacgtctatgcgctgcatccgcgcggcaaggtgctgcttattccggccacggagcaagggctctatcgccagcttgcggcagcgcttgccaccggcaactcggtcgttatcgataatgcgtcggggctggaaaagtcgatctacggattgccggcaaccgtcacctcgcgcatcacatgggctgacagctgggaaaaatccgcaccgttcgccggcgcgctgatcgagggcgatgcggaacgtgtcgttgcgatcaacaagaaaatccccgccctgcccggtcctctggttctggttcaggccgccacgacggaagcgcttgaccgtgaaacccagccctacaatctcgactggctggtggaagaagtctccgtcagcgtcaacacaacggctgccggcggcaatgccagcctgatgagcatcggctgattatctggttccggcagggtctcgaccctgccggtccatcacatcacccaccgatttcaccacgaccgaaaagctggttcagaacctgctcttcaagccgcgcgaattc

SEQ ID NO: 12513 - protein, 1228 aa, Agrobacterium tumefaciens
MADGASKADVNPQQTVNGIFQNFAPPVREQSPLRKAITAAYRRPEEECLAPLIDAATVTPEQAAAIRTTATKLIEALRAKTKGTGVEGLVQEYSLSSHEGVALMCLAEALLRIPDTATRDALIRDKIARGDWKSHIGGGRSLFVNAATWGLVITGKLTSTVNDSGLSAALTKLIARAGEPVIRRGVDMAMRMMGDQFVTGETIGEAIKRSKPLEEQGFQYSYDMLGEAATTAKDAERYYKDYENAIHAIGKASAGRGIYGGPGISIKLSALHPRYARVQAERVMAELLPRVKSLMLLSKKYDIGLNIDAEEADRLELSLDLLEELALDKDLAGWNGLGFVVQAYGRRCPFVLDYIIDLAQRAGRRIMVRLVKGAYWDAEIKRAQVDGLEDFPVFTRKVHTDVSYIACARKLLAARDVVFPQFATHNAQSMATIYHLAGPDFKLGDYEFQCLHGMGEPLYSEVVGKKKLDRPCRFYAPVGTHETLLAYLVRRLLENGANSSFVNRIADPAVPVASLLEDPVTVVKAYPVPGARHDRIAAPAGLFGPERANSAGLDLSNETALAALDNVLKAGATTEWKAAAPHAGGKTRPVLNPGDHNDVVGYVTEPTEADVEAAMQRAAASNWSSTPVEERAACLERAADRMQAEMPALLGLIMREAGKSMPNAIAEVREAIDFLRYYAAEARKTFKANETPLGPVVCISPWNFPLAIFIGQVTAALVAGNPVLAKPAEETPLIAAQGVRLLHEAGVPQDAVQLLPGDGKTGAALVGSALTAGVMFTGSTEVARLIQGQLAGRVLANGQPVPLIAETGGQNAMIVDSSALAEQVVADVIASAFDSAGQRCSALRILCLQEDVADRTLTMLKGALHELRIGRTDSLSVDVGPVITAEAKGIIEKHVDSMRALGHRIEQISLAGETGKGTFVPPTIIEMKSLADLKKEVFGPVLHVIRFKRDNLDRLIDEINATGYGLTFGLHTRLDDTIQHVLSRVAAGNLYVNRNIIGAVVGVQPFGGRGLSGTGPKAGGPLYLGRVTQTAPKIDRVASQQDQAAVDLARWLDENGQSVAAEAARQAAALSGLGFETELAGPVGERNVYALHPRGKVLLIPATEQGLYRQLAAALATGNSVVIDNASGLEKSIYGLPATVTSRITWADSWEKSAPFAGALIEGDAERVVAINKKIPALPGPLVLVQAATTEALDRETQPYNLDWLVEEVSVSVNTTAAGGNASLMSIG

SEQ ID NO: 12514 - DNA, 1545 bp, Symbiobacterium thermophilum
  CDS (1)..(1545)
atgattcctccctatcgccctgagcccctgagcgacttccgcaacccggcggtcacggccgccttcgagcaggccctggccgcggtgaagacgcagttggggaagcgctatcccatgatcatcgccggccggcgcgtggagtccggcgagagcatcgtgtccgtcaacccgtcgcagcccgaccaggtggtgggctacgcagcccggggcggcgtcgccgaggccgaggcggccgtgcaggcggccctggcggccttcccggcctgggccgatacgcccgccgatgtccgggcccggatcctgttcaaggccgcggcgatcatgcgccgccgccggcacgagctgtcggcctggatgtgccacgaggtgggcaagaactgggccgaggccgatgccgataccgccgaggccatcgacttcctggagtactacggccggcagatgctgaagctggccgcgccgcagccgctcactccctatcccggtgaggagaaccacctctactaccggccgctgggggtgggggtggtccacagcccgttcaacttcccgctggcgatcctgaccgggatgaccgcggcggccatcgtcacgggcaacaccgtggtggtgaagccctccaccgaggcgccggtgatcgcggccaagctctttgagatcctggaggaggccgggctgccggcgggcgtggccaacctgctgtacgccgacccggtggagatgggcgattacctcacgacccacaaggaggtccgcttcatcaacttcaccggctcgcgccaggtcggctgccacatctacgagctggccgcgaaggtgcagcccgggcaggtcttcctccggcgggtgatcgcggagatgggcggcaaggacgccatcatcgtcgacggcaccgctgacctggacgaggcggccgccggcatcgtgacctccgccttcggcttcagcggccagaagtgctcggcctgctcccgggcggtggtgaccgccgacgtgtacgaccaggtgctggagaaggtggtggccaggacccgggcgctgaaggtggggccggccactgagaaggacaccgacgtcggccccgtggcggcggaacggttccagaagaagatcctggagtatatcgagatcggcaaggccgagggccgcttggtgctgggcggaaacgccctgcccgggggctattacgtggagccgaccatcttcgcggacgtggccccgaccgcccgcatcgcccaggaggagatcttcgggccggtgctggcgttcatcaaggcgagggacttcgacgacgccctgcgcatcgccaacaacaccccgtacgggctgaccgggtccgtgtactcccggagccgggagaacctggagcaggcccgccgccggttccgggtcgggaacctctacttcaaccgcaagtccaccggcgcgatcgtcggcgtccaccccttcggcgggttcaacatgagcggcaccgattccaaggccggcggccccgactacctgctgctcttcacccaggcgcaggcggtgtcggagaagctgtag

SEQ ID NO: 12515 - protein, 514 aa, Symbiobacterium thermophilum
MIPPYRPEPLSDFRNPAVTAAFEQALAAVKTQLGKRYPMIIAGRRVESGESIVSVNPSQPDQVVGYAARGGVAEAEAAVQAALAAFPAWADTPADVRARILFKAAAIMRRRRHELSAWMCHEVGKNWAEADADTAEAIDFLEYYGRQMLKLAAPQPLTPYPGEENHLYYRPLGVGVVHSPFNFPLAILTGMTAAAIVTGNTVVVKPSTEAPVIAAKLFEILEEAGLPAGVANLLYADPVEMGDYLTTHKEVRFINFTGSRQVGCHIYELAAKVQPGQVFLRRVIAEMGGKDAIIVDGTADLDEAAAGIVTSAFGFSGQKCSACSRAVVTADVYDQVLEKVVARTRALKVGPATEKDTDVGPVAAERFQKKILEYIEIGKAEGRLVLGGNALPGGYYVEPTIFADVAPTARIAQEEIFGPVLAFIKARDFDDALRIANNTPYGLTGSVYSRSRENLEQARRRFRVGNLYFNRKSTGAIVGVHPFGGFNMSGTDSKAGGPDYLLLFTQAQAVSEKL

SEQ ID NO: 12516 - DNA, 1641 bp, Desulfotalea psychrophila
  CDS (1)..(1641)
atgaatcttttgaataatgcagtaattaatacaccaaaacctattaatgaaccaatttatgattatgctccgggtagtcctgaacgaagagcactgaaggctgccttagaagagatgagtcagcttgttctggatattcctcttattattaatggcgaggagattcgtacgggcaatatcggacaggtggttatgccccatgatcacagacatgtgatggctcactatcacagggcaggggagaaggcggtacggctggccattgacgcagctcttgctgctcagtccaggtggcagtccatgcgttgggaagaacgttgtgcaattttcctgaaggctgcggaacttattgcaggtaaatatcgttataaaattaatgccggagccatgcttgctggcgggaaaacagcctatcaggcggaaattgatgcggcctgtgaactcatagattttcttcgttttaatgtcagctatgcagagcagatttataagaatcagcctgtctcctccccgggagtgtggaactttgttcagtaccgtcctcttgagggatttgtctttgccgtaacgccctttaactttaccgctattgccggtaaccttcccactgccccggccctgatgggcaacaccgtggtgtggaaacctgcctcttccctggtttacaccccctatctcttgatggaaatttttgcggaggccggtctgcccccgggcgttatcaattttgttcccggtgcaggtgcctctgtgggtgatatctgtcttgccgaccctaatcttgcaggtattcattttaccggttcaacggctgtctttcagtttatgtggaagacagtgggtaataatattgcaagctataaatcttatcctagaattgttggagaaacaggaggtaaggattttatctttgcccattcatcggcagatccccagcaaattgttacagccattgttcgtggtgcctttgagtatcagggacaaaagtgctcagccgcatctcgggcctatattccccgtactctttggctggtgatagaggagggtttgaagagagaaattgcaaaaataaaggtgggggcaactacagatttttctaattttataagtgcagtaattgataagggtgcatttagttcgattactagttatattgacttcgccaaggaaaatgagggtggagatgtgatcattggcggcggttatgatgatagtcttggctactttatcgaaccaacggttattctcgcaactgacccctgttttgagacgatggttgaagagatttttggtcctgttataagcatctatgtctatgaagatgaggattatatggagaccttagctctctgtgatagtacatctgtctatgctttaaccggagcaattttttcacgggacagagaggcgaccagtactgccctgacgaaacttgagcatgctgcaggaaatttctatatcaatgataagccaacgggaccagtggttggtcagcagccttttggcgggggtagggcttcgggtaccaacgacaaggccggcgcagccagtaatctgatgcgttgggtgtcccctcgaaccgttaaagagacctttgtcgctgccacagagttttcctatccatttatggatgaaaattaa

SEQ ID NO: 12517 - protein, 546 aa, Desulfotalea psychrophila
MNLLNNAVINTPKPINEPIYDYAPGSPERRALKAALEEMSQLVLDIPLIINGEEIRTGNIGQVVMPHDHRHVMAHYHRAGEKAVRLAIDAALAAQSRWQSMRWEERCAIFLKAAELIAGKYRYKINAGAMLAGGKTAYQAEIDAACELIDFLRFNVSYAEQIYKNQPVSSPGVWNFVQYRPLEGFVFAVTPFNFTAIAGNLPTAPALMGNTVVWKPASSLVYTPYLLMEIFAEAGLPPGVINFVPGAGASVGDICLADPNLAGIHFTGSTAVFQFMWKTVGNNIASYKSYPRIVGETGGKDFIFAHSSADPQQIVTAIVRGAFEYQGQKCSAASRAYIPRTLWLVIEEGLKREIAKIKVGATTDFSNFISAVIDKGAFSSITSYIDFAKENEGGDVIIGGGYDDSLGYFIEPTVILATDPCFETMVEEIFGPVISIYVYEDEDYMETLALCDSTSVYALTGAIFSRDREATSTALTKLEHAAGNFYINDKPTGPVVGQQPFGGGRASGTNDKAGAASNLMRWVSPRTVKETFVAATEFSYPFMDEN

SEQ ID NO: 12518 - DNA, 1719 bp, Yarrowia lipolytica CLIB99
  CDS (1)..(1719)
atgctccgatccgtttcgaaattcagagctcccctcgcccgatcttgtcgatccttcaccaccattggagtgcctggtaccccaggaaacggtaccttctccatccctgaaatcaagaacgagcccgtccgagactttgagccgggatccaaggaccgccagggcgtcctcaactccctgaagacaatcaaggagtctgtgcacgagatccccgtcgtcattgccggccgaaagtactggtccgagaagaccggatcccagtacaacccctacgacaagaaggagatcgccaaggtgtcccaggccacccccgaggacgtgaccttcgccatcgagaccgccatgggcgccaagaaggaatgggccaacgcctccttcgccgaccgagccgccgtcttcctcaaggccgctgagctcatcgctggcaagtatcgatacgacatgcttgctgccaccatgattggccagggcaagaacgtgtaccaggccgagatcgacaccacctgcgagctggccgacttcctgcgattcaacgttaagtacgcccaggagctctaccaggtccaacccgccgagaactcgcccggcgtgtggaaccgagctgagtaccgagccctcgacggtttcgtctacgccgtcacccccttcaacttcaccgctatcgctgccaacctggttggtgcccccgccctcatgggtaacactgtcgtgtggaagccctctgccgccgccgtgctctccaactactacctctaccagattctgattgaggccggtctgcccgagggagtcgtctcctttgtgcctggtaacgcccaggaggtgaccaagaccgttcttggctccgaggactttgcttctctgcacttcaccggctctactggtgtcttccagactcttaaccaggagattgctgcccacctgcccgagtacaactcctacccccgaattgttggtgagactggaggaaagaactaccatctcattcaccctactgccgacctgtcccacgctgtcaagtccaccgtccgaggtgcctttgagtaccagggccagaagtgctctgcctgctcccgagcctacgtccccgagaacatgtgggaggacttcaagaaggagatccaggccgaagtcaagaacgtgaccgtcggtgatgccaccacccccgagggctttgcatcttttgccggtcccgtcattcatcagcagtcctttgacaagctcaagggtgtcatcgatgctgccaagaaggacgactctctcgagctggtcgccggaggcaagtacgacgactccaagggcttctacgtcgagcccaccatctacgtgacccgggatcccgatcaccccaacctcaagaccgagttcttcggccccattctcaccgtctgcctgtacgacgaggtcaagttcctcgagacctgcgaggttgtcgacaagaccaccaagtacggactcaccggcgccatcttcgcctccgaccgatacgtcatctcccaggcttccgagcgactgcgatactccgctggaaacttctacatcaacgacaagtgcactggtgccgttgttggccagcagtggttcggaggaggccgacagtccggaaccaacgacaaggctggttccggcaacattctgtctcgatttgtttctatccgaaacatcaaggagaacttccgagagaccgacaacatcctctacccttccaactacaactaa

SEQ ID NO: 12519 - protein, 572 aa, Yarrowia lipolytica CLIB99
MLRSVSKFRAPLARSCRSFTTIGVPGTPGNGTFSIPEIKNEPVRDFEPGSKDRQGVLNSLKTIKESVHEIPVVIAGRKYWSEKTGSQYNPYDKKEIAKVSQATPEDVTFAIETAMGAKKEWANASFADRAAVFLKAAELIAGKYRYDMLAATMIGQGKNVYQAEIDTTCELADFLRFNVKYAQELYQVQPAENSPGVWNRAEYRALDGFVYAVTPFNFTAIAANLVGAPALMGNTVVWKPSAAAVLSNYYLYQILIEAGLPEGVVSFVPGNAQEVTKTVLGSEDFASLHFTGSTGVFQTLNQEIAAHLPEYNSYPRIVGETGGKNYHLIHPTADLSHAVKSTVRGAFEYQGQKCSACSRAYVPENMWEDFKKEIQAEVKNVTVGDATTPEGFASFAGPVIHQQSFDKLKGVIDAAKKDDSLELVAGGKYDDSKGFYVEPTIYVTRDPDHPNLKTEFFGPILTVCLYDEVKFLETCEVVDKTTKYGLTGAIFASDRYVISQASERLRYSAGNFYINDKCTGAVVGQQWFGGGRQSGTNDKAGSGNILSRFVSIRNIKENFRETDNILYPSNYN

SEQ ID NO: 12520 - DNA, 1455 bp, Erwinia carotovora
  CDS (1)..(1455)
atgtcaggaaaccatttacaggatcatgaactgtttaaaacgggctacttcgttgcggggaagtggcagcagggcgcagccactttcgaggtggtgaatccggcgacgggtgagtctattgcccgtgtagcgaaagcgggaaagaaagagacgcaggcggcgattgacgctgcccatgccgcattccccgcctggaagcgtaaaaccgcgaaggaacgttctgaaattctgtatcgctggtacgagctgattctggagaataaacgctatctggcggagttgatgaccgccgagcagggcaaaccggtgcaggaagccgaaggcgaagtcgtttatgcggcgaatttcattcagtggtttgctgagcagggaaaacgcgtcaacggcgaaattattccccccgccaagcccggttcgaagatttatgccacgcgtgaacccgttggcgtcgttgttgcgattacgccgtggaatttcccgctggcgatgttgacgcgtaagttaggaccggcgctggcggcggggtgtaccggcgtgataaaacccgcgaacaacacgccgctgtctgcatttgcactgttggcgctggcacaacaggcgggcgtaccggatggtgtactcaacggtgtcgcgggcgatacgcaggcgattagcgataccgtcatggcgagcgataaagtacgcaaaatctcctttactggctcaacggcagtagggaaaacgctggtgcgcaacgccgccgacaccatgaagaaagtgtcgatggaactgggtggtaacgcgccttatatcgtgtttgatgatgcggatattcaggccgcggtgaaaggcgcgatcgctaaccgctttcgtaatgcaggtcaggtttgcgtcagcgccaatcggttttatattcaggacggcgtctatgatgagtttgtttccctgcttgcggaagaagtgaaaaagctgaaggtcggcaacggtatggatgacggtgtcgtgctcggcccactgattgacgaggctgctgtcgagaaggtggaaaaacacgtcaatgatgcggtggagaaaggcggcaaggcgcttgttggcggtaaacgacacaagctgggccacagcttttttgaaccgacagtgattgttgacgctaacgaagcgatgctgcttgcgcaggaagaaacctttggcccggttgccccgtgttttcgtttcaaaacggaagaagaggtgattcaacgcgccaacaatacgccgtttggtctggcggcttatttctacagccagaatttgcagcgtgtgttccgcgtggcagaagcgttggagagcggcatgattggcattaacgaatgtgccgtttcgactgagcttgcgccatttggcggcgtgaaagaatcggggctaggccgcgaaggctctgtactggggctagacgagtttctggaagtgaaaacctggcacgtgggcgggttgtga

SEQ ID NO: 12521 - protein, 484 aa, Erwinia carotovora
MSGNHLQDHELFKTGYFVAGKWQQGAATFEVVNPATGESIARVAKAGKKETQAAIDAAHAAFPAWKRKTAKERSEILYRWYELILENKRYLAELMTAEQGKPVQEAEGEVVYAANFIQWFAEQGKRVNGEIIPPAKPGSKIYATREPVGVVVAITPWNFPLAMLTRKLGPALAAGCTGVIKPANNTPLSAFALLALAQQAGVPDGVLNGVAGDTQAISDTVMASDKVRKISFTGSTAVGKTLVRNAADTMKKVSMELGGNAPYIVFDDADIQAAVKGAIANRFRNAGQVCVSANRFYIQDGVYDEFVSLLAEEVKKLKVGNGMDDGVVLGPLIDEAAVEKVEKHVNDAVEKGGKALVGGKRHKLGHSFFEPTVIVDANEAMLLAQEETFGPVAPCFRFKTEEEVIQRANNTPFGLAAYFYSQNLQRVFRVAEALESGMIGINECAVSTELAPFGGVKESGLGREGSVLGLDEFLEVKTWHVGGL

SEQ ID NO: 12522 - DNA, 3789 bp, Acinetobacter sp
  CDS (1)..(3789)
atgtcattggaatttggcatgaatatgatggataacgaccctcaaatggacacagcaaaacctcattttggatatatttcagaatttaaagaaaaaactgaactggagcagcatatcaacgatgcttggcgtcgtcctgaaccagaaacagttgaaactttgctacaagctgcctctatttccgatgaactcaatcataaaatttatgagctggcttttgagctagccaatggactacgtgagcgcaaaacctcttctggaaaagctggaatcgttcaaggacttttacaggagttttcgctttcttctcaggaaggtattgctttaatgtgcctggcagaagctctgctacgtattcccgatgcagccacccgagatttattgattcgagataaaatcaatcaaggcaactggaaagatcatgtgggtcagagtagcctgatgtttgtcaatgctgcagcttgggggctcatgctgacaggcaaacttatggaaacgccgaaacaaggcagtttgtctgggttattaacttcaattttggcacgtagtggtcgaggtgtgattcgtaaagcagtcgatgttgcgatgcgaatgatgggtgaacaatttgttacgggtgaaaccattgaagaagcgctcgacaatgcaaaatctcatgaacataaaggatttcgttattcctacgacatgctgggtgaagccgctctaacaacgcatgatgccgaacgttattttaatgattatacgcaggccatccatgcgattggtcaggcatcgaatggcaaaggtgtgtatgatgggccaggaatttcaattaaactttcggcactgcatccacgctaccaacgttcacaaattgcacgagtgcatgatgaactctatggcaaagtgtttaatcttgccttactctccaaaaaatatgatattggtttaaatattgatgctgaagaagcagatcgccttgagatttctttagaattacttgaacgtctatgctttgagcccgaacttgcagactggaaagggatcggttttgtgattcaagcttatcaaaagcgttgtttctacgtcgttgattatgtcgttgatctggcaaaacgtagcaaaaaacgcctgatgattcgtttggtgaaaggtgcgtattgggatagtgaaatcaaaaaagcacaaattgatggtatgcacgattatccagtctttacccgtaaagtgcatactgatttatcttatattgcttgtgccaaaaaactgttagcagcacctgagcaaatctatccgcagtttgccacgcataatgcacaatcacttgctacaatttatgaacttgctgatccaggcaaatattatgcaggccaatacgaatttcaatgcttacatggcatgggcgaacccttatacgaacaagtagtaggttctcgcagtgacaaaaaactggggattccatgccgtatctatgcacctgtaggcaatcatgaaaccttacttgcctatctggtacgtcgattgctcgaaaatggtgctaacacatcatttgtgaatcgtattgctgatcaaaatctaaaaattgaagatttaatacaatcaccttttgatgaaattgcaattaacgcacaacgtgaaggtcaagctggattaaaacatcctgccattcctttaccacacaatttgtatggatcattacgtcaaaattcgaaaggttttgatcttgccaatgatgcaactttgacagcgttgaacgaaactgcacagcagcttgaacataaagtctgggaaagtagacctttactagctcaaactgttgatcaaattgatgtaagcccgcaagcgttgctaaatccagcggttcatttagatattgtgggctacgttcaggaagcgacgcttgagcaagttgatgttgcgctcgaatctgcaactcaggctcagcaggcctgggcaaataccgagaaaaaccatcgggcagctacactcaagaaagcggcaaacttgatggaatcacgtatgcaggaactcatggtcttgctgtgccgtgaagcaggtaaaacttatgcaaacgcaatttcagaagttcgtgaagcagtagatttcttacgttattatgccactcaaatcgaaagtctgaagcctactgctcaaatcgagccgttaggtacagtcctgtgcattagcccctggaactttccattggcaatttttacaggccagattgctgcggcacttggtgctggaaactgtgtcattgcaaaacctgccgaacagacaccattaattgcggcacaggctgtacatattttacatgaagcgggtattcctaaaagtgtactacagcttttaccaggccgtggtgaaactgtcggcgccaagctcagtagtgaccagcgtattcaaggtgtcatgtttactggctcaacagaagttgccaagattttgcaaaaaacggtagcaaaacgactttcgccttctggtcatcctattcctttaattgcggaaactggtggtcaaaatgccatgattgtcgactcatctgccttgacagagcaagtggtgattgatgtcttgaattcagcttttgacagtgcaggtcaacgttgttcagctttacgtattttatgcgtacaagaagacaattcaaaaacactagtgactatgctcaaaggtgcaatgcagcaactgattatgggtaatccatttctgctcaaaaccgatattggtccagtgattgatttagaggcaaaacaaaccattgatcaacatattcagaaaatgcgcagcaaaggttatcccgtatatcagttaatttttaatcatgaagcagcatcgcaagcgcaattgagccaaggaacatttgtcactccaaccttgattgaattacccaatcttgatgatctggaacgtgaagtatttggccctgtgttacatgtcattacttataaacatggtgaaataaaacagctacttcaacatattaatgccaaaggttatggtttgactatgggattgcatactcgtatcgatgaaaccatcaatacagtggtacaacatgccgaagtgggtaatctttacattaatcgtaatatcgtgggtgcagtggtaggtgtacaaccatttgggggtgaaggcttatcaggtacagggcctaaagcaggtggtccgctttacttatatcgtttaatggcatcttgcacagaaaaagcaatacagactccttttggtataccagcagaaaatgttgcagtgccattaacgcaactctcgttattccgcgagttttcggcgtggattaaaaagcagtatcctgcccatcaacttcctaatgtcgtgccattgaatgtcggtcatgcttttgacctacaaggcccgacaggtgaaaccaaccgctatatgatgttgccacgtaaacgtatactggcaatagcaagtaatgaattggaactatgtcatcaaatgctggcgatatttgcagtaaacagtcaagttgctttattagaaagtaatccttctttgcaaaaatttggacaggatttacccacagtagttcgtcaggcgattattgaaattcgtggtgttgagcatggcgattttgatgcagtcttacatcatggttcaactgaggagttgcaagttttacaaacacagattgcaaatcgtcaaggtccgattgtcggcattactcatttgcaaaattcagagcaagtcattccactcgagcgtctcgtcattgaacatgctattagtgtaaatacggcagcggctggtggtaatgcgagtttgatgaccatgtcggagtaa

SEQ ID NO: 12523 - protein, 1262 aa, Acinetobacter sp
MSLEFGMNMMDNDPQMDTAKPHFGYISEFKEKTELEQHINDAWRRPEPETVETLLQAASISDELNHKIYELAFELANGLRERKTSSGKAGIVQGLLQEFSLSSQEGIALMCLAEALLRIPDAATRDLLIRDKINQGNWKDHVGQSSLMFVNAAAWGLMLTGKLMETPKQGSLSGLLTSILARSGRGVIRKAVDVAMRMMGEQFVTGETIEEALDNAKSHEHKGFRYSYDMLGEAALTTHDAERYFNDYTQAIHAIGQASNGKGVYDGPGISIKLSALHPRYQRSQIARVHDELYGKVFNLALLSKKYDIGLNIDAEEADRLEISLELLERLCFEPELADWKGIGFVIQAYQKRCFYVVDYVVDLAKRSKKRLMIRLVKGAYWDSEIKKAQIDGMHDYPVFTRKVHTDLSYIACAKKLLAAPEQIYPQFATHNAQSLATIYELADPGKYYAGQYEFQCLHGMGEPLYEQVVGSRSDKKLGIPCRIYAPVGNHETLLAYLVRRLLENGANTSFVNRIADQNLKIEDLIQSPFDEIAINAQREGQAGLKHPAIPLPHNLYGSLRQNSKGFDLANDATLTALNETAQQLEHKVWESRPLLAQTVDQIDVSPQALLNPAVHLDIVGYVQEATLEQVDVALESATQAQQAWANTEKNHRAATLKKAANLMESRMQELMVLLCREAGKTYANAISEVREAVDFLRYYATQIESLKPTAQIEPLGTVLCISPWNFPLAIFTGQIAAALGAGNCVIAKPAEQTPLIAAQAVHILHEAGIPKSVLQLLPGRGETVGAKLSSDQRIQGVMFTGSTEVAKILQKTVAKRLSPSGHPIPLIAETGGQNAMIVDSSALTEQVVIDVLNSAFDSAGQRCSALRILCVQEDNSKTLVTMLKGAMQQLIMGNPFLLKTDIGPVIDLEAKQTIDQHIQKMRSKGYPVYQLIFNHEAASQAQLSQGTFVTPTLIELPNLDDLEREVFGPVLHVITYKHGEIKQLLQHINAKGYGLTMGLHTRIDETINTVVQHAEVGNLYINRNIVGAVVGVQPFGGEGLSGTGPKAGGPLYLYRLMASCTEKAIQTPFGIPAENVAVPLTQLSLFREFSAWIKKQYPAHQLPNVVPLNVGHAFDLQGPTGETNRYMMLPRKRILAIASNELELCHQMLAIFAVNSQVALLESNPSLQKFGQDLPTVVRQAIIEIRGVEHGDFDAVLHHGSTEELQVLQTQIANRQGPIVGITHLQNSEQVIPLERLVIEHAISVNTAAAGGNASLMTMSE

SEQ ID NO: 12524 - DNA, 1725 bp, Candida glabrata CBS138
  CDS (1)..(1725)
atgttgagtgctaggctataccgtgggagtgtgaggggtgttgcgcagtttgcgcgggcttcgattccgaagcatgtgacgaatgaggctgtgaagccgtttagcaaggatgctgacagcaaggactgggatttgttgcgggcgtcgcttatgaagttcaagagctcgtcgcttgaagttccgctggttatcaacggggagcgtgtgtatgctgaccggggccgtgctgtcttcgcgcagaccaaccctgctaaccatgagcaagtgttggcgaacgtagcgcaggccactcgcgatgacattaagagtgcaattggtgctgctaagcaggccaaggagaagtggtacaacatgccgttctatgacagggctgcgatattcatgaaggcagccgatctgatctctacgaagtacaggtacgatatgctggccgctaccatgctgggccaaggtaagaacgtctaccaagcggagatcgactgtatcactgagctgtcagacttcttcagatttaacgtcaagtatgcggacgagttgtacgctactcagccaattgagtcagtgcccggtatttggaacagggcagagtacagacctttggaaggctttgtgtatgcggtgtctccattcaacttcacggctattgccgcaaacctgattggtgcaccagctctgatgggtaacactgtggtatggaaaccatctcaaaccgctgcgctatctaactacctgttgctgactgtcttggaagaagctggtctccccaagggtgttattaactttgtgccaggtgacccagtagaaattacagatgaagtgttggcaagcagggatttctccgctttgcacttcacaggctctacagcagtgttcaagcaactgtacggtaagatccaaagcggcgttgccgaaaacaaatacagagactacccacgtatcgttggtgaaacaggtggtaagaactaccacttggttcacccttctgccaatgttccacacgcagtctttaacacgatcagaggtgcctttgagttccaaggccaaaaatgttctgctacttctagattgtacttgccaaagtccatgagcgaggaattcttcagagacatgtttggcacgttaagcaacaataaggttgttccagttaacacttctgctagtgccatcagcggtggtaacctgcacggattcatgggcccggttatccacgagcaaagtttcaacaagctatctgctgccatcgaggaagccaagaaagaccctgaactagagattctgtacggtggacaatacgataagagccaaggctggtacattggcccaacgattatcaggaccacaaacccaaaccataaattcttgaccacggagttctttggtcctatattgaccgtttacgagtaccaggactcccaattcaaggatatctgcgaactgataaatgaaaccggcgagtatggtttgaccggttccatcttctccagagaccgtgacgctataatctacgcctctgagaagctaaggttcagcgccggtaacttctacatcaatgacaaatgtacaggtgcagttgtagcacagcagtggttcggaggtgcacgcatgagcggtacaaacgacaaggccggtgggccaagcatcctaagcagattcgtgagtatcagaagcatcaaggagaacatgcaagaaatcaccgacttcagatacccatccaactacgagtaa

SEQ ID NO: 12525 - protein, 574 aa, Candida glabrata CBS138
MLSARLYRGSVRGVAQFARASIPKHVTNEAVKPFSKDADSKDWDLLRASLMKFKSSSLEVPLVINGERVYADRGRAVFAQTNPANHEQVLANVAQATRDDIKSAIGAAKQAKEKWYNMPFYDRAAIFMKAADLISTKYRYDMLAATMLGQGKNVYQAEIDCITELSDFFRFNVKYADELYATQPIESVPGIWNRAEYRPLEGFVYAVSPFNFTAIAANLIGAPALMGNTVVWKPSQTAALSNYLLLTVLEEAGLPKGVINFVPGDPVEITDEVLASRDFSALHFTGSTAVFKQLYGKIQSGVAENKYRDYPRIVGETGGKNYHLVHPSANVPHAVFNTIRGAFEFQGQKCSATSRLYLPKSMSEEFFRDMFGTLSNNKVVPVNTSASAISGGNLHGFMGPVIHEQSFNKLSAAIEEAKKDPELEILYGGQYDKSQGWYIGPTIIRTTNPNHKFLTTEFFGPILTVYEYQDSQFKDICELINETGEYGLTGSIFSRDRDAIIYASEKLRFSAGNFYINDKCTGAVVAQQWFGGARMSGTNDKAGGPSILSRFVSIRSIKENMQEITDFRYPSNYE

SEQ ID NO: 12526 - DNA, 1545 bp, Staphylococcus aureus
  CDS (1)..(1545)
atggtagtagaatttaaaaatgaacctggttacgatttttcagtccaagaaaatgtggatatgtttaagaaagcattgaaagacgtggaaaaagaattaggtcaagacataccattagtgattaatggagagaagattttcaaagatgacaaaattaaatcaatcaatcctgcagacacatcacaagtgattgcaaatgcatcaaaggcaacaaaacaagatgttgaagatgcgtttaaagcagcaaacgaagcttataaatcttggaaaacatggtcagcaaatgatcgtgcagagcttatgttacgtgtttcggcaattattcgtcgtcgaaaagcggaaattgcagcaattatggtttatgaagcaggtaagccatgggatgaagcagttggtgatgcagctgaaggtattgattttattgaatactatgcacgttcaatgatggacttggctcaaggtaagccagtacttgatcgtgaaggtgaacacaataaatatttctataaatcaattggtacaggtgttacaattccgccgtggaacttcccgtttgcgattatggctggtacaactttagcaccagttgtggcaggtaatatagtgttattgaaacctgctgaggatacaccttatatcgcttataaattaatgggaattttagaagaagcaggattaccaaaaggcgtagttaactttgttcctggtgatccgaaagaaattggtgattacttagttgatcataaagatacgcatttcgttacatttacaggatcacgtgcgacaggtactagaatttatgaacgtagtgccgttgttcaagaaggtcaaaacttcttgaaacgtgttatcgctgaaatgggtggtaaagatgccattgtagttgatgaaaatattgatacagatatggcagcagaagctattgtaacgtcagcatttggtttttctggtcaaaaatgttcagcatgttcacgtgcaattgtgcataaagacgtttatgacgaagtattagagaaatcaatcaaattaacaaaagaattaacgttgggcaatactgtagacaatacgtatatgggcccagttattaataaaaaacaatttgataagattaaaaattatattgagattggtaaagaagaaggtaaattagaacaaggtggcggcactgatgattcaaaaggttactttgtagaaccaacaatcatttcaggacttaaatctaaagatagaatcatgcaagaagaaatttttggtccagttgttggctttgtgaaagttaacgattttgatgaagcaattgaggttgcaaatgatacagattacggtttaactggtgcagtgattacaaataatcgcgagcattggattaaagcggtaaacgaatttgatgtaggcaatttataccttaacagaggctgtacttcagcagttgttggataccatccatttggtggtttcaaaatgtcaggtacggacgctaaaacaggtagtccagactacttattacacttcttagaacaaaaggttgtttcagaaatgttctaa

SEQ ID NO: 12527 - protein, 514 aa, Staphylococcus aureus
MVVEFKNEPGYDFSVQENVDMFKKALKDVEKELGQDIPLVINGEKIFKDDKIKSINPADTSQVIANASKATKQDVEDAFKAANEAYKSWKTWSANDRAELMLRVSAIIRRRKAEIAAIMVYEAGKPWDEAVGDAAEGIDFIEYYARSMMDLAQGKPVLDREGEHNKYFYKSIGTGVTIPPWNFPFAIMAGTTLAPVVAGNIVLLKPAEDTPYIAYKLMGILEEAGLPKGVVNFVPGDPKEIGDYLVDHKDTHFVTFTGSRATGTRIYERSAVVQEGQNFLKRVIAEMGGKDAIVVDENIDTDMAAEAIVTSAFGFSGQKCSACSRAIVHKDVYDEVLEKSIKLTKELTLGNTVDNTYMGPVINKKQFDKIKNYIEIGKEEGKLEQGGGTDDSKGYFVEPTIISGLKSKDRIMQEEIFGPVVGFVKVNDFDEAIEVANDTDYGLTGAVITNNREHWIKAVNEFDVGNLYLNRGCTSAVVGYHPFGGFKMSGTDAKTGSPDYLLHFLEQKVVSEMF

SEQ ID NO: 12528 - DNA, 1485 bp, Bacillus thuringiensis
  CDS (1)..(1485)
atgagtcaactagctgtaaatcttcatgaaaaggtagaaaagtttcttcaaggtacgaaaaagttatatgtgaatggatcattcattgaaagcgcttccggtaagacgtttaatacacctaatccagcaactggcgaaacacttgccgtcgtttctgaagccggtcgcgaagatattcataaagctgtagttgcagctcgcatggcttttgacgaaggtccttggtctcgcatgagcactgcggagcgaagccgtcttatgtacaagttagctgatttaatggaagaacataaagaagagcttgcacagctcgagacgttagataacggaaagccaatccgtgaaacaatggcagcagacataccacttgcaattgagcacatgcgctattatgctggctgggcgacaaaaatcgttggtcaaacaatccctgtttccggtgatttctttaactatacacgccatgaagctgttggtgtcgttggtcaaattatcccttggaacttcccgcttcttatggccatgtggaaaatgggagcagcgcttgctacaggatgtacaatcgttttaaaacctgcagaacaaactccactatctgctctatacttagctgaattaattgaagaagctggattcccgaaaggcgttattaatatcgttcctggattcggtgaatcagctggacaagctctcgttaatcatccactcgttgataaaattgcatttaccggttctactccagtcggtaaacaaattatgcgacaagcatctgaatccttgaaacgtgttactttagagcttggtggtaaatcaccgaacattattttaccagacgctgatttatctcgcgcaattcctggtgcactttctggtgttatgtttaaccaagggcaagtatgctctgctggatcacgcctatttgttccgaagaaaatgtatgataatgtcatggctgatctcgtcctctattctaaaaaactaaatcaaggtgtcggtcttgaccctgaaacgacaattggtcctctcgtttccgaagaacaacaaaaacgtgtaatgggctacattgaaaaagggattgaagaaggcgctgaagtactttgcggaggaaataatccattcgatcaaggctacttcatttctcctacagtattcgctgacgtaaatgacgaaatgacaatcgcaaaagaagaaattttcggtccagttatttctgcaataccttttaacgatattgatgaagtaattgaacgagcaaataaatcacaattcggcttagcggctggtgtgtggacagaaaatgttaaaacagcacactatgttgcaagtaaagtacgtgcaggtacagtatgggttaactgttacaacgtctttgatgcagcatctccatttggaggatttaaacaatctggtctcggccgtgaaatgggatcttacgcattaaataactatacagaagtgaagagcgtttggcttaacttaaattaa

SEQ ID NO: 12529 - protein, 494 aa, Bacillus thuringiensis
MSQLAVNLHEKVEKFLQGTKKLYVNGSFIESASGKTFNTPNPATGETLAVVSEAGREDIHKAVVAARMAFDEGPWSRMSTAERSRLMYKLADLMEEHKEELAQLETLDNGKPIRETMAADIPLAIEHMRYYAGWATKIVGQTIPVSGDFFNYTRHEAVGVVGQIIPWNFPLLMAMWKMGAALATGCTIVLKPAEQTPLSALYLAELIEEAGFPKGVINIVPGFGESAGQALVNHPLVDKIAFTGSTPVGKQIMRQASESLKRVTLELGGKSPNIILPDADLSRAIPGALSGVMFNQGQVCSAGSRLFVPKKMYDNVMADLVLYSKKLNQGVGLDPETTIGPLVSEEQQKRVMGYIEKGIEEGAEVLCGGNNPFDQGYFISPTVFADVNDEMTIAKEEIFGPVISAIPFNDIDEVIERANKSQFGLAAGVWTENVKTAHYVASKVRAGTVWVNCYNVFDAASPFGGFKQSGLGREMGSYALNNYTEVKSVWLNLN

SEQ ID NO: 12530 - DNA, 1425 bp, Bacillus thuringiensis
  CDS (1)..(1425)
atgaaaaagcatttatatataaatggagattggaagtctgtaaacacgtataaaccattatacgcaccatattctgaagaaacattagcggaaattgcgcaaggaacggaagaagatgtaaaagaggctgttgctgctgcaaaaaatgccatgaaagaaatgaatacattatctgcatatgatcgtgcgactattttagagaaagtcgcacaaaaaatggatgaaagaagagaagaatttgcagagattattgcaaaagaggctgcaaaaccaatacgtgctgcaaggggagaagtagatcgtaccgttcaaacatataaatttgcagctgaagaagcgaagcgtatatacggtgagacactgccacttgatgcagcacctggtgcagatgggcgtattgcatacacaatacgaaaaccgattggggttataggggctattacaccatttaattttccattaaatttagtggcacataaagttggtcctgcaattgctgctggaaatacagttgtattaaaaccagctgatcaaacgcctctatcatcttacgcattaatcgaactatttgaagaggcaggattgccaaaaggagctttaaatattatttctggccccggttcaactgttggtgaagcaatagttacaaatgatgatgtggcttccattacttttacaggaagtccgaaagttggaattggaattaaggcaaaggctgggttaaagcgagttacgttagaactaggatcaaatgctgcagttattattgatgaagatgtagaattaacagatgaattaattgaacgtgtaaaatggggagcatttgttaataatggacaagtttgtatttcggtgcaacgtgtttttgtacatgaagagagaatggatgactttctatcaaagttacggaaagcgatggaaacagttgttgttggtgatccgctgattgaggaaacggatgtatcagctttaatttcgaaaaaagatgtcgagcgtatcgataactgggtgcaagaagcggttaaagaaggagcaaacgttttatatggcggtaacaaacgtgatgaaagggtttttgaaccaactgtattaacaaatgtgccggagcatgtatctgtacagtgccaagaagtattcggcccacttatgacagtaaatacatttaaagaatttgatgaggccatagagcaagtaaataattcacgttacggtctacaagcaggcgtatttactaataatttgtttaaagcaatgcgtgcaattgatgaattagaagttggtggtgtcatgataaatgatattccgacgtttagagtagatcatatgccttacggtggtgtgaaagaaagcggtacagggcgtgaaggaattaaatatgcaatagaagaaatgacagaaatgaaattagtatgtattaaaaaataa

SEQ ID NO: 12531 - protein, 474 aa, Bacillus thuringiensis
MKKHLYINGDWKSVNTYKPLYAPYSEETLAEIAQGTEEDVKEAVAAAKNAMKEMNTLSAYDRATILEKVAQKMDERREEFAEIIAKEAAKPIRAARGEVDRTVQTYKFAAEEAKRIYGETLPLDAAPGADGRIAYTIRKPIGVIGAITPFNFPLNLVAHKVGPAIAAGNTVVLKPADQTPLSSYALIELFEEAGLPKGALNIISGPGSTVGEAIVTNDDVASITFTGSPKVGIGIKAKAGLKRVTLELGSNAAVIIDEDVELTDELIERVKWGAFVNNGQVCISVQRVFVHEERMDDFLSKLRKAMETVVVGDPLIEETDVSALISKKDVERIDNWVQEAVKEGANVLYGGNKRDERVFEPTVLTNVPEHVSVQCQEVFGPLMTVNTFKEFDEAIEQVNNSRYGLQAGVFTNNLFKAMRAIDELEVGGVMINDIPTFRVDHMPYGGVKESGTGREGIKYAIEEMTEMKLVCIKK

SEQ ID NO: 12532 - DNA, 1548 bp, Picrophilus torridus
  CDS (1)..(1548)
atgttctataatgaaaacacatacataaaaatgaaggcctctgggaaagaggatgaatttgataaaaagtatgaggaggcacttgaatctgtaaagggctattttggaaaggagtacccaaatataataataaatgacgtaaatgaggagaaaaaaataaaggacatatcaccaatagatgagagcgagcttgcagagtttcagcttgcatcaaaggagagcattgaaagggccatagatattttaagttctggttataaaaaatggtttcaggtaccgtatgatgcaagggtgaatataatagaaaaagctttgaggatgctccaggaaagaaaatttgaatttgccgcattgcttacatatgaaaacggaaaaaacagatacgaggccatgggtgatgttgatgaggcaatagactttatgaaatattattctatgagcatgatagagaaccacgggttcataaaatttacaggaaaggcatatgaaaacgaagaatcaatgagttttatgaaaccatatggtctttttgcagttatatccccatttaatttcttttccataggtgttggcatgaccaccggacccttgataacaggcaatgccgtgctgttaaaaccaagcagcgatataccattatcgctttatctgtttgtaagattattaatcgaggcgggcgttaataaagatgcaatagcctttgtctctggaacaggaagcctcataggcgatataataacagaaaataaaaaggtctccggtgtggtttttacaggctcaagggatgttggcctcagaatatttaaaaatgccacaaagtatggcccaaagcctgttataacagaaatgggaggcaaggacgccgttataatatcagataaggctgatttaaaaaaggccgttgagggctgtgtaagatcatccttcggctttgcaggccagaaatgcagcgcgtcatcattaatatatgtccatgaaaagatctacgatgagttcattgaaaaatttgttgagagaacaaagagtataaaggttggtgacccaagggagaaatcaacgtttatgaaccctgttgttaacaaagatgcatatgaaaaatacaagaagatgtgtgatacatacttcaaggaggggaaaatattaacaggcgcaagaatcatggatagaaagggttactacgttgagcccacagtaatcacagatttaaaaccggattcttacatagtaaggaatgagatatttttacctgcagttgcaattataaaggtaaaatccatagatgacgcgataaatgatataaattctatggactatgggcttacaggtggaattttcacagaggatccagaggagtaccagcattactttgaaagtgtggatgttggcgttgtatacgcaaacagggcagcaggtgcatcaaccggtgcaatggtgggctcacagccattcgtcggctggaagctaagtggaagcactggcaagggaactggatcattttattatctaacgcagtttttaagggagcagtccattaccatagcccactaa

SEQ ID NO: 12533 - protein, 515 aa, Picrophilus torridus
MFYNENTYIKMKASGKEDEFDKKYEEALESVKGYFGKEYPNIIINDVNEEKKIKDISPIDESELAEFQLASKESIERAIDILSSGYKKWFQVPYDARVNIIEKALRMLQERKFEFAALLTYENGKNRYEAMGDVDEAIDFMKYYSMSMIENHGFIKFTGKAYENEESMSFMKPYGLFAVISPFNFFSIGVGMTTGPLITGNAVLLKPSSDIPLSLYLFVRLLIEAGVNKDAIAFVSGTGSLIGDIITENKKVSGVVFTGSRDVGLRIFKNATKYGPKPVITEMGGKDAVIISDKADLKKAVEGCVRSSFGFAGQKCSASSLIYVHEKIYDEFIEKFVERTKSIKVGDPREKSTFMNPVVNKDAYEKYKKMCDTYFKEGKILTGARIMDRKGYYVEPTVITDLKPDSYIVRNEIFLPAVAIIKVKSIDDAINDINSMDYGLTGGIFTEDPEEYQHYFESVDVGVVYANRAAGASTGAMVGSQPFVGWKLSGSTGKGTGSFYYLTQFLREQSITIAH

SEQ ID NO: 12534 - DNA, 1482 bp, Picrophilus torridus
  CDS (1)..(1482)
atgaaaatttacatagatggtgagtggagggattcatccagcggcgagaccataaaaaagtacaatccaagcacaggcgaggttcttgatacgtttccggcggcaacaaggaatgatgttgatgctgcaattgactctgcagaggatgcattcaaaagatggagcgacatgacgtcaatggaaaggtcaaaaatactttacaaagcccttgaattaatatcaaaggataaagatcagctaacggatcttttaattaaagagaacggaaaggtgaaaagggaggccatggatgaaaccgagggcgttatagaccagttacagtattacacggaattcgagagaaagctaaccggtgacatcgttgaaggcacaagcaataaaagaaagatatttcaatacaaggttccatatggaatagtaatagcaataacgccatggaacttccctgcagcaatggtgataagaaagcttgcgcctgcacttttaactggaaacaccgtaatattaaagccaagctcagacacaccattaactgcggaatggctcgtgaaaaaatttgttgatgccggaataccaaagggcgttttaaatctaataacaggcaagggctctgaaataggtgattacatcgttgagcataaaaaggtatcattgataacaatgaccggatcgacatccacgggccagaggatcatggaaaaggcatcaaagaacatggcaaaattgatacttgagctcggcggaaaggcaccgttcatggtctggaaggacgcaaacattgaaagggcattaaagtccctggtctgggcaaagtatttaaacgttggccagtcatgcatagccgctgaaagattatacatacacgaggatatatacgatgaatttatgaaaaagttcattgaggtaagcaaaagaataaaacttggagacccggagagctctgacatgggcccattgataaataaaagcgcggttgaaacaacggaaaaatacgttgatattgcaaggagctcgggatataaaatactccttggcggcaaaaaaccggagctatcaggaaaatacaaaaatggatacttctatgaaccgacgataatagaaaacgttccacaggattcgccattattccaggaggagatctttggcccggtcataggcgcagagagtgtatccagtgtcgatgaattatacgaaaaggcaaatgattcaaagtacggacttgcctcttatttattcacagaggatcctgagttaatatttgaggcatccgagaagataaggttcggtgagttgtacgtcaacatgccagggcctgaggcatcacaggggtatcatacaggattcagattgacaggacaggccggcgagggaagcaagtacggaatctcagaatacctaaagttaaagaacgtctacgttgattactcaagggggaatctaagcataagcactgtaaacgacgacctattcaaaaatctttaa

SEQ ID NO: 12535 - protein, 493 aa, Picrophilus torridus
MKIYIDGEWRDSSSGETIKKYNPSTGEVLDTFPAATRNDVDAAIDSAEDAFKRWSDMTSMERSKILYKALELISKDKDQLTDLLIKENGKVKREAMDETEGVIDQLQYYTEFERKLTGDIVEGTSNKRKIFQYKVPYGIVIAITPWNFPAAMVIRKLAPALLTGNTVILKPSSDTPLTAEWLVKKFVDAGIPKGVLNLITGKGSEIGDYIVEHKKVSLITMTGSTSTGQRIMEKASKNMAKLILELGGKAPFMVWKDANIERALKSLVWAKYLNVGQSCIAAERLYIHEDIYDEFMKKFIEVSKRIKLGDPESSDMGPLINKSAVETTEKYVDIARSSGYKILLGGKKPELSGKYKNGYFYEPTIIENVPQDSPLFQEEIFGPVIGAESVSSVDELYEKANDSKYGLASYLFTEDPELIFEASEKIRFGELYVNMPGPEASQGYHTGFRLTGQAGEGSKYGISEYLKLKNVYVDYSRGNLSISTVNDDLFKNL

SEQ ID NO: 12536 - DNA, 3126 bp, Photobacterium profundum
  CDS (1)..(3126)
atgttcaatgcggcagatgtacttcagccatcctttattgagcgtccgttaaacgaaatctggacactgatttcgccgctctattctgttgatgagtcgttatggctagagcagctattacctttggctgagccgtcagatatagaacgtaaacacacgacagataaagctgctgaacttattcagcgcgtgcgtgccgataaaaatgcgattcaaatgattgatgcattgttattggagtacagcctagataccaaagaaggtattttgctgatgtgtttagcagaagccttgatgcgtattcctgatgccgcaacggctgatgcccttattcgcgacaaactcagtgttgctgattggaagtctcaccttaaaaattctgattctctgtttgtgaatgcctctacttggggtctgatgctgacgggaaaagtggtcacaatggatgccaaagaagacggtaagccatctcatgtgattaatcgcttagtgaataagatgtctgagcctgtgattcgtcaagcgatgaatcaggcgatgaagatcatgggtcaccagtttgtgctggggcgtacgatttcagaagcaatgaaaaatggtaagagtaaccgtgacaaaggcttcacttattcatttgatatgctgggcgaagcggcattaacggcgcaagatgctcaaaagtattttaaagattacatcatggcggttgaatctgttggtcgtgatgagtatgcaagccaaaaaggcagcaatcaacaatcgccggatccaacggtgtctataaagctatctgctttgcacccccgttacgatgtagcgaatgaagcccgcgtattagatgaaatgtatgaatcagtactgacattgctttcacgtgcgcgtgaattgaatgtgggtattacgattgatgctgaagaagccgatcgtcttgagttgtcattaaagttatttgaaaagctatatcgttcagatgcagtaaaaggctggggtcgatttggtatcgttgttcagtcttactctaagcgtgcactacctgtattggcatggttagcggcgttaagtaaagcgcagggcgatattattcctttacgcttggtgaaaggtgcctattgggacagtgaattaaagctttctcagcaaagcggttttagtgactacccagtctttacccgtaaagagtcaacagatagcgcatatcttgcgtgtgctcgtttcttattgtctgagcatttacgtggtgtgatttatccgcagtttgctagccataacgcacatacaatttcagctattgtggcgatgactgatcaccgcgattttgaattccaacgtctgcatggcatgggtgatgcgctttataatcatgcaatggacatgtaccaagcgaatgtacgtatttatgcgcctgttggcagccataaagatttgctgccgtaccttgtacgtcgtttacttgagaacggtgctaacagctcgtttgttcaccgtttggttgatgccaattgcccgattgaatcattaacagagcatccggtagataccttacgctcgcgtccttcgttaaataacagccttattccactgccaccccagatctttggtgagagccgtaaaaactctgccagcattaatattgatattgaatctgagtggacaccgttcaatgctgctattcaggcatttagtcagcatcaatggcaggctggtcctatcgtaaatggcgtaacgcttgatggcgaacaacacgccattacagctccttataatcgttctgaaagtgtcgggcaggttgcattttctagtgcgagccaagttgctcaagccattgatgttgcaagtgaagcatatcctgcatggtcacaagttgctgcttctgagcgtggtgagtgcttacagcgtttagctgatttacttgaacttcacactggtgagctggtcgccctttgtcatcgtgaagcgggcaaaacaattcaagacagcattgatgaaattcgtgaggccgtggatttctgtcgtttctatggtgaacaggcatcgtctgaactcgccagtgcgaaatcaattaaaagctttgatggttcaaccaagcagctgacctatcaaggccgcggtgtgtttgcatgtattagcccatggaatttccctctggcgattttcttagggcaagtatctgcggcattggctgcgggtaatactgttgttgccaagcctgctgaacaaacctcgttgattgcttaccgtgcgattgaattaatgctagaagcgggtattcctgctggcgcgattcaattattaccgggtacgggtgctgaagtgggtgcaacactcacaacagatgtgcgtattgcgggtgtcgcgtttaccgggtcaactgaaacagcccaacgcattaaccgttctttagtcgcacgtgattgtgaagcggttccgtttattgcagaaaccggcgggcagaatgcgatgatcgttgatagtaccgcgttgccagagcaagtagtgcgtgatgtggttcgttctgcctttgcatcagctgggcagcgttgttctgcgttacgggtgttatttgttcaagccgatattgccgatcgcataattacgcttatcaaaggtgcgatggctgagctatctgtcggacgccctgagttacacagtaccgatgttggccctgttattgatatcgcggcaaaagaaaagctgttaactcacattgagtcgttaaagaatcaatcgacactagtggctcaaactcagctgagtgatgaatgtaagttgggtgactttgttgcaccaacagcatttgaaattaacagtattgatattttgaaaaatgaaaacttcggcccaattcttcacatcgttcgttttaaagcgaatgaaatcgatcaggttgtcgatcagattaatcacacagggtttggtctaacgctgggtgttcacagccgtaacgagcgtacttattgccgtatcgagcaacgcgctcgggtgggtaactgctacatcaatcgtgatcaagtcggtgctgtggtgggtgttcagccgtttggcggacaaggcctatcgggcacaggtccaaaagcgggtggcccacactacctataccgcttcactaaagatgtactgagtgcgtaa

SEQ ID NO: 12537 - protein, 1041 aa, Photobacterium profundum
MFNAADVLQPSFIERPLNEIWTLISPLYSVDESLWLEQLLPLAEPSDIERKHTTDKAAELIQRVRADKNAIQMIDALLLEYSLDTKEGILLMCLAEALMRIPDAATADALIRDKLSVADWKSHLKNSDSLFVNASTWGLMLTGKVVTMDAKEDGKPSHVINRLVNKMSEPVIRQAMNQAMKIMGHQFVLGRTISEAMKNGKSNRDKGFTYSFDMLGEAALTAQDAQKYFKDYIMAVESVGRDEYASQKGSNQQSPDPTVSIKLSALHPRYDVANEARVLDEMYESVLTLLSRARELNVGITIDAEEADRLELSLKLFEKLYRSDAVKGWGRFGIVVQSYSKRALPVLAWLAALSKAQGDIIPLRLVKGAYWDSELKLSQQSGFSDYPVFTRKESTDSAYLACARFLLSEHLRGVIYPQFASHNAHTISAIVAMTDHRDFEFQRLHGMGDALYNHAMDMYQANVRIYAPVGSHKDLLPYLVRRLLENGANSSFVHRLVDANCPIESLTEHPVDTLRSRPSLNNSLIPLPPQIFGESRKNSASINIDIESEWTPFNAAIQAFSQHQWQAGPIVNGVTLDGEQHAITAPYNRSESVGQVAFSSASQVAQAIDVASEAYPAWSQVAASERGECLQRLADLLELHTGELVALCHREAGKTIQDSIDEIREAVDFCRFYGEQASSELASAKSIKSFDGSTKQLTYQGRGVFACISPWNFPLAIFLGQVSAALAAGNTVVAKPAEQTSLIAYRAIELMLEAGIPAGAIQLLPGTGAEVGATLTTDVRIAGVAFTGSTETAQRINRSLVARDCEAVPFIAETGGQNAMIVDSTALPEQVVRDVVRSAFASAGQRCSALRVLFVQADIADRIITLIKGAMAELSVGRPELHSTDVGPVIDIAAKEKLLTHIESLKNQSTLVAQTQLSDECKLGDFVAPTAFEINSIDILKNENFGPILHIVRFKANEIDQVVDQINHTGFGLTLGVHSRNERTYCRIEQRARVGNCYINRDQVGAVVGVQPFGGQGLSGTGPKAGGPHYLYRFTKDVLSA

SEQ ID NO: 12538 - DNA, 3648 bp, Parachlamydia sp
  CDS (1)..(3648)
atgattgaaaatgccttatttcaaattcattcagtcaaaggaaaaaaactttcattacaagaaaggcaagatctggcgatttcgttagcagctaaaatgttaaaagaggcgcaatatattcaaacaaaagttgaaaaaaggcaacaagcagaacttgctggaatgatgaacgattccgttggtaagatttttacaaccgtcttaacagaccagtgttttagaagtcttcaaaatagtagagtggctgatcagcttgcgcaagtcattcacaaatatggaatccccatctacttatcggataaaaaacgactagccttaaaagcttttagcctagttggtaaaattctctcttctttagcagttcctattactattcgactgattcagaaagaaacaaggcatattattttaccaggagagcctcaagcgtttgctaaacacatgaaaaagaggtgtcaagagggagtaagaattaatcttaatcatctaggtgaagcaattttaggagaagatgaagccaggcgtcgtttgcaaatttatctggatgatttagcaaatcctttgatcgagtatatttctattaaaatttctactatttatagccaaatccatttactggcttgggaagaaacgttagaaattttatctgaaagacttcgcttattgtatcgagcagcaattaaaaataaatatagacgagcaacgggtgaagtcatatcgaaatttgttaatttagatatggaagaatatcgagacttaaacctaacagtcgcactttttaaaaaagttttagatgagcctgagttttttcaatatcaaggcggaattgttttgcaaagctatttacccgattcctttttaattcaacaagagctaacgcagtgggcgatgcaaagagttaatcggatgggagctcctatcaaaatccgccttgtaaaaggtgctaatttagcgatggagcaatttgaatccgctgttcgtttatggccacaggctccttacacaactaaagcagatgtagatgcaaattataaacgaatggtcacgtatggatgcgagtttcaacgtgctcaggcagctcatttagggattgctagtcataatttatttgatatcgcttatgctttattactccgttctgaaaatcacgttgaaaaagaagtctgctttgaaatgctggagggaatggctgatcatattcgacgagttgttcaaactttagcagatgacatgcttctttactgcccaactgccactaaagaagaatttcaaagcgccgttgcttatcttgtcagacgtttagatgaaaatacagctcctgaaaacttcttacgacatgcttttgatttaaggcctggcactgatgattggaataatcaagttcatttgtttaaacaagcttgtcaaaattacgaacaagtttccgatcaacctaggcgtttacaaaatagattgcataaagatcgtttgctcaatcaacgaaaatgtttccaaaatgtggcagatactgactggtcattatctcacaatcgccaatgggcgaaaataattattgatcaatggaaaaataaaaaacatccagatgttcctttagtcattaatggcttccactatacttcagaaaatcgctggggaattggagaagatccctcttttcctggaaaaattttgtatcgctatgcgttagcttccaaagaacaagttgatgaagctttagacgctgcccaaaatgcttatttaaaatggtctgcgacaacttctcaagaacgggccaatttattaataaaaatagcgcaaggtttagagctgcatcgtgctgatttgattggagctatgattgctgatacggctaaaacattgattgaagcagatatagaagtttccgaagcgatcgattttgctaattattatcgcttcaatttattagaatggatgtatttggaagatgtcaagtggagtgctaaaggtgttgttgtcattgctcctccttggaattttccatgttcgatagcggctggcggtattttagcagcattagttactggcaatacggtaattttaaaacctgcttttgagtctgttttagtttgttggcatttagctcaaattttttgggaggcgggaattagccagcaagtgttacaatttgttgtttgcgaagatgaacctgtgggaagcgccttaattcaagattctcgagtgaatgcagttgtcttaactggtgcgacagaaactgcaaaactttttttacgcttaagggcagatttggatttaatggccgaaacgggtggtaaaaacacaatgattataacctctatggctgatcgtgatttagcgattaaagatttggttcaatcggcgtttagtcatgcaggacaaaaatgtagcgcatgtagtttggctattgtagaagcagagacttatgataatcttcactttcgtcagcaattaaaagattctgtagaaagtttatcaatcggttccccgtggaaattaaaatctaaagttaatcctttaattcgtgaagctaaccccaatctgttacgtggtttaacgcagttagaggaaggggaagaatggcttgtacaacctaagcaagatcctcaaaatccttatctgtggagtccgggaattaagcttggtgtaaaaccagggaattttacctataatacagagttatttggacctgttttggggcttgtaagagcagaaaatttcgatgaagccttacacatgatgaatcaaacaggctacggtttaacagcaggtattcataccctagatgaaagagagcagaagcaatggtttcaaaaaatagaggcagggaattgttatattaataggactatgacaggagctattgttgaaagacaaccatttggagggtgtaaagaaagcagttttggaaaaggatcgaaagctggaggtcctaattatctagtgcagtttatgcaaacttctcaaaaaaacttacctacagagcaaaaagagttaaaagaaatgcctctggcatttctaaaaaatgttcagagactaaagtatttgagttccgaagaatatgaaatttttagtttaagtatgaaaaattatgctttctattatgatttatatttttctcgatctcatgatcctagtttagttagagggcaagataatttacaaacttatcgcccgcataatcaaatttcggttagggtacaatcacctgatcgtttagtagacttattacgtttgatagcagcctctattatttgttctacccctttaatgttgagtacagataatcaagagacttaccaaaaattccagtctttacgtttacctcctttcatttcttttaaattggaggctgaatcgacctttatcgaaagattagagcgaggtgagatcaaaagaatgcgtgtgttaagccctttctctaaatctttagaaaatactttagcgaatgcagcttgtcatttaaatagaggggaagtaatggccaatggacgattagaacttcttcattttttaagagaagtaagtttaagttttgattatcacaggtatggaaaccttgccgagcgagaaaaagaatatagacatccattacccggtcataaaggaaaaacctgtttaccttgtggagcttgttgttgtgatggataa

SEQ ID NO: 12539 - protein, 1215 aa, Parachlamydia sp
MIENALFQIHSVKGKKLSLQERQDLAISLAAKMLKEAQYIQTKVEKRQQAELAGMMNDSVGKIFTTVLTDQCFRSLQNSRVADQLAQVIHKYGIPIYLSDKKRLALKAFSLVGKILSSLAVPITIRLIQKETRHIILPGEPQAFAKHMKKRCQEGVRINLNHLGEAILGEDEARRRLQIYLDDLANPLIEYISIKISTIYSQIHLLAWEETLEILSERLRLLYRAAIKNKYRRATGEVISKFVNLDMEEYRDLNLTVALFKKVLDEPEFFQYQGGIVLQSYLPDSFLIQQELTQWAMQRVNRMGAPIKIRLVKGANLAMEQFESAVRLWPQAPYTTKADVDANYKRMVTYGCEFQRAQAAHLGIASHNLFDIAYALLLRSENHVEKEVCFEMLEGMADHIRRVVQTLADDMLLYCPTATKEEFQSAVAYLVRRLDENTAPENFLRHAFDLRPGTDDWNNQVHLFKQACQNYEQVSDQPRRLQNRLHKDRLLNQRKCFQNVADTDWSLSHNRQWAKIIIDQWKNKKHPDVPLVINGFHYTSENRWGIGEDPSFPGKILYRYALASKEQVDEALDAAQNAYLKWSATTSQERANLLIKIAQGLELHRADLIGAMIADTAKTLIEADIEVSEAIDFANYYRFNLLEWMYLEDVKWSAKGVVVIAPPWNFPCSIAAGGILAALVTGNTVILKPAFESVLVCWHLAQIFWEAGISQQVLQFVVCEDEPVGSALIQDSRVNAVVLTGATETAKLFLRLRADLDLMAETGGKNTMIITSMADRDLAIKDLVQSAFSHAGQKCSACSLAIVEAETYDNLHFRQQLKDSVESLSIGSPWKLKSKVNPLIREANPNLLRGLTQLEEGEEWLVQPKQDPQNPYLWSPGIKLGVKPGNFTYNTELFGPVLGLVRAENFDEALHMMNQTGYGLTAGIHTLDEREQKQWFQKIEAGNCYINRTMTGAIVERQPFGGCKESSFGKGSKAGGPNYLVQFMQTSQKNLPTEQKELKEMPLAFLKNVQRLKYLSSEEYEIFSLSMKNYAFYYDLYFSRSHDPSLVRGQDNLQTYRPHNQISVRVQSPDRLVDLLRLIAASIICSTPLMLSTDNQETYQKFQSLRLPPFISFKLEAESTFIERLERGEIKRMRVLSPFSKSLENTLANAACHLNRGEVMANGRLELLHFLREVSLSFDYHRYGNLAEREKEYRHPLPGHKGKTCLPCGACCCDG

SEQ ID NO: 12540 - DNA, 2949 bp, Bdellovibrio bacteriovorus
  CDS (1)..(2949)
atgaacgacattcagtcgcaaattgtctcccgtggtgaagagattctgaaacgcatggaaagccagtccaaggcttccattttctccaaagacttctggtatggctccatcatggaatggagcatgaaaaacgaaaaattcaaaaccaacatgttccgtttcgtggacgtgcttccctccatcaactcgggtgatgaagtcgcgcgccacttgaaagaatacttctctgaagacggcggcaccctgcctccggtgttcaatgtgggacttggtttgggttctttggctccgggcctgatggcgggtgcgatcaaaaagaacgttatgggtatggcaaagatgttcatcactggcgaaagcccggatgaagcattgccggttttgaaaaaagcccgcaaaaacaaaatgaccttcactgtcgacattttgggtgaagcgacactttctgaaaaagaagcgcaagactacagcaacaagtacatggagcttgtgacctggctggcgaaagatgctgaaaaatgggacgaagttccgcagatcgaccgcgaccatgaaggtgctttgccgaaagtaaacgtgtccgtgaaaatgacggcgctttattcccagatcaaagatgcagcctgggatgaatccaaaaaaatcctgaaagaccgtctgcgcccggtgttccgtctgggcatggaaaaaggcgtgttcgtgaatctggatatggaacagtactctgtcaaacacctgacactggaagtattcacagagctgatcaacgaacctgagttcaaaaattacaagttttttggtatcgtgattcaggcttacctgcgcgattccttcgaagacgtcaaatccctgacagagttcgcgcaaaaacgcggcactccgttctgggttcgtctggtgaaaggtgcctactgggattacgaaaccatcgaagcggaacagcgtggatggccggtgccggtttacaccaacaaggccgaatccgacgccaactacgagttgtgcgcgaagtaccttctggaaaacatcaaattcatccgccctgcttttgcatcccacaacgtcagaactttggcggcgtgcatgctttacgcagaaaaactgaacatcccgaaagaggctttggaattccaaatgctttacggcatggcagaacccatcaaaaaaacaatcgtggacatgggctaccgcatgcgtgaatacgctccggtgggcgaactgatcccgggcatggcttacctggtacgccgtcttctggaaaacacgtccaacgaatcctggctgcgtggcaagttcgccgacaacaaatccatggcggagcttttgaaagatccggctcaaggtttgactccgacgtctccggttattccgaaaaaaccaggcaagttctataatgaaccacttttggatttcgccgtaaaagccgaccgtgagaaaatgctgaaagcactggctgaagccaaggcttctttgccggtgaacgtaaacattgtgatcaacaacaaggaacttcagtccggcaagatctttgaccgtgtgaatccgtcccagtccgatcagatcgtgggcaagatccagatggcaacaaccgagcaggctgaacaggcgatgcaagcggcgcaaactgcttacaaaacctggaagaacgttccttgcgaacagcgcgctgccctggtggacaagcttgctgacatcatgacccgtgaccgcttcaaactgattgccacgcaagtgcttgaagtaggtaaaccatgggctgaagctgacggtgacatcggtgaagccatcgacttctgccgttactatgcccgccatatgcgtgagttgcaaaaaccacttcgtgtgggtggcttgccaggtgagctgtctcactacatctacaaatcccgtggtgtgacggcggtgattgctccttggaacttccctctggcgattttggccggcatggtgactgcggcggctgttgcagggaacaccgtggtgatgaaacctgcagagcaatccacagtggttgcctggggcttgatgaaaatgatccaggaagctggattcccacaaggtgtgatcaacttcctgccgggttacggtgaagaagttggcgaatacatcgtgaaccacaagtacacgaccacgatcgccttcacaggttccaaagccgtgggcctgcacatcatgaaccgcgcagcggtggttcaaccaggacagcagcacgtcaaacgttgtatcattgaaatgggcggtaagaacgccgtgatcatcgacaacgatgcggatctggatgaagcagttgatggcgtgatctattctgcgttcggtttcagcggtcagaaatgttctgctgccagccgtgtgatcgtgcttgatgaagtttacgaccgtttcgtggaccgtctggttgaaacagcgaaatccatcgagatccacccggctgaaaatccaaaagcttacatgggtccggttgtcgacaaagaagcttacgaccgtatccttggaacgatcgcagaagctgaaaagaaccacaagctgctgttcaagggctctgtaccgggcggcgggttctttgcgcctccgacgatctttggagacgttccaggtgatgcgaagctggctcaggctgaaatcttcggcccggttgtggctgtgatccgcgcgaaaaacctggatcaggcgttggatatcgccaacagcacagagtacgcgttgacgggtggcgtgttctccagaagccctgcgaacatcaaccgtgtgaaagaggaactggaagtcggaaatctttatgtaaatcgtggtatcacgggcgcaatggtcgaccgtcatccattcggtgggttcaagatgtccggtatcggttctaaaaccggtggaccggattacttaaaacagtacatggaaccagcgtgcgtgactgagaacacacttcgtcgcggctttgctccggcggaagaatag

SEQ ID NO: 12541 - protein, 982 aa, Bdellovibrio bacteriovorus
MNDIQSQIVSRGEEILKRMESQSKASIFSKDFWYGSIMEWSMKNEKFKTNMFRFVDVLPSINSGDEVARHLKEYFSEDGGTLPPVFNVGLGLGSLAPGLMAGAIKKNVMGMAKMFITGESPDEALPVLKKARKNKMTFTVDILGEATLSEKEAQDYSNKYMELVTWLAKDAEKWDEVPQIDRDHEGALPKVNVSVKMTALYSQIKDAAWDESKKILKDRLRPVFRLGMEKGVFVNLDMEQYSVKHLTLEVFTELINEPEFKNYKFFGIVIQAYLRDSFEDVKSLTEFAQKRGTPFWVRLVKGAYWDYETIEAEQRGWPVPVYTNKAESDANYELCAKYLLENIKFIRPAFASHNVRTLAACMLYAEKLNIPKEALEFQMLYGMAEPIKKTIVDMGYRMREYAPVGELIPGMAYLVRRLLENTSNESWLRGKFADNKSMAELLKDPAQGLTPTSPVIPKKPGKFYNEPLLDFAVKADREKMLKALAEAKASLPVNVNIVINNKELQSGKIFDRVNPSQSDQIVGKIQMATTEQAEQAMQAAQTAYKTWKNVPCEQRAALVDKLADIMTRDRFKLIATQVLEVGKPWAEADGDIGEAIDFCRYYARHMRELQKPLRVGGLPGELSHYIYKSRGVTAVIAPWNFPLAILAGMVTAAAVAGNTVVMKPAEQSTVVAWGLMKMIQEAGFPQGVINFLPGYGEEVGEYIVNHKYTTTIAFTGSKAVGLHIMNRAAVVQPGQQHVKRCIIEMGGKNAVIIDNDADLDEAVDGVIYSAFGFSGQKCSAASRVIVLDEVYDRFVDRLVETAKSIEIHPAENPKAYMGPVVDKEAYDRILGTIAEAEKNHKLLFKGSVPGGGFFAPPTIFGDVPGDAKLAQAEIFGPVVAVIRAKNLDQALDIANSTEYALTGGVFSRSPANINRVKEELEVGNLYVNRGITGAMVDRHPFGGFKMSGIGSKTGGPDYLKQYMEPACVTENTLRRGFAPAEE

SEQ ID NO: 12542 - DNA, 3009 bp, Rhodopseudomonas palustris
  CDS (1)..(3009)
atgccgtcagacccgccgcttgccgaattcaccgcggcttacgcgccggacgatgctgcgctggctgcggagctgctgacgaccgccacgctgacgcccgaccgtgaagcccagatcgacgccatcgcgaccgacctgatcaccgcgatccgcggttccgaacacggcctgaggggcgtcgaagccatgctgcgcgaattcgcgctgtcgaccaaagaaggcctggccctgatggtgctggccgaggcgctgctgcgggtaccggatgctgcgactgcggacgccttcatcgaggacaagctcggccagggcgacttcgcgcatcaccgtatcaagtccgatgccgtgctggtgaacgcctctgcctgggccctcggactatcggcacgcctcgtccatgccggcgagacgccgcaaggcacgcttgcggccttaacgcggcggatcggcgcgcccgcggtgcgcgccgcgacacgtcaggcgatgcggctgatcggcaatcacttcgtgctcggcgaaacgatcgacgcggcgctcgcccgcgcacagccgtatgcgcgtgagggctctcgctattcttacgacatgctcggcgaaggcgcccgcactgccgcggatgccgaacgttattaccaatcctacgccgatgcgatcaccgcgatcggccgccgcgccggcaacgcggcgctgccggcgaggcctggcatctcggtgaagctgtcggcgctgcacccacggttcgaggcgatcagccgcgaccgcgtgatgcgggaactgacgccgcggctgctcgaactggcgcagctcgccaagagccacgacctcgctttcacggtcgatgccgaagaagccgaccggctcgaactgtcgctcgaggtgttcgccgcctgctttgccgatccatcgctcaaaggctgggacggttacggtctcgcggtgcaggcgtatcagaagcgtgccgccacggtgatcgaccacgtcgccgagctcgcgcgcgcgttcgaccgccgcatgatgctgcggctggtgaagggcgcctattgggacaccgaaatcaagcgcactcaggagcgcgggcttgccgactatccggtgttcaccaggaaggcgatgaccgacctcaactacctgcactgcgcgcgcaagctgctggcgctgcgcccgctcctgttcccgcagttcgccagccacaacgcgctgacggtcgccaccatcctggccgaggccggtgatggcgacggctacgaattccagcggctgcacggcatgggcgaggcactgtatggccggctgctcgccgaccacccgcaggcggtgtgccggatctacgcgccggtcggcgggcatcgcgacctgctggcctatctggtgcggcgcctcttggagaacggcgccaattcatccttcgtggcccaagccggcgacgacagcgtgccgatcaccgaactgcttgcgcgtcccgcgacgttgatcggccatcccgagaatgcgcgcaattcggcgatcccgttgccgcgcgatctgtaccagccgcagcggatcaattcgcgcggcatcgaattcggcgaccgcagcgcgctcgcggcactgctcggcgacatcgaaggcgcacgccggccgctgccgacggtcgcgtccacctcgccggaacaagccgcggccacggtcactgccgcacgcaaaggcttcgagtcctggagccggacgtccggcgatcatcgcgccgcgatcctgcagcgcgccggcgatctgctggagcaacgccgtggcgagctgatcgcgctcctgcaggacgaaggcggcaagacgctcgatgatggcgtggcggaagtgcgcgaagcagtcgactactgccgctactacgccagcgagggtcgccggctgttcggcgagccgcaggccctccctggcccgaccggcgagcgcaacacgctggccttgcgcggccgcggcgtgttcgtcgcgatcagcccgtggaacttcccgctggcgatcttcctcggccagatcacggcggggctgatggctggcaacgcggtggtcgcaaagccggccgagcagacgccggtgattgccgaggtcgcggtgcgcctattgcacgaagccggcgtgccgccggctgcgctgcatctggtgcaaggcgacggccgcatcggcgcggcactggtcgaacagcgcgacatcgccggcgtcgtattcaccggatcgaccgaggtcgcgcgcgcgatcaaccggacgctggccgccaaggacggtccgatcgtgccgctgatcgccgagaccggcggcatcaacgcgatgatcgtcgatgccactgcgctgcccgagcaggtcgccgacgacgtcattgcctctgcattccgctccgctggtcagcgctgttcggcgctgcggctcctgtgcgtgcaggacgacgttgccgaccgagtgatcgcgatgatcgccggcgcggcgcgcgagctaacaataggcgatccgcgcgatccggcgacgcatgtcggaccggtgatcgacgccgaggcgaagaccaggctcgacacgcatatcgccacgatgaaacgccaggcgcagcttcacttcgccggcaccgcgcccgcgagcggcaactttgtggcgccgcacatctttgaactcaaccgtgcctcagagctcaccgaggaagtgttcggcccgatcctgcacgtggtgcgctacaaggcggcgcagttcgacgatctcctcgatgacatcgccacgaccggctatgcgctcacgctcggcgtgcagtcgcggattgacgacacgatcgcgcgtgtgatcgcgcggcttcccaccggcaatgtctatgtgaaccgcaacatcatcggcgccgtggtcggcgtccagccgttcggtggctccggcctgtcgggcaccggccccaaagccggcggccctcattatctgccgcggttcgcactggaacagacggtgtcgatcaacactgcggccgccggcggcaatgccgctctgctgacaggcagcgaataa

SEQ ID NO: 12543 - protein, 1002 aa, Rhodopseudomonas palustris
MPSDPPLAEFTAAYAPDDAALAAELLTTATLTPDREAQIDAIATDLITAIRGSEHGLRGVEAMLREFALSTKEGLALMVLAEALLRVPDAATADAFIEDKLGQGDFAHHRIKSDAVLVNASAWALGLSARLVHAGETPQGTLAALTRRIGAPAVRAATRQAMRLIGNHFVLGETIDAALARAQPYAREGSRYSYDMLGEGARTAADAERYYQSYADAITAIGRRAGNAALPARPGISVKLSALHPRFEAISRDRVMRELTPRLLELAQLAKSHDLAFTVDAEEADRLELSLEVFAACFADPSLKGWDGYGLAVQAYQKRAATVIDHVAELARAFDRRMMLRLVKGAYWDTEIKRTQERGLADYPVFTRKAMTDLNYLHCARKLLALRPLLFPQFASHNALTVATILAEAGDGDGYEFQRLHGMGEALYGRLLADHPQAVCRIYAPVGGHRDLLAYLVRRLLENGANSSFVAQAGDDSVPITELLARPATLIGHPENARNSAIPLPRDLYQPQRINSRGIEFGDRSALAALLGDIEGARRPLPTVASTSPEQAAATVTAARKGFESWSRTSGDHRAAILQRAGDLLEQRRGELIALLQDEGGKTLDDGVAEVREAVDYCRYYASEGRRLFGEPQALPGPTGERNTLALRGRGVFVAISPWNFPLAIFLGQITAGLMAGNAVVAKPAEQTPVIAEVAVRLLHEAGVPPAALHLVQGDGRIGAALVEQRDIAGVVFTGSTEVARAINRTLAAKDGPIVPLIAETGGINAMIVDATALPEQVADDVIASAFRSAGQRCSALRLLCVQDDVADRVIAMIAGAARELTIGDPRDPATHVGPVIDAEAKTRLDTHIATMKRQAQLHFAGTAPASGNFVAPHIFELNRASELTEEVFGPILHVVRYKAAQFDDLLDDIATTGYALTLGVQSRIDDTIARVIARLPTGNVYVNRNIIGAVVGVQPFGGSGLSGTGPKAGGPHYLPRFALEQTVSINTAAAGGNAALLTGSE

SEQ ID NO: 12544 - DNA, 3603 bp, Pseudomonas paucimobilis
  CDS (1)..(3603)
atgacgaacccgccccccttcaccgatttcgcccctgtcatccggcctcagtcgccgctccgccaggcgatcaccgccgcctatcgccgcgacgaagcggagtgcatggcgcccctgctggaagccgccgcgctgcccgacgccatgcggcgtggagtgcgggacatggcgcgcaggctggtgacgacgctgcgcgccaatggcaagggcagcggggtcgaggcgctggtgcaggaatattcgctctccagccaggagggcgtggcgctgatgtgcctggccgaagcgctgctgcgcattcccgacgatgcgacccgcgatgcgctgatccgcgacaagatcgccgacggcgactggggcgggcatctgggcggcggcaggtcgctgttcgtcaatgcggcgacctgggggctggtggtgacgggcaagctggtcggcagcgtcgatgaccggggcctcggcgcggcgctgacgcggctggtggcgcggctgggcgagccggtgatccggcgcggcgtcgacctcgccatgcggatgatgggcgagcagttcgtgaccggcgagaccatcggcgaagcgctgaagcgggcgcgggcgcaggaggccaagggcttccagtacagctatgacatgctgggcgaagcggcggcgacggcggcggacgcggcgcgctacctggaggattaccggcaggcgatccatgccatcggccgggcgtcggccgggcgcggcgtctatgcggggccgggcatttcgatcaagctgtcggcgctgcatccgcgttattcccgcgcacaggcggagcgggtcatgggggaattgctgccgcgggtgaaggagctggcgttgctcgcccgcggctatgacatcggactcaacatcgatgcggaggaggcggatcggctcgaattgtcgctcgacctgctggagagtctggcgctggacccggagcttgcggggtggaacgggctgggcttcgtggtgcaggcctatggcaagcgctgccccttcgtgatcgactggatcgtcgatctggccgggcgggccgggcggcggatcatggtgcggctggtcaagggcgcctattgggacgcggagatcaagcgggcgcaggtcgacgggctggccgatttcccggtctatacgcgcaaagtccataccgacgtcgcctatatcgcctgcgcgaggaagctgctggcggcgcgggaccgggtgtttccgcaattcgcgacgcataacgcgcagacgctggcgacggtccatcatctggcggggcatgatttcacgctgggcgattatgaatatcagtgcctgcacggcatgggcgagccgctgtacgagcaggtggtggggaagggcgatctcgaccggccctgccgcatctacgcgccggtcggcacgcatgagacgctgctggcctatctggtgcggcggctgctggaaaatggcgcgaacagctccttcgtgcaccgcatcgccgatccggcggtgccggtggaggagatgatcgccgacccggtcgagcaggtgcgggcgatgccgcatccgggggcgcggcatgcggacatcgccctgccgtccgggctttatcccgaccggcgcaattccgacgggatcgacctcagcgatgaaaatgcgctggccatgctgacgcgggcgctggcggaaagcgcgcagatcggctggacggcccggccggagggcggggagggcgcggcgcggcccgtgctcaaccccgccgaccggcgcgatgtcgtggggacggtgttcgaggcgtcgacggattttgcgcgggcggcggtcgcgcgggcggacggaagcggctgggcgagggcgcccgtgacggaacgcgccgcgatattggagcgggcggccgacgcgatgcaggcgcgcatgccgatcctgctgggcctgatcgtgcgggaggcgggcaagtcgctgcccaacgccattgccgaagtgcgggaggcgatcgatttcctgcgctattatgcggcgcaggcgcggtcgaccttcggcccggcgcaggagcctttggggccggtggtgtgcatttcgccctggaatttcccgctggcgatcttcaccggccaggtggcggcggcgctggtcgcgggcaatgcggtgctggccaagcccgccgaggaaaccccgctgatcgcggcggaggcggttcgcctgctgcacgaggctggggtgccgggcgatgcgttgcagcttgtgcccggcgcgggggagatcggcgcggcgctggtggcggcgccgcaaaccgcaggagtgctgttcaccggatcgaccgaggtggcgcggctgatccagcggcaactggcctcgcgcctctccgcttcgggcaggcccattccgctggtcgcggagacgggcgggcagaatgcgatgatcgtcgacagctccgcgctggcggaacaggtggtggcggatgtcatcgcctccgccttcgacagcgcggggcagcgctgttcggcgctgcgcatcctctgcctgcaggaggatgtggcggaccggacgctggcgatgctgaagggggcgctcagggaattgcgcatcgggcggaccgaccggctggcggtcgacatcgggccggtcatcaccgacgaggcgcaggaaggaatcgggcggcacatagaggcgatgcgcgccctgcgctgcgcggtggagcagcagccattgccggaggaaagcgcgcatggcagcttcgtgccgccgacgatcatcgagatcgacgacatcgcgcagttgcggcgggaggtgttcgggccggtgctgcacgtcatccgcttcccccgcgcagggctggacgcgctggtggatgcgatcaacgcgaccggctatggcctgaccttcggcctgcatacgcggctggacgataccgtcgcccaggtgacggggcgggtgaaggcgggcaatctctatgtgaaccgcaatgtgatcggcgccatcgtgggggtgcagccctttggcgggcgcgggctgtcgggaaccggacccaaggcgggcgggccgctctatctggggcggcttgtgcgcgtgccgccggcctttgccgggcgggccggttcgttcccgtcggcgctcgccgatttcgccgactggctggcggcggagggcgaggcggaggcttcggccatggcgcggcgctgcggcgatgcctcggcgctgggggtggagatggcgctgccggggccggtgggggagcgcaacctctatgcgttgcatccccgcggatggatcgggatgcggcccgcgacgcggcagggccttttggggcagatggcggcggtgctggcgacgggcaatcgcggggtgctgcaggacatggcgctgccgcggggattgcccccgcatatcgccgcgcatttcgcgtctcggccggaagggccgctgggggcggtgctggtagagggcgatgccgggcggatcggcgcggcggttcgggacgtggccggcctgccggggccggtcgtcagcgtccatgcggcgggggcggatgggatgtatccgctccactggctgctggaggaggtgtcgacctccatcaacacgacggccgccggtgggaatgcgagcctgatgatgatcggatga

SEQ ID NO: 12545 - protein, 1200 aa, Pseudomonas paucimobilis
MTNPPPFTDFAPVIRPQSPLRQAITAAYRRDEAECMAPLLEAAALPDAMRRGVRDMARRLVTTLRANGKGSGVEALVQEYSLSSQEGVALMCLAEALLRIPDDATRDALIRDKIADGDWGGHLGGGRSLFVNAATWGLVVTGKLVGSVDDRGLGAALTRLVARLGEPVIRRGVDLAMRMMGEQFVTGETIGEALKRARAQEAKGFQYSYDMLGEAAATAADAARYLEDYRQAIHAIGRASAGRGVYAGPGISIKLSALHPRYSRAQAERVMGELLPRVKELALLARGYDIGLNIDAEEADRLELSLDLLESLALDPELAGWNGLGFVVQAYGKRCPFVIDWIVDLAGRAGRRIMVRLVKGAYWDAEIKRAQVDGLADFPVYTRKVHTDVAYIACARKLLAARDRVFPQFATHNAQTLATVHHLAGHDFTLGDYEYQCLHGMGEPLYEQVVGKGDLDRPCRIYAPVGTHETLLAYLVRRLLENGANSSFVHRIADPAVPVEEMIADPVEQVRAMPHPGARHADIALPSGLYPDRRNSDGIDLSDENALAMLTRALAESAQIGWTARPEGGEGAARPVLNPADRRDVVGTVFEASTDFARAAVARADGSGWARAPVTERAAILERAADAMQARMPILLGLIVREAGKSLPNAIAEVREAIDFLRYYAAQARSTFGPAQEPLGPVVCISPWNFPLAIFTGQVAAALVAGNAVLAKPAEETPLIAAEAVRLLHEAGVPGDALQLVPGAGEIGAALVAAPQTAGVLFTGSTEVARLIQRQLASRLSASGRPIPLVAETGGQNAMIVDSSALAEQVVADVIASAFDSAGQRCSALRILCLQEDVADRTLAMLKGALRELRIGRTDRLAVDIGPVITDEAQEGIGRHIEAMRALRCAVEQQPLPEESAHGSFVPPTIIEIDDIAQLRREVFGPVLHVIRFPRAGLDALVDAINATGYGLTFGLHTRLDDTVAQVTGRVKAGNLYVNRNVIGAIVGVQPFGGRGLSGTGPKAGGPLYLGRLVRVPPAFAGRAGSFPSALADFADWLAAEGEAEASAMARRCGDASALGVEMALPGPVGERNLYALHPRGWIGMRPATRQGLLGQMAAVLATGNRGVLQDMALPRGLPPHIAAHFASRPEGPLGAVLVEGDAGRIGAAVRDVAGLPGPVVSVHAAGADGMYPLHWLLEEVSTSINTTAAGGNASLMMIG

SEQ ID NO: 12546 - DNA, 1587 bp, Thermoproteus tenax
  CDS (1)..(1587)
atgggaattagattatctatgtctggcaaagttacctacgtctctgtgttggccgatgagtctatacaccctgcgtatgagaaggctctttccgaagtctgggagcttctgggaagggagtggccgatttacatcggcggaaaggaggtatataccagcggcaagtttgaaaagaggagcccctttgacacctctataaaaattggcacgttccagaggggaactcccgaggagttcaaagccgctctttcaaaagccgtggaggcgtttcccgagtggtctaggctagactggagagagagggcacggatcctcgccaagcttgccgacttgatagagagggatagattcaagttggccgcggctatcacgtatgaggtggggaagaacaggtttgaggccttggcggagatccacgaggctattgacgttttgcggtactacgtagagcttatacacaagatggatggctacgtgctgcagatgaggtctccgattcccaacgagaggcctctcagcgtgttgaggccgtacggcgcgtggtttgtaatttcgccattcaacttccccatagccctcgccaagggaatgctcaccggggtcctcttgatggggaacaccgctgtttggaagcccaccagcgaggcgccgttcacagccgccttggtgtaccagctggcggtggaggcgggagtgccgcctggggttttaaacttcgtcaccggccccggcgacgctgtcgaggaggtggctactggcgatccgagggtcgccggcatagccttcaccgggtcacgcgacgtcggcatgaggctgtaccgcctcttcacccagagacagccctggcctaagccaattgtgctggagatgggctcgaaaaaccccaccgtagtcaccgccaaggctgatttagagaaggcggctgagggcgttgtgagggccgccttcggcttcggaggccagaagtgctccgcgacgagcaggctctacgtgcagagggaggtctacgacaggtttgtggagcggcttgtggagaagactagggagattgtaaagataggcgacccgcggaggcgggaggttttcctcggccccgtgattaacaagtcggcgcgggagaactacaggcgctatgtggccgacgccgtggcggccggcggcaggttgagatacggcgggagggtgctggaagagggcgaattctcaaaaggcttctacgtagagccggccatcatagaaggcgtagcccccgacagctacctctggaagacagagctgttcctccccatactcctagtcgataagttcgacacgctggaggaggccgtgaggaaggcaaacgacacggaatacggcttaaccgccggcatattctccgaggacccgaaggaagtggagtatttctttgagcatatcgagttcggcgtggtgtacgccaacagaagaggcggcgcaaccaccggcgcgtggcccggcgctcagccattcacaggctggaaagcctcgggagcaactggcagaggcgtaaatggggtatattacctccttaacttcgcacgggagcaagccaggacggtggtctattag

SEQ ID NO: 12547 - protein, 528 aa, Thermoproteus tenax
MGIRLSMSGKVTYVSVLADESIHPAYEKALSEVWELLGREWPIYIGGKEVYTSGKFEKRSPFDTSIKIGTFQRGTPEEFKAALSKAVEAFPEWSRLDWRERARILAKLADLIERDRFKLAAAITYEVGKNRFEALAEIHEAIDVLRYYVELIHKMDGYVLQMRSPIPNERPLSVLRPYGAWFVISPFNFPIALAKGMLTGVLLMGNTAVWKPTSEAPFTAALVYQLAVEAGVPPGVLNFVTGPGDAVEEVATGDPRVAGIAFTGSRDVGMRLYRLFTQRQPWPKPIVLEMGSKNPTVVTAKADLEKAAEGVVRAAFGFGGQKCSATSRLYVQREVYDRFVERLVEKTREIVKIGDPRRREVFLGPVINKSARENYRRYVADAVAAGGRLRYGGRVLEEGEFSKGFYVEPAIIEGVAPDSYLWKTELFLPILLVDKFDTLEEAVRKANDTEYGLTAGIFSEDPKEVEYFFEHIEFGVVYANRRGGATTGAWPGAQPFTGWKASGATGRGVNGVYYLLNFAREQARTVVY

SEQ ID NO: 12548 - DNA, 1467 bp, Listeria monocytogenes
  CDS (1)..(1467)
atgagtattaaagaaacagccttaccaaaagttcaaacaaaattatttattaatggaaaatggacggatggagataataaagaaacaaaagatattgtaaacccagcaaatggagaagttattgccaaaatcgctcaagctggaccaaacgaaaccaaaaaagccattaaagctgcaaaagaagcatttcctgattgggcaaaaatggaactagctgatcgcgtcaaattattacacaaaattgccgatttaatggaagaaaaagcagatacactagcaaaaattatgacgcttgaacaaggtaaaccgctaaaagaatcaaaaggagaagtcctaactggcgcagaaaacttccgattcgctgcagaagaagcaagaagattatatggggaaactatcccagcgccaaacaatcacgcgtttatcgtcaaaaaacaaccaattggtgtagttgcggccattactccgtggaatttcccaggtggtatggtgacacgaaaacttgctccagcgcttgcaaccggaaatacaatcgtattaaaaccttccggagatacgccgctttcggccctagctatctttgaaatttttgaagaagccggcttgccaaaaggtgttgccaatatcgttatgggtagctccaaagaaatcggtgaaacattaactgacagtgatgatgttcgtaaactaactttcaccggctccacgaaagtcggtcaaacactattcaaacaatcagccgaaacactgaaaaaaatctcgctcgaacttggtggacatgcgccatttatcgtatttgatgatgcaaacctggatgctgctgtaaatgatttagttgccgcaaaattccgcaataacggtcaagtatgtgtatcgccaaaccgaatttttgttgccaaagaaattaaagaaaaattcactaaggcgctagttgctaaagtagaacaactaaaagtaggtaacggtttagatgatgtgaatgttggtccacttatccgcgaagatgcgattgacaaaatcgacaaacaacttaaaaatgccacagataaaggtgccaaagtcctaactggcggcggtcgtttaacaggttccgactatgacaaaggcaacttctacaaaccaactgtcttagataacgttacccgtgaaatggacattttttatgaggaaacatttggtccagtaatcccgcttatcacatttgaaacggaagacgaagcaatcgaaatggcgaatgacagtgaattcggtcttgcttcttacttctacactaaagatttagcacgcgtagaaaaagtgggagcagcactagaatacggaatggtcggagcaaatgaaattgccatctctaatccggaaactccatttggcggcgttaaacattctggtttcggtcgcgaaaatggccactacggaatggaagaatacatccaagtgaaattcattaacttaaaatatcgtgactaa

SEQ ID NO: 12549 - protein, 488 aa, Listeria monocytogenes
MSIKETALPKVQTKLFINGKWTDGDNKETKDIVNPANGEVIAKIAQAGPNETKKAIKAAKEAFPDWAKMELADRVKLLHKIADLMEEKADTLAKIMTLEQGKPLKESKGEVLTGAENFRFAAEEARRLYGETIPAPNNHAFIVKKQPIGVVAAITPWNFPGGMVTRKLAPALATGNTIVLKPSGDTPLSALAIFEIFEEAGLPKGVANIVMGSSKEIGETLTDSDDVRKLTFTGSTKVGQTLFKQSAETLKKISLELGGHAPFIVFDDANLDAAVNDLVAAKFRNNGQVCVSPNRIFVAKEIKEKFTKALVAKVEQLKVGNGLDDVNVGPLIREDAIDKIDKQLKNATDKGAKVLTGGGRLTGSDYDKGNFYKPTVLDNVTREMDIFYEETFGPVIPLITFETEDEAIEMANDSEFGLASYFYTKDLARVEKVGAALEYGMVGANEIAISNPETPFGGVKHSGFGRENGHYGMEEYIQVKFINLKYRD

SEQ ID NO: 12550 - DNA, 3021 bp, Desulfovibrio vulgaris
  CDS (1)..(3021)
atggatcagcaacatctcgacggcaaggtcgtcgagcgcggcaaagagttcttcagaagcatcagcggcgaggccccctccatcttcaacaagggatggtggaccggtaaggtcatggactgggccatgcagaacgaggacttcaaggtgcagctgttccgcttcgtggacgtgctgccctacctcaacacctccgaatcactcctgcggcacatccgcgagtacttcgccacagaagacgccgacatcccccccgtactcaagtggggcgcgggcaaggcgggcatcggcggggcactcaccgccaagctcatgggcatgaccatccgctccaacatcgagggcatggcgcgccagttcatcatcggcgacaacagcaaggaagccgtgaagggccttgcgaagcttcgcaaggacggcttcaccttcactgtcgaccttctcggtgaagccaccgtcagcgaagaggaatcagaagcctacgcgcagggctaccacgaagtggtcgacgccatcgcccgtgagcaggagaaatggaaggcgctgcccggcaacggcccggtggagggcttcgactggggtgccacacccaaggtcaacgtctccatcaagccttcggccctctactcgcaggccaagcccgtcgacgtggaaggctcggtgcgcggcatcctctcgcgccttgtgcccatctaccgcaaggtggtggccatgggcggcttcctgtgcatcgacatggagcagctcaaatacaaggagatgacgctggagcttttcaagcgcctgcgttccgaccccgaattccgtcactacccgcatctttccatcgtgttgcaggcctacctgcgcgataccgagaaggaccttgatgacctgctgcactgggcacgcagcgagaagctgcccatcggcatccgcctcgtgaagggcgcgtactgggactacgagaccgtcatcgccaagcagaacggctgggagattccggtctggaccgacaagcccgagtcggacatcgcctacgagaagctggcgcaccgcatcctcgagaacagcgacatcgtgtacttcgcctgcgcgtcgcacaacgtgcgcaccatcgccgccgtcatggagacggccctcgcgctgaacgtgcccgaacaccgctacgagtttcaggtgctctacggcatggcagaacccgtgcgcaagggcctcaagaacgtggcggggcgcgtgcgcctgtactgcccctacggtgaactcatccccggcatggcctacctcgtgcgccgtctgctggagaacaccgccaacgagtcgttcctgcggcaaagcttcgccgaaggggccgccctcgagcgtcttctggagaacccgcagaagaccctgcaccgcctgcttgccgcacggcccgaaccccgcgccgtcgaaccggggcccggcggtctgccgcccttcaccaacgacgccatgatcgacttcaccgtgcccgacaaccgcaaggccttcgtcgaggcattggccgacgtgcgctcgcgcttcgggcagacggtgccgctgtacatcggcgggcgcgacgtgaccaccgcagacctcatccccaccaccaacccggcgaagcccgcagaggtggtcgcctccatatgtcaggccggacggccggaaatcgacgacgccatcgccgccgcgaagaaggcggcactcacatggcgcgacacgtcgcccgccgacagggccgcctacctgcgtcgtgccgccgacatctgccgcaagcgcatctgggaactttcggcatggcaggtcgtcgaggtgggcaagcagtgggaccaggcctaccatgacgtgaccgaaggcatcgacttcctcgaatactatgcgcgtgagatgctgcgccttggcgcaccccggcgcatggggcgcgcgcccggcgagcacaaccacctgttctatcagcccaagggcatcgcggcggtcatcgccccgtggaacttcccgttcgccatcgccatcggcatggcttcggcagccatcgtcacgggcaaccccgtcatcttcaagccctcgtccatctcgtcgcgcatcggttacaaccttgccgaggtcttccgcgaggcggggcttcccgagggcgtgttcaactactgccccggccgcagttccatcatgggcgactacctcgtcgaacaccccgacatcagcctcatctgcttcacgggctccatggaagtgggcctgcgcattcaggagaaggccgcgaaggtgcagcccgggcagcggcagtgcaaacgcgtcatcgccgagatgggcggcaagaacgccaccatcatcgacgacgacgccgacctcgacgaggccgtgttgcaggtgctgtactccgccttcggctttcaggggcagaagtgctcggcctgctcacgggtcatcgttctcgacgccatctacgaccgcttcatcgaacggctggtgaaggccgcctcgtccatccacatcggcccatccgaagacccgtccaactacatgggccctgtggctgacgccaccttgcagaagaacgtcagcgactacatccgcatcgccgaagaagagggcagggtgctgctcaagcgcaccgaccttcccgcggaaggctgctacgtgccacttaccatcgtcggcgacatccggcccgaacatcgcatcgcgcaggaggagattttcggccctgtgcttgccgtcatgcgcgccgcgaccttcgatgaggccctctccatcgccaacggtacgcgcttcgccctgacgggtgccgtcttctcgcgcagccccgaacacctcgacaaggcacgccgcgaattccgcgtgggcaacctctacctcaacaagggctccaccggggcgcttgtcgagcgtcagcccttcggcggcttcgccatgtccggcgtgggctccaagacgggcgggcccgactacctgttgcagttcatggacccgcgcgtggtgacggagaacaccatgcgtcgcggtttcacccccatcgacgaggacgacgactggatcgtctag

SEQ ID NO: 12551 - protein, 1006 aa, Desulfovibrio vulgaris
MDQQHLDGKVVERGKEFFRSISGEAPSIFNKGWWTGKVMDWAMQNEDFKVQLFRFVDVLPYLNTSESLLRHIREYFATEDADIPPVLKWGAGKAGIGGALTAKLMGMTIRSNIEGMARQFIIGDNSKEAVKGLAKLRKDGFTFTVDLLGEATVSEEESEAYAQGYHEVVDAIAREQEKWKALPGNGPVEGFDWGATPKVNVSIKPSALYSQAKPVDVEGSVRGILSRLVPIYRKVVAMGGFLCIDMEQLKYKEMTLELFKRLRSDPEFRHYPHLSIVLQAYLRDTEKDLDDLLHWARSEKLPIGIRLVKGAYWDYETVIAKQNGWEIPVWTDKPESDIAYEKLAHRILENSDIVYFACASHNVRTIAAVMETALALNVPEHRYEFQVLYGMAEPVRKGLKNVAGRVRLYCPYGELIPGMAYLVRRLLENTANESFLRQSFAEGAALERLLENPQKTLHRLLAARPEPRAVEPGPGGLPPFTNDAMIDFTVPDNRKAFVEALADVRSRFGQTVPLYIGGRDVTTADLIPTTNPAKPAEVVASICQAGRPEIDDAIAAAKKAALTWRDTSPADRAAYLRRAADICRKRIWELSAWQVVEVGKQWDQAYHDVTEGIDFLEYYAREMLRLGAPRRMGRAPGEHNHLFYQPKGIAAVIAPWNFPFAIAIGMASAAIVTGNPVIFKPSSISSRIGYNLAEVFREAGLPEGVFNYCPGRSSIMGDYLVEHPDISLICFTGSMEVGLRIQEKAAKVQPGQRQCKRVIAEMGGKNATIIDDDADLDEAVLQVLYSAFGFQGQKCSACSRVIVLDAIYDRFIERLVKAASSIHIGPSEDPSNYMGPVADATLQKNVSDYIRIAEEEGRVLLKRTDLPAEGCYVPLTIVGDIRPEHRIAQEEIFGPVLAVMRAATFDEALSIANGTRFALTGAVFSRSPEHLDKARREFRVGNLYLNKGSTGALVERQPFGGFAMSGVGSKTGGPDYLLQFMDPRVVTENTMRRGFTPIDEDDDWIV

SEQ ID NO: 12552 - DNA, 1551 bp, Thermus thermophilus
  CDS (1)..(1551)
atgacggtggaacctttccggaacgagcccattgagaccttccagacggaggaggcccggcgcgccatgcgcgaggccctgaggcgggtgcgggaggagttcggccgccactaccccctctacatcgggggggagtgggtggacacgaaggagcgcatggtctccctcaacccctcggcgccaagcgaggtggtgggcaccaccgccaaggcggggaaggcggaggcggaggccgccctcgaggccgcctggaaggccttcaagacctggaaggactggccccaggaggaccggagccgcctcctcctcaaggcggcggccctcatgcggcggcggaagcgggagctggaggccaccttggtctacgaggtgggcaagaactgggtggaggcctccgcggacgtggccgaggccattgacttcattgagtactacgcccgggccgccctgcgctaccgctaccccgccgtggaggtggtgccctaccccggggaggacaacgagagcttctacgtgcccctgggggccggggtggtcatcgccccctggaacttccccgtggccatcttcaccgggatgatcatgggccccgtggccgtggggaacaccgtgatcgccaagcccgccgaggacgccgtggtggtgggggccaaggtctttgagatcttccacgaggcgggcttcccccccggggtggtcaacttcctgcccggggtgggggaggaggtgggggcgtacctggtggagcaccccaggacccgcttcatcaacttcacggggagcctggaggtgggcctgaagatctacgaggccgccgggcgcctggccccgggccagacctggttcaagcgggcctacgtggagaccgggggcaaggacgccatcatcgtggacgagacggcggactttgacctggccgccgagggggtggtggtctccgcctacggcttccaggggcagaagtgctccgcggcgagccgcctcatcctcacccagggggcctacgagcccgtgctggagagggtcctgaagcgggcggaaaggctttccgtaggccccgccgaggagaaccccgacctcggccccgtggtgagcgccgagcaggagaggaaggtcctctcctacattgagatcgggaagaacgagggccagctcgtcctgggggggaaacgcctcgagggggaggggtacttcatcgcccccacggtcttcaccgaggtgccgcccaaggccaggatcgcccaggaggagatcttcggcccggtgctttccgtgatccgggtcaaggacttcgccgaggccctggaggtggcgaacgacacgccctacggcctcacgggcggggtctactccaggaagcgggagcacctggagtgggccaggcgggagttccacgtgggcaacctctacttcaaccgcaagatcaccggggccctggtgggggtccagcccttcggcggctttaagctttccggcaccaacgccaagaccggggccttggactaccttaggctcttcctggagatgaaggcggtggccgagcgcttctag

SEQ ID NO: 12553 - protein, 516 aa, Thermus thermophilus
MTVEPFRNEPIETFQTEEARRAMREALRRVREEFGRHYPLYIGGEWVDTKERMVSLNPSAPSEVVGTTAKAGKAEAEAALEAAWKAFKTWKDWPQEDRSRLLLKAAALMRRRKRELEATLVYEVGKNWVEASADVAEAIDFIEYYARAALRYRYPAVEVVPYPGEDNESFYVPLGAGVVIAPWNFPVAIFTGMIMGPVAVGNTVIAKPAEDAVVVGAKVFEIFHEAGFPPGVVNFLPGVGEEVGAYLVEHPRTRFINFTGSLEVGLKIYEAAGRLAPGQTWFKRAYVETGGKDAIIVDETADFDLAAEGVVVSAYGFQGQKCSAASRLILTQGAYEPVLERVLKRAERLSVGPAEENPDLGPVVSAEQERKVLSYIEIGKNEGQLVLGGKRLEGEGYFIAPTVFTEVPPKARIAQEEIFGPVLSVIRVKDFAEALEVANDTPYGLTGGVYSRKREHLEWARREFHVGNLYFNRKITGALVGVQPFGGFKLSGTNAKTGALDYLRLFLEMKAVAERF

SEQ ID NO: 12554 - DNA, 1485 bp, Bacillus cereus
  CDS (1)..(1485)
atgttaacgaaaaacattgaactaaaaccaaaagtgaaagcgtttttaaatgaagaaattaaaatgtttattaatggtgaatttgttccttccattagcgggaagacatttgagacatacaatccagcaactgaagatgttttagctgttgtatgcgaagcacaagaagaggatattaatgtcgcagtaaaagcggcaagatctgcatttgaatcaggaccttgggcagaaatgactactgctgaaagagcacatcttatttataaattagcagacttaattgaagagcatggagaagaattggcgcagttagaagctttagataacgggaaaccatatcaagtagcactggatgatgatattgcagcgactgtagaaaattaccgctattatgcgggatgggctacgaaaattatcgggcaaacaattccgatttcaaaagattacttaaattatacacgccatgaacctgttggggttgtaggacaaattattccttggaattttccgctcgttatgtcttcttggaaaatgggagctgcactagcgacaggttgtacgatcgtattaaaaccagcagaacaaacgcctttatcgttattatatacagcgaaactttttaaagaagcaggttttccaaaaggtgttgtaaactttgtgccaggtttcggccctgaagcgggagctgcaattgtaaaccatcatgatattgataaggtagccttcacaggttcaacagttacaggaaaatatattatgcgtcaatctgcagaaactattaaacatgtaacgttagaacttggtggtaaatcaccaaatatcattttagaagacgctgatttagaagaagcgattaacggcgcattccaaggtattatgtataatcacggccaaaattgtagtgctggatctcgcgtgttcgttcaccgaaaacattacgaaacagtcgtaaatgaactagtaaaaatggcgaataacgtgaaacttggagcaggtatggagaaggaaacagaaatgggtccactcgtatctaaaaagcaacaagagcgtgtactacattacattgaacaaggaaaagcagaaggcgctactgttgctgctggtggtgaacgtgcatttgaaaaaggttattttgtacagccaacggtattcacaaatgttactgatgatatgacaattgtgaaagaagaaatttttggaccagttgtcgttgtacttccatttgattcaacagaagaggtaatcgaaagagcaaatcgctcgtcatacggactcgctgcaggcgtatggacacaaaatattaaaactggacatcaagttgccaataaattaaaggcaggaacagtatggattaatgattataacttagaaaatgcagctgcaccatttggtgggtttaaacaatctggaatcggtcgtgagttaggttcatatgcgcttgataattacacagaagtgaagagtgtttgggtaaatataaagtaa

SEQ ID NO: 12555 - protein, 494 aa, Bacillus cereus
MLTKNIELKPKVKAFLNEEIKMFINGEFVPSISGKTFETYNPATEDVLAVVCEAQEEDINVAVKAARSAFESGPWAEMTTAERAHLIYKLADLIEEHGEELAQLEALDNGKPYQVALDDDIAATVENYRYYAGWATKIIGQTIPISKDYLNYTRHEPVGVVGQIIPWNFPLVMSSWKMGAALATGCTIVLKPAEQTPLSLLYTAKLFKEAGFPKGVVNFVPGFGPEAGAAIVNHHDIDKVAFTGSTVTGKYIMRQSAETIKHVTLELGGKSPNIILEDADLEEAINGAFQGIMYNHGQNCSAGSRVFVHRKHYETVVNELVKMANNVKLGAGMEKETEMGPLVSKKQQERVLHYIEQGKAEGATVAAGGERAFEKGYFVQPTVFTNVTDDMTIVKEEIFGPVVVVLPFDSTEEVIERANRSSYGLAAGVWTQNIKTGHQVANKLKAGTVWINDYNLENAAAPFGGFKQSGIGRELGSYALDNYTEVKSVWVNIK

SEQ ID NO: 12556 - DNA, 3141 bp, Wolbachia pipientis wMel
  CDS (1)..(3141)
atgataagctctatacaagaacctaatgaactcagaaaacgtttacaaggattttatcgtactgatgaaaagagttatatacgttatcttgtagaaaaagcagagctttcggctgattcaaaaaatagaatttataatattgcaaaacaagttattgaaaaaatcaaacacaataaattaagtattgtagattcctttatgcagcaatactcgctttccaatgatgaaggaatagcattgatgtgccttgctgaatcactacttagaataccagatgattatacaatagacgaaataatcaaagataaaattgccaatcaggaatggaataaatatttagggcactcttcttcgttgtttgtcaatgcttccacatggagcttgatgataggtagcagtatattgagagataatgaaggcgattcgaagttctattacgcaatttctaagttacttaagaatttaggagaaccgatcattcgcaaagcagtaaaacaagcaatgtctatgcttggtaatcattttgttgttggagaaaccatagaagaagctttaaggtatgcaaaactagatgacaatagtaagtttttatactcttttgatatgcttggcgaaactgctcacacagctgaagatgcagaagagtattttaattcatacatgcactcaataaaagctataggtgaatccactgaaataaatgattgttttaaatcgcatggagtttcaatcaaattgtctgcgttacatccacgttatgaatttggtcaattcgataatatagctgaagagttgagagctaaactgctagagctttgtcatgaagcaaaaaaatacaacatttcattatgcatagatgcagaagaaacagaaaggcttgaaatgtccttaatcttgtttgaacaattacggcttgatgaatcactttctgagtgggaagggcttggcttggctgtgcaagcatatcaaaagcgcgctttatctgttcttgactttgttgaagatgttgctatccgatcaaagcacaaaattatggtgaggcttgtaaaaggtgcatattgggattcagaaatcaagcgtacgcaagaattgggattaaatgattactcagtatttacaagaaaaagctatactgacgtatcttacttcgtgtgcgcacagaaacttttgagtaaaccaaacagcttttacccatgctttggaactcataacgtctatacttttgcttctatcatggaacttgctgataaaaaccaccctggatttgaatttcaacgcttacatggaatggcaaaagacttatatgattatgcaatgtcagagcttgcaacaaatgttagctgtcgtgtctacgcacccgttggggaacatagtgacttgttgccttatcttataagacgccttcttgaaaatggagctaatagttcgtttgttaatcaaataagtgatcctaacgttaaaatcgatgagttaatttcagatccactggaaaaagctataaattttaattatgaacctcatccaggcattccattaccacaagatattttgggaccagaaagaaaaaattccttggggatggatattagtgattctgtgatagtctcacaatttgcagatgatataaagggttttagtgaaaaaaagtggcaaattggaccaataattgatggaaaagcactatttgataatgctgaatttatcgaagtagtgaatcctgcacatttggaaaatgtaattggagaagtgtcaagtgcaacaagcgatcaagctttaaacgctcttgaaatagcacacagtgcttttgctaagtggcagaatgtttcagcagaagagcgcgctaaatgccttgaaaaagctgcagatttgcttgaggaaaggatgaaagagttaatttacattctgattgtggaagcaggaaaaattttatccgatgcaatagcagaagtaagagaggcaatcgactttctgcgttattatgcaatgatagcaaaaaatgaactgagcgactggaaaaaattgccgggcccaacaggtgaagataacttcatcttttttgaaggcagaggagttttcttatgcatatcaccgtggaattttccgctcgctatcttcattgggcaggtctcagctgcacttgcagcaggtaatgcagtgctggcaaaaccggcagagcaaacgccgattattgcctacgaagctgttaagatactacatgaagctgggataccaaagaatgtgttacacctcattcctggggatggtggatatttaggcaaaatattagttccagacaatagaattgccggagtagcttttactggctcaacacaaactgctcaaataatcaataaaatgcttgcaaatagggatggtcctattgtgccacttattgctgaaacaggagggctcaatgctatgatagttgatagctctgctcttttagagcaagtggctatggatgctttgctttctgcgtttcgtagcagtggtcaacgctgttctgcacttagagtgctgtttattcaagaggacatagcagagaagcagataaaaatgatatgcggtgcagcgcaagaactcaagattggtgacccaatacaacttagtactgatattggtccaataattgacaaagcatctatcgatatgctaactcaacatacgcaaaaaatgtcagaggacgaagattcaaatctgttatttaaagtacccatggatacaaattctcataatggttatttctttcctccatatatttatgagatacaaaaaatttcgcaattaaagcaagaagtatttggtcctattttacatatcatacgttttaacaagtcacaattaaatgaagttataagtgatataaatagtactggatatgggcttacgttttctttgcagagtcgtatacaaagtcaaattgaaactataagtaaaaaaatatcagttggaaatgtctacatcaaccgtaaccagataggtgcagcagttgggatacaaccatttggtggtagaggactatctggcactgggccaaaagctggtggtcctcattatttacagcgtttttctacagaaaaagttgtaagtgttaacactacagcatttggtggtaacactacacttatgtgtttggattaa

SEQ ID NO: 12557 - protein, 1046 aa, Wolbachia pipientis wMel
MISSIQEPNELRKRLQGFYRTDEKSYIRYLVEKAELSADSKNRIYNIAKQVIEKIKHNKLSIVDSFMQQYSLSNDEGIALMCLAESLLRIPDDYTIDEIIKDKIANQEWNKYLGHSSSLFVNASTWSLMIGSSILRDNEGDSKFYYAISKLLKNLGEPIIRKAVKQAMSMLGNHFVVGETIEEALRYAKLDDNSKFLYSFDMLGETAHTAEDAEEYFNSYMHSIKAIGESTEINDCFKSHGVSIKLSALHPRYEFGQFDNIAEELRAKLLELCHEAKKYNISLCIDAEETERLEMSLILFEQLRLDESLSEWEGLGLAVQAYQKRALSVLDFVEDVAIRSKHKIMVRLVKGAYWDSEIKRTQELGLNDYSVFTRKSYTDVSYFVCAQKLLSKPNSFYPCFGTHNVYTFASIMELADKNHPGFEFQRLHGMAKDLYDYAMSELATNVSCRVYAPVGEHSDLLPYLIRRLLENGANSSFVNQISDPNVKIDELISDPLEKAINFNYEPHPGIPLPQDILGPERKNSLGMDISDSVIVSQFADDIKGFSEKKWQIGPIIDGKALFDNAEFIEVVNPAHLENVIGEVSSATSDQALNALEIAHSAFAKWQNVSAEERAKCLEKAADLLEERMKELIYILIVEAGKILSDAIAEVREAIDFLRYYAMIAKNELSDWKKLPGPTGEDNFIFFEGRGVFLCISPWNFPLAIFIGQVSAALAAGNAVLAKPAEQTPIIAYEAVKILHEAGIPKNVLHLIPGDGGYLGKILVPDNRIAGVAFTGSTQTAQIINKMLANRDGPIVPLIAETGGLNAMIVDSSALLEQVAMDALLSAFRSSGQRCSALRVLFIQEDIAEKQIKMICGAAQELKIGDPIQLSTDIGPIIDKASIDMLTQHTQKMSEDEDSNLLFKVPMDTNSHNGYFFPPYIYEIQKISQLKQEVFGPILHIIRFNKSQLNEVISDINSTGYGLTFSLQSRIQSQIETISKKISVGNVYINRNQIGAAVGIQPFGGRGLSGTGPKAGGPHYLQRFSTEKVVSVNTTAFGGNTTLMCLD

SEQ ID NO: 12558 - DNA, 1641 bp, Mycobacterium paratuberculosis
  CDS (1)..(1641)
atggatgcgatcactggaatttccgaggtgccggtgccggctaacgagccggtccacgattacgcgccgcgctccgcggagcgcgcccggttacgcgccgagttggccgcgctggccggccacccgatcgacctgccgcacgtcatcggcggccgccaccggatgggcgacggtgaacgcatcgacgtcgtccagccgcaccggcacgccgccaagctgggcaccctgaccaacgccgtgcacgccgacgcgaccgcggccgtcgacgccgcgatggccgcgaaaagcgattgggcggcaatgcctttcgatgagcgggcggcggtgtttttgcgggccgctgatctgctggccgggccgtggcgggagaagatcgccgcagcgacgatgctgggccaatccaagtcggcctatcaggccgagatcgactcgccctgcgagcagatcgacttctggcggttcaacgtggcgtttgcccggcagatcctggcgcagcagccgatcagcgggccgggggagtggaatcgcagcgactaccgcccgctggacggctttgtctacgcgatcactccgttcaatttcacctccattgccggcaacctgccgaccgcgccggcgctgatgggaaacaccgtggtgtggaagccgtcgatcacccagaccctgtcggcgtatctgaccatgcagttgctcgaggcggccgggttgccgcccggggtgatcaacctggtgaccggcgacgggttcgcggtttccgatgtggcactggcggatcggcggctggcgggcattcacttcaccgggtcgacggcgaccttccagcggctgtggtaccaggtgggcaccaatatcggtcactaccactgctatccgaggctggtgggcgagaccggcggcaaggacttcatcgtcgcgcacgcctccgcacgcccggatgtgttgcgcaccgcgctgattcgcggggccttcgactaccaggggcagaagtgctcggcggcgtcgcgggcgttcatcgcgcagtcggtctggcggcggatgggcgacgagtttctggccgagaccgccgcattgcgctacggcgacgtcaccgatctgaccaacttcggcggcgcgctgatcgaccggcgggcctttgtcaagaacgtcgacgccatcgaacgcgcgaagggcgcgccgcacgtcaccctcgcggtgggcggcgaatacgacgacagcgaaggctatttcgtgcggccgacggtgttgctgtccgacgacccggccgacgagtcgttcgcgaccgaatacttcggcccgctgctgtcggtgcacgtgtatcccgacgacgactaccagcgaatcctcgacgtggtcgacaccggatcgcggtacgcgctgaccggtgcggtcatcgccgacgaccgggcggcggtgctggccgcgcaggaccggctgcgctttgccgccgggaacttctacgtcaacgacaagccgaccggggcggtggtggggcgccagccgttcggcggttcgcgcggctcgggaaccaacgacaaggccggctctccgttgaacctgctgcgctggacgtcggcccgcaccatcaaggagacgttcgtcccggccaccgaccacacctatccgcacatggcggccgactga

SEQ ID NO: 12559 - protein, 546 aa, Mycobacterium paratuberculosis
MDAITGISEVPVPANEPVHDYAPRSAERARLRAELAALAGHPIDLPHVIGGRHRMGDGERIDVVQPHRHAAKLGTLTNAVHADATAAVDAAMAAKSDWAAMPFDERAAVFLRAADLLAGPWREKIAAATMLGQSKSAYQAEIDSPCEQIDFWRFNVAFARQILAQQPISGPGEWNRSDYRPLDGFVYAITPFNFTSIAGNLPTAPALMGNTVVWKPSITQTLSAYLTMQLLEAAGLPPGVINLVTGDGFAVSDVALADRRLAGIHFTGSTATFQRLWYQVGTNIGHYHCYPRLVGETGGKDFIVAHASARPDVLRTALIRGAFDYQGQKCSAASRAFIAQSVWRRMGDEFLAETAALRYGDVTDLTNFGGALIDRRAFVKNVDAIERAKGAPHVTLAVGGEYDDSEGYFVRPTVLLSDDPADESFATEYFGPLLSVHVYPDDDYQRILDVVDTGSRYALTGAVIADDRAAVLAAQDRLRFAAGNFYVNDKPTGAVVGRQPFGGSRGSGTNDKAGSPLNLLRWTSARTIKETFVPATDHTYPHMAAD

SEQ ID NO: 12560 - DNA, 3015 bp, Geobacter sulfurreducens
  CDS (1)..(3015)
atgctaaacagtgagctgaacacgaagatcgttaaccgcggcaaggagtttttcggcagcatttccggcgagaagccctccctcttcaacaagggggcctggatgggcaaggccatggactggagcatgcagaacgagcagttcaagatccagatgttccggtttgtggacgtgttcccctcgctgaccaccagtaagctcctgacggagcatattcgcgaatatttcggcaacgagcaggatatgcccgcgttcatgtccacgggggccaaggtggcggggatgctcggttccttcggcggggccgtgctgaacaaggtgctcacctccaatatcgaggagatggcccgccagttcatcgtgggcgagaccaccaaggaggcggtgaaaaacctggagaagctccgcaaggacggcttcgccgcggtggttgacgtgctcggcgaggcgaccctttccgaagaggaagcagaagtctacacgaacacctacctggagctgctggaggccctgaagaaagagcaggggagctggaaaggcctgcccggcaagggaggcgaccctggcttggactgggggcatgcccccaaggtgaacattgcggtgaagcccacggccctcttctgcctggccaatccccaggacttcgaggggtcggtggtggccatccttgaccggatgcgccgcatcttcaagaaggtaatggagctgaatggcttcctctgcatcgatatggaatcgtaccgccacaaggagatcatcctggaggtcttccggcgcctgaaactggagtaccgcgactatccccacctgggaatcgtgctccaggcttacctgaaggataacgacaaggacctggatgaccttctggcctgggcgaaggagcacaaggttcagatatccgtccgtctcgtgaagggtgcctactgggactacgaaacggtcaaggcgaagcagaacgattgggaagtcccggtctggaccatcaaggcggagagcgacgcggcctacgagcgccaggcgcggaagatcctggaaaaccaccagatctgccactttgcctgcgcctcccacaatatccggaccatatcggcggtcatggagatggcgcgggaactgaatgtgccggaggatcgttatgaattccaggttctctacggcatggccgaaccggtgcgcaaggggattctgaaggtggcgggacgcatccgcctctatgcaccctacggcaacatggttccggggatggggtacctggtgcgtcggctcctggagaacaccgccaatgaatcgttcctgcgccagagctttgccgaggacgcccagatcgagcgcctgctggaagacccggctgtcacggtcgagcgggaacgggccgcccgcgccgcaaagccgaagaaggagcggaaaggcctcggcgggcttcccccgttcaacaacgaggccatggtggacttcacccgggctgatcaccgggctgccttcccgaagcacatcgcccaggtgcggacccagttgggcaagacctatcccctgttcataaacgggaaagaggtccggaccaacgacctcatccccaccgtgaaccccaacaagccctctgaggtcctgggccagatctgccaggcaggcaccacggaggtgggcgacgccatcgctgccgccaaggcagccttcccggcatggcgcgacaccgatccccggaccagggccgaatatctcctgaaggcggcccaggccgcccgcaagcgactcttcgaactctcggcctggcaggtcctggagatcggcaagcagtgggatcaggcctatgccgacgtgaccgaggccatcgacttcctggaatactatgcccgtgagatgatccggctgggccagccccagcgggtgggccacgccccgggcgaactgaaccattacttctacgagcccaaaggggtggccgcggtcatcgcaccctggaacttccccctggccatcagcatgggcatggcgtcggcagccatcgtcaccggcaactgcgtggtcttcaagccgtcggggatcacctcgatcatcggctggcacttggtggagctgttccgcgaggcgggcctccccgaaggggtctttaacttcacgccgggtcgcggctcggtcatgggcgactacctggtggatcacccggacatcagcctgatcgccttcaccggctccatggagaccggcctgcggatcatcgagcgtgccgccaaggtccatccgggccaggccaacgtgaagaagatcatctccgagatgggcggcaagaacgccattatcatcgacgacgacgccgacctcgacgaggcggtgccccatgtcctctactcggccttcggcttccaggggcagaaatgctccgcctgttcccgggtcatcgtgctggatgcagtttatgataaattcatcgagcggctcgtttccatggccaaggccaccaaggtgggcccctccgaggatccggccaactacatgggtgccgtggccgacgacaaggccatgaagagcatcaaggagtacgcggagatcggcaagcgggaagggcatgttctctatgagagcccggtgccggccggtgaggggtatttcgtccccatgaccatcattggcggcataaagcccgagcaccgtatcgcccaggaggagatcttcggaccggttcttgcggttatgcgggccaaggacttcgaccaggccatcgaatgggccaactccacgcagtttgccctcaccggcggtatcttcagccgcagccccgaacacctggccaaggcccgccgggagttccgggtggggaacctctacatcaaccggaacaacaccggtgccttggtggagcggcagcccttcggcggcgcccgcatgtccggggtcggcaccaaggccggcggtcccgactacctcctccacttcatggacccgcgggtggtcactgagaacaccatgcggcgcggtttcgctcctatcgaggaggacgacgactgggtcgattag

SEQ ID NO: 12561 - protein, 1004 aa, Geobacter sulfurreducens
MLNSELNTKIVNRGKEFFGSISGEKPSLFNKGAWMGKAMDWSMQNEQFKIQMFRFVDVFPSLTTSKLLTEHIREYFGNEQDMPAFMSTGAKVAGMLGSFGGAVLNKVLTSNIEEMARQFIVGETTKEAVKNLEKLRKDGFAAVVDVLGEATLSEEEAEVYTNTYLELLEALKKEQGSWKGLPGKGGDPGLDWGHAPKVNIAVKPTALFCLANPQDFEGSVVAILDRMRRIFKKVMELNGFLCIDMESYRHKEIILEVFRRLKLEYRDYPHLGIVLQAYLKDNDKDLDDLLAWAKEHKVQISVRLVKGAYWDYETVKAKQNDWEVPVWTIKAESDAAYERQARKILENHQICHFACASHNIRTISAVMEMARELNVPEDRYEFQVLYGMAEPVRKGILKVAGRIRLYAPYGNMVPGMGYLVRRLLENTANESFLRQSFAEDAQIERLLEDPAVTVERERAARAAKPKKERKGLGGLPPFNNEAMVDFTRADHRAAFPKHIAQVRTQLGKTYPLFINGKEVRTNDLIPTVNPNKPSEVLGQICQAGTTEVGDAIAAAKAAFPAWRDTDPRTRAEYLLKAAQAARKRLFELSAWQVLEIGKQWDQAYADVTEAIDFLEYYAREMIRLGQPQRVGHAPGELNHYFYEPKGVAAVIAPWNFPLAISMGMASAAIVTGNCVVFKPSGITSIIGWHLVELFREAGLPEGVFNFTPGRGSVMGDYLVDHPDISLIAFTGSMETGLRIIERAAKVHPGQANVKKIISEMGGKNAIIIDDDADLDEAVPHVLYSAFGFQGQKCSACSRVIVLDAVYDKFIERLVSMAKATKVGPSEDPANYMGAVADDKAMKSIKEYAEIGKREGHVLYESPVPAGEGYFVPMTIIGGIKPEHRIAQEEIFGPVLAVMRAKDFDQAIEWANSTQFALTGGIFSRSPEHLAKARREFRVGNLYINRNNTGALVERQPFGGARMSGVGTKAGGPDYLLHFMDPRVVTENTMRRGFAPIEEDDDWVD

SEQ ID NO: 12562 - DNA, 1722 bp, Ashbya gossypii
  CDS (1)..(1722)
atgctgtctagatcgaggctattaggctactcggccaggaccatcgcgcagttgtcgcggccaggatgcccccggataagcaacgaggccgtcaagccgttcagcaagcgggacacgctggactgggacctgttgcgggcgtcgctgtccaagttcaacaactcgtcgctcgacgtgccgctcgtgataaacggcgaacggatatacttcaacgacgccggcaagcgtgagctgtttaagcaggtgaacccggcgcggcacacgcaggtgctggcgcacgtgacgcaggcctcgagggaggacgtgcgcgcggccgtgcgggccgcgcaagacgccaagcagaagtggtacgagacgccgttctacgaccgcgcagcggtgttcctcaaggccgcggacctggtggccacgaagtaccggtacgacatgctcgcggcaaccatgctcggtcaggggaaaaacgtgcagcaagcggagatcgactgcatcacggagctggcggacttcttccgcttcaacgtcaagtacgcggaggagctgtaccagcagcagcccgcagaatcgagcccgggcgtgtggaaccgctccgagtaccggccactggagggctttgtgtatgcggtatcgccgttcaacttcaccgcaatcgcaggcaacctggtgggtgcccccgccctcatggggaacacggtggtgtggaagccgtcgcagaacgccgcgctctcgaactacctgctgctcacggtgctggaggaggccggcctgccccgcggcgtgatcaacttcgtccccggcaaccccgtcgacgtcaccgaggaggtgctcgcggataaggccctcggcgggctgcacttcaccggctccacggccgtcttcaagcagctctacggcaagatccagcaaggcgtcgtcagcgggctgtaccgcgactacccccgcatcgtcggcgagaccggcggcaagaacttccacctcgtgcatccgagcgcaaacctgccccacgccgtgctctcgacgctgcgcggcgccttcgagttccagggccagaagtgctccgccgcgtcgcgcctgtacctcccccagtcgaaggccgacgcgttcctcgcagacctcgccggcacgctcgccgccatcaagcccgccaacacctccgcgtccagcatcaacggcggggacctccacgccttcatgggccccgtgatccacgagcagagcttcgacaagctcgccgccgccatcgagcgcgcgcgcaccgaccccgagctcgagatcctctacggcggcgaccacagcaagagccagggctacttcgtcggccccaccgtcgtccgcacctccaacccccgccacgacttcatgaccgccgagttcttcggccccatcctgaccgtctacgagtacccggacgcccagttcgaccaggtctgcgacctcatcgactccacctccgcctacggcctcacgggcgccgtcttcgcgcgcgaccgagacgccatcgccgccgccgaccgccgcctcaagtacgccgcaggcaacttctacatcaacgacaaggccaccggcgccgtcgtcgcccagcagtggttcggcggcgcccgcatgagcggcaccaacgacaaggccggctccccgaacgtgctctcgcgcttcgtcagcgtccgcagcgtcaaggagaacttctacgagctcaccgactttaagtatccctccaactacgagtag

SEQ ID NO: 12563 - protein, 573 aa, Ashbya gossypii
MLSRSRLLGYSARTIAQLSRPGCPRISNEAVKPFSKRDTLDWDLLRASLSKFNNSSLDVPLVINGERIYFNDAGKRELFKQVNPARHTQVLAHVTQASREDVRAAVRAAQDAKQKWYETPFYDRAAVFLKAADLVATKYRYDMLAATMLGQGKNVQQAEIDCITELADFFRFNVKYAEELYQQQPAESSPGVWNRSEYRPLEGFVYAVSPFNFTAIAGNLVGAPALMGNTVVWKPSQNAALSNYLLLTVLEEAGLPRGVINFVPGNPVDVTEEVLADKALGGLHFTGSTAVFKQLYGKIQQGVVSGLYRDYPRIVGETGGKNFHLVHPSANLPHAVLSTLRGAFEFQGQKCSAASRLYLPQSKADAFLADLAGTLAAIKPANTSASSINGGDLHAFMGPVIHEQSFDKLAAAIERARTDPELEILYGGDHSKSQGYFVGPTVVRTSNPRHDFMTAEFFGPILTVYEYPDAQFDQVCDLIDSTSAYGLTGAVFARDRDAIAAADRRLKYAAGNFYINDKATGAVVAQQWFGGARMSGTNDKAGSPNVLSRFVSVRSVKENFYELTDFKYPSNYE

SEQ ID NO: 12564 - DNA, 1632 bp, Porphyromonas gingivalis
  CDS (1)..(1632)
atgaataattcgcattttgcttttgccaagccggtcaatgagccggtttatggctatgccccgggttcgccggaaagaaaaaaactgaaagaggagcttcaacgacaattgtctacgcctatagagattcctattatcataggaggcaaagaaatccgaacgggcgataccggcactgtggtgatgccccataaccatgctgttcgactggccacctatcatcgggtaggggagaaagaagtgctgcaagctatcgaagctgccgaaaaggctcgtcaggattggagccgtctgccatggactgagcgtgcttccgtaatgttgcgcatcggagagttgatctctaccaaatatcgctatcagctggcagcttctgtaatgctcggacagagcaagaatccgatgcaggcagagatcgatgctccctgcgagttgatcgatttcttgcgtttcggtgcctactatgcgggccagatctatgccgatcaacccatcagtgagaaaggcattctcaatcgggtggagtaccgttcgctcgaaggtttcgttttggccgttactcctttcaatttcaccagtattgcttccaacctgaatctggcaccggccatgatggggaatactactatctggaagccttccactacagctcttcatagcaactacctccttatgaaaatcttccaagaggccggtttgcccgatggtgtggtcaatttccttcccggacagggtagcttgatcggtcgggtagccacggcgaacgaacacttggccggtttccattttaccggttctactgctacgttcaacacgctgtggaagagcatcgccggcaatatagatcgctatcgtggctatccccgtatagtgggcgaaacgggaggaaagaacttcgtgatggttcatccctcggctgaagcatgcgaagtggctacggctcttgtgcgcggagctttcgagtatcagggacaaaagtgttcggctgcaagtcgcgcatatatccctcgttctttgtggccgagcgtgaaagaggtgatgggcgatatgctcgacagtatcaaaatgggtgacgtaatggaattcgacaactttgtcaacgccgttatcgacgaagcctctttcgataatatcatgaactatttggctgccgccaagcgagattcagatgccaagatcatattcggtggtgaaggagataagagcgtgggttactttatacggcctaccgttattgaaacgacaaatccgcattacgcaacgatgacggatgagcttttcggccccgtcctgaccgtatatgtctatgaggacaaagactttgccgatacgctacgcctttgcgacagtaccggccgttacgggctgaccggctccatcttctctcgcgaccgctatgccatcgaacaggctttggatgctctgcgcttctccgccggtaacttctacatcaatgacaagccgacgggtgccgttgtaggacagcaaccttttggcggtgcgcgtgccagtggaactaacgacaaggcaggcgggccacttaatctgatgcgttggtgcaatccacgtaccgtgaaagaaaccttcgtgccaccgacggattatccctatccgtttttggcaaaggattga

SEQ ID NO: 12565 - protein, 543 aa, Porphyromonas gingivalis
MNNSHFAFAKPVNEPVYGYAPGSPERKKLKEELQRQLSTPIEIPIIIGGKEIRTGDTGTVVMPHNHAVRLATYHRVGEKEVLQAIEAAEKARQDWSRLPWTERASVMLRIGELISTKYRYQLAASVMLGQSKNPMQAEIDAPCELIDFLRFGAYYAGQIYADQPISEKGILNRVEYRSLEGFVLAVTPFNFTSIASNLNLAPAMMGNTTIWKPSTTALHSNYLLMKIFQEAGLPDGVVNFLPGQGSLIGRVATANEHLAGFHFTGSTATFNTLWKSIAGNIDRYRGYPRIVGETGGKNFVMVHPSAEACEVATALVRGAFEYQGQKCSAASRAYIPRSLWPSVKEVMGDMLDSIKMGDVMEFDNFVNAVIDEASFDNIMNYLAAAKRDSDAKIIFGGEGDKSVGYFIRPTVIETTNPHYATMTDELFGPVLTVYVYEDKDFADTLRLCDSTGRYGLTGSIFSRDRYAIEQALDALRFSAGNFYINDKPTGAVVGQQPFGGARASGTNDKAGGPLNLMRWCNPRTVKETFVPPTDYPYPFLAKD

SEQ ID NO: 12566 - DNA, 3981 bp, Photorhabdus luminescens
  CDS (1)..(3981)
atgggtagtacaacaatgggcgtgaagcttgatgaagcaacgcgtgatcgcattaaagctgcggcacaacggattgaccgcactccacattggctaattaaacaagctatttttaattatcttgaacgtcttgaaaatgatgaacagatcgctgaactctcgtccaatcaagatgttaaagaggagaagataatcgcagaagaaacggtaacagattctgctcatcaacctttcctcgacttcgctgagcatatcctgcctcaatcagtaaaacgttccgcaattactgcggcctatcgcctgccagaaacacaagccattcccatgctgttacaacaggcacaattgccggaagatcaggcacaagcaactcataagctggcttacagcattgcagaaaaattacgtaaccagaaaaacagcatgggtcgttcaggtctggttcaagggttattgcaagaattctcgctttcatctcaggaaggcgttgcactaatgtgtcttgcggaagctttactccgtatccctgataaagccactcgcgacgcgctgatccgcgacaaaatcagtaacggcaattggcattcccatctgggccaaagttcatccatgtttgtcaatgcagcaacctgggggctgctgtttaccggcaaactggtttctacccataacgaagctaaactttccaattcactgaatcgcattatcagtaagagtggcgaaccattagtgcgtaaaggcgtagatatggcaatgcgcctgatgggtgaacagtttgtgaccggagaaaccatcgctcaagcgctggcaagtgcacgtaagctggaagaaaaagggttccgttactcctacgacatgctaggtgaagccgctttaactgaggaagatgctcagaattatatggtttcctaccaacaagcaattcatgctatcgggaaagcatccaacggccgcggcatttatgaagggcccggaatttccattaagctttctgccctgcacccgcgttatagccgtgctcaatatgaacgcgtcatgaatgagctatatccacgcctgctttccctgacattacaagcacgccaatatgatgttggtatcaatattgatgccgaagaagcagatcgtctggaaatttctctcgatctgttggaaaagctctgttttgaaccgcaactggctggctggaatggcattggtttcgttattcaagcttatcagaagcgctgcccctttgttatcgatacagttattgacttagcacagcgcagccgccgccgactgatggtgcgactggtaaaaggcgcttactgggatagcgaaattaaacgtgctcaaatcgacgggctggaaggttatcccgtttacacccgcaaagtttatactgacgtttcttatctggcttgtgcccgcaaactattgtcagtacctaatctgatttatcctcagtttgctacccataacgcccatactttagctgctgtttatcatatggcgggccaaaactattatcctggccaatatgaatttcagtgtttgcatggcatgggagaaccattgtatgaacaagtggtcgggaaaatcgctgatggtaaattaaaccgcccatgccgtatttatgcaccagtaggcactcacgaaacactgttggcttatctggtccgtcgtctgttggagaacggcgctaacacctcttttgtcaaccgtatcgccgataccacattaccactggatgaactggttgccgatccagtgacaaaggtcaagaagctggccgaaaccgacggccaaatcggtcttccacatcctaaaatccctctgcctcacaatttgtatggcaaagatcgcgcaaactcagccggtttggatcttgccaacgaacatcgcctggcttctctttccagtgcactattaagttctgctaccgaagagcagtatagcgagccgcgactgggcggcaattatcaccatcaaggtgagttaccggccgccaaaccagttattaacccggcaaccccttcggatattgtcggctatgttcgtgaagcaactgaacaggaagtcagtcatgcgttggatgtcgcaacagaagctggcgcaatctggtttgcaacaccaccatcagaacgggctgccattctggttcgtgcggcggaattgatggaaaaccagatgcagccgttattaggcattttggttcgggaagccggcaaaacctttaataatgcgattgctgaagtacgtgaagcggtcgatttcctccattattacgcgggacagattcgccatgatttcgctaacgatactcatcgcccactggggccggttgtctgtatcagcccgtggaatttcccattagccatttttaccgggcagatagcggctgcattggctgccggtaacagcgtattagcaaaacctgcggaacagaccccattaattgcggcaacagcggtcaaaatactgcatcaagcaggtattccccttgatgcattgcaattattacccggccaaggtgaaaccatcggtgctcttctggtgggtgatgagagagtgcgaggtgtgatgtttactggctccactcaagtggcgagtctattacaacgtaacattgccggacgacttgatgcacaagggcgaccaacccctctggttgccgaaaccggtggcctaaatgccatgattgtcgactcttccgcgctgacagaacaagttgttatggatgtggtcgcttctgcttttgacagtgcaggtcaacgttgttctgccttgcgtatcctttgcattcaagatgatgtggcagaacgcaccatgactatgttgaaaggtgccatgtctgaatgccggatgggtaatcctgaacgcctgtctaccgatatcggcccggtcattgatgcggaagccaaagccggcattgatcgccatattcaagcaatgcgtaccaaagggcgcacgatttatcaggcagcacaagataatgtggtcgacaatcaagagtgggatcaaggcactttcgttaaaccgacactgattgaactggaaagctttgatgaattgaaacaggagattttcggcccggttctgcatgttgtccgttttaaacgtcatgaactggataaattactggatcagattaataactctaactatggtttgacccttggtgtccatacccgtattgatgaaacaattgcacaagttaccgctaaagcgaaagtcggcaatctgtatgttaaccgcaacatggtaggcgctgttgttggcgtgcaaccattcggtggtgaaggcttgtccggtaccggaccaaaagccggcggcccactctatctgtatcgtctgctctcttgccgtcctcaaaatgcgatcaaccaaacgttggaacgtcaggatgcggaatatccactggatgctaatgttcgttcagcgctaatggctccctttgatgcgctgacagaatgggcagccaatcagcacaacgaagagctaaatcagttagttcaacaatataaattgctggcacaaggtggtaccacccgtctgttgccggggccgaccggcgaacgtaatacttacaccctattacctcgtggtcaggtgctgtgtctggcggataatcaacaagatacattgatccaactggcagcaacactgtctgtaggctgtcagttgctatggcaaaatgatgaattacatcagcaactgtttcgtcaattgccagatagcgtccgtaaatcaatccatttggttcaggactggcagagtgaagatacggcattcgaagcggttatttaccacggcgactctgatcaactgcgtcaagtttgcggacaagtcgctcaacgtaaaggcattatcatttccgtacaaggttttgcccgtggagaaactaatctgctgttagaacgtctgctacatgaacgttcactgagcattaacaccgcggcagcggggggtaatgccagcctgatgactatcggttaa

SEQ ID NO: 12567 - protein, 1326 aa, Photorhabdus luminescens
MGSTTMGVKLDEATRDRIKAAAQRIDRTPHWLIKQAIFNYLERLENDEQIAELSSNQDVKEEKIIAEETVTDSAHQPFLDFAEHILPQSVKRSAITAAYRLPETQAIPMLLQQAQLPEDQAQATHKLAYSIAEKLRNQKNSMGRSGLVQGLLQEFSLSSQEGVALMCLAEALLRIPDKATRDALIRDKISNGNWHSHLGQSSSMFVNAATWGLLFTGKLVSTHNEAKLSNSLNRIISKSGEPLVRKGVDMAMRLMGEQFVTGETIAQALASARKLEEKGFRYSYDMLGEAALTEEDAQNYMVSYQQAIHAIGKASNGRGIYEGPGISIKLSALHPRYSRAQYERVMNELYPRLLSLTLQARQYDVGINIDAEEADRLEISLDLLEKLCFEPQLAGWNGIGFVIQAYQKRCPFVIDTVIDLAQRSRRRLMVRLVKGAYWDSEIKRAQIDGLEGYPVYTRKVYTDVSYLACARKLLSVPNLIYPQFATHNAHTLAAVYHMAGQNYYPGQYEFQCLHGMGEPLYEQVVGKIADGKLNRPCRIYAPVGTHETLLAYLVRRLLENGANTSFVNRIADTTLPLDELVADPVTKVKKLAETDGQIGLPHPKIPLPHNLYGKDRANSAGLDLANEHRLASLSSALLSSATEEQYSEPRLGGNYHHQGELPAAKPVINPATPSDIVGYVREATEQEVSHALDVATEAGAIWFATPPSERAAILVRAAELMENQMQPLLGILVREAGKTFNNAIAEVREAVDFLHYYAGQIRHDFANDTHRPLGPVVCISPWNFPLAIFTGQIAAALAAGNSVLAKPAEQTPLIAATAVKILHQAGIPLDALQLLPGQGETIGALLVGDERVRGVMFTGSTQVASLLQRNIAGRLDAQGRPTPLVAETGGLNAMIVDSSALTEQVVMDVVASAFDSAGQRCSALRILCIQDDVAERTMTMLKGAMSECRMGNPERLSTDIGPVIDAEAKAGIDRHIQAMRTKGRTIYQAAQDNVVDNQEWDQGTFVKPTLIELESFDELKQEIFGPVLHVVRFKRHELDKLLDQINNSNYGLTLGVHTRIDETIAQVTAKAKVGNLYVNRNMVGAVVGVQPFGGEGLSGTGPKAGGPLYLYRLLSCRPQNAINQTLERQDAEYPLDANVRSALMAPFDALTEWAANQHNEELNQLVQQYKLLAQGGTTRLLPGPTGERNTYTLLPRGQVLCLADNQQDTLIQLAATLSVGCQLLWQNDELHQQLFRQLPDSVRKSIHLVQDWQSEDTAFEAVIYHGDSDQLRQVCGQVAQRKGIIISVQGFARGETNLLLERLLHERSLSINTAAAGGNASLMTIG

SEQ ID NO: 12568 - DNA, 2991 bp, Gloeobacter violaceus
  CDS (1)..(2991)
atggaattgccgccattccaggaaactcgcgtgctcaccgtcgatccgatcgaatccgaaacccagcgcatcggccaatcgctgctcgctgccccccagcagagtcgtttttcattttttgagcgttctttttgggacgagaagctgctggagtgggcgatggcggacgacgagctgcgcgtgcagctgtttcgctttatcgactgcctgcctgccctcaagaccaatcgcgaggtggcttcccacctgcaggagtacctggggtcggtgaagctgcccgggccgctggccaaggcgctcgattttgccgacccgggttctccggcggcggcggtggcgacgttgggcttgcgccagggcatcagccagatggcccgccgctttatctgcggcgagaatctcaaaaccgccgtcaagacgatcgagaagttgcgttctcagaacatggccgtctcgctggacttgctcggtgaggcggtggtctcggaggcggaagccgaggtgtatcagcggcgctacttggagttgctgagcgatctgcacgccgcccaatcgcgctggccggtgatcgaccaaatcgaccgggcggacggacaattgctgccccgggtgcatttcgccctcaaactcacctcgctctacagccagttcgacgctatcgaccccgccactacaggccgcaacgtcaaggcgcgcctgcggccgattttgcggaaggcgcgggagttgggcgccttcgtgcacatcgacatggagcaatcccaacacaaagacctgatcttgcagatttttaaagaggtcatggtcgaagcggattttcgcgattggatcgacaccggtatctgtctgcaggcgtacctgcgctccgccgaactcgatgcggccaatgtcatcgcctggtcaaaagaacgcggctatccggtcactgtgcgcctggtcaaaggtgcctactgggacggcgaagtcatccgcgcagcccagcagcgctggcctgtgccggtctttacccgcaaggccgataccgacgcgcagtacgaaaaagtcctgcacctgctgatggagaatcatcggagtgtgcacatcgcggtgggcagccacaacgcccgcacggtggctttggcgattgccctggctcgccggaaccgggtaccgcgccgggcctttgaagtgcagatgctctacgggatggcggaccacctcaaggcgggagtggcgcagcagggagagcgattgcgggtgtacgcgccctacggagagctgttgcccgggatggcgtatctgattcgccggttgttggagaacacggcgaacacgtcgtttttgcgccagagtgtgcgtccgggcagcgatgtggtgcggttactggccccccccgctgcgagcggcgaggcggcgccgagcctgatgggcagcgaatttgtcaatgcaccggatcgagattttgcggtggcggcggagcgcgagaagctggcggctgggctggccgaggtgcgcacctgttttggacagacgtactggccggtggtgggaggtaaagcgcgcagaggtttgcccacgctctcggtccccaacccggctgaacctgggaccgtcctgggagcgctcggtcttgccgacgctgaattggccgacgaagcggtcaaagttgcccacaccgcctggcttagttggagcaaaaccacccccgaagcgcgcgcccgactgcttgggcgcctcgccgaactgatggaacaacagcgttccgccctcaccgcctggatcgtctacgagaccggcaaaccctggcgcgaatccgacgccgacgtctcagaagcgatcgacttctgccgctactacggccggcaaatcctcaagctcaccgcccaggcccagcaccgcgacgtgccgggcgaaaccaacggctaccactaccgctcgcggggggtggcggcggtgatcgctccgtggaattttccgctcgccatcctcaccggcatgaccaccgcggcgcttgccacaggcaataccgtgatcatgaaaccggccgagcagtcatcgattgtggccgctcaactgatgcggctgtgcgagcaagccggttttgcggccggggtggtcaactacctgccgggcaggggcgaggtggtcggagcgaagctggtggcgcacccgcaggtgcatttgattgctttcaccggttcgcttgcggtcggtcagcggattttggccgaggcgagcatggtgcgtccgggtcagcgccacctcaagcgggtgattgcggagttgggaggtaagaacgcgatcatcgtcgacagcgacgcggatctcgaccaggcggtcgtgggggtggtgcaatcggcgttcggctacagcggccagaagtgctcggcctgttcgcggctgattgtgctcgaagggatttacgacgtctttatcgaacggctcgtccaggccacccgctcgctcatcgtgggcaatcccgcacagcccgccacctacaccggcccggtgattgcccgcgacgcctgcgagcgcatccgtggcgtcatcgaagatgccaagggtcgccatcgcctggtgttggaggtagatgtctctcacctgggcgaggggtactttatcgggccgaccatcttcgcggacgtcgatccgcaatcgtcactggcccaggaagaaatcttcggcccggtgctcgccgtcatcaaagcccgcgacttcgagcacgccatcgagattgccaacggcaccagctttgctttgaccggcggcctcttctcgcgcagcccgaggcacattgccgaagcgcgcgagcgctttgaagtgggcaatctgtacatcaaccgcaagatcaccgcagctttggtggaccggcagcccttcgggggcttccgcctttcgggcgtcggctcgaaggcggggggaccggactacctgctgcaatttgtcgagccggtgacggtgacggaaaacatccagcgccagggcttcgcacctctgccgggcgagctgtag

SEQ ID NO: 12569 - protein, 996 aa, Gloeobacter violaceus
MELPPFQETRVLTVDPIESETQRIGQSLLAAPQQSRFSFFERSFWDEKLLEWAMADDELRVQLFRFIDCLPALKTNREVASHLQEYLGSVKLPGPLAKALDFADPGSPAAAVATLGLRQGISQMARRFICGENLKTAVKTIEKLRSQNMAVSLDLLGEAVVSEAEAEVYQRRYLELLSDLHAAQSRWPVIDQIDRADGQLLPRVHFALKLTSLYSQFDAIDPATTGRNVKARLRPILRKARELGAFVHIDMEQSQHKDLILQIFKEVMVEADFRDWIDTGICLQAYLRSAELDAANVIAWSKERGYPVTVRLVKGAYWDGEVIRAAQQRWPVPVFTRKADTDAQYEKVLHLLMENHRSVHIAVGSHNARTVALAIALARRNRVPRRAFEVQMLYGMADHLKAGVAQQGERLRVYAPYGELLPGMAYLIRRLLENTANTSFLRQSVRPGSDVVRLLAPPAASGEAAPSLMGSEFVNAPDRDFAVAAEREKLAAGLAEVRTCFGQTYWPVVGGKARRGLPTLSVPNPAEPGTVLGALGLADAELADEAVKVAHTAWLSWSKTTPEARARLLGRLAELMEQQRSALTAWIVYETGKPWRESDADVSEAIDFCRYYGRQILKLTAQAQHRDVPGETNGYHYRSRGVAAVIAPWNFPLAILTGMTTAALATGNTVIMKPAEQSSIVAAQLMRLCEQAGFAAGVVNYLPGRGEVVGAKLVAHPQVHLIAFTGSLAVGQRILAEASMVRPGQRHLKRVIAELGGKNAIIVDSDADLDQAVVGVVQSAFGYSGQKCSACSRLIVLEGIYDVFIERLVQATRSLIVGNPAQPATYTGPVIARDACERIRGVIEDAKGRHRLVLEVDVSHLGEGYFIGPTIFADVDPQSSLAQEEIFGPVLAVIKARDFEHAIEIANGTSFALTGGLFSRSPRHIAEARERFEVGNLYINRKITAALVDRQPFGGFRLSGVGSKAGGPDYLLQFVEPVTVTENIQRQGFAPLPGEL

SEQ ID NO: 12570 - DNA, 3594 bp, Chromobacterium violaceum
  CDS (1)..(3594)
atgcaattcgaatcctttgctcatcagcagtccgctctgcgcgatgcgatcaccgccgcttaccggcgcgatgaacgcgagtgcgtgcaggctttgttgcctcaggcggcgatgagtcccgagcaagtcgcatcagtgcaagaccttgcccgtcggctggtgaccgaggtgcgccgcgagcgcacccgttccagcggcgtggacgcgctgatgcacgagttctcgttggacagcagcgaagggatcgccctgatgtgtctggcggaggcgctgctgcgcatccccgaccgcgagacggccgacaagctgatccgcgacaagatttcccgcggcgactggaaggcccatttgggcaacagttcgtcgctgttcgtcaacgcggccgcttggggcctgctggtgaccggcaagctggtttcctctcatagcgccaacggcctgtcggcggcgatgacgcgcctgatcgccaaaggcggcgagccgctgatccgcaagggcgtcgacatggcgatgcgcatgctgggcaagcagttcgtcaccggcgagacgatcgaggaagcgctggccaacggccgcgaacgcgaagcgcgcggttaccgcttcagctacgacatgctgggcgaagcggcgatgaccgaagccgacgcccaacgctacctgaaggactacgtcaccgccatccatgcgatcggcaaggagtcgaacggccgcggcatctatgacggccccggcatctcggtgaagctgtccgcgatccacccgcgctatgcccgcctgaagcatgaacgcatgatgaccgagctgctgcctcgactgaaggcgctgttcctgttggccaagcaatacaatatcggcctgaacatcgacgccgaggaggccgaccgcctggagatctcgatggacctggtcgaagcgctggccaacgatgcggacctgaacggcttcgaaggcatcggcatcgtggtgcaggcctaccagaagcgctgtcccttcgtgatcgatttcctgatcgacctggcgcgccgcaccggccaccgcttcatggtgcggctggtgaagggcgcctactgggacgccgagatcaagcgcgcccaggtggacggcctgcctggctatccggtgtatacgcgcaaggtgtacaccgatgtgtcctaccttgcctgcgccaagaagctgctggccgcccaggacgcgatctacccgcagttcgccacgcacaacgcctacagcctgtcggcgatttacaacctggccgccggcaaggattacgagttccagtgcctgcacggcatgggcgagaccctgtacgaccaggtagtgggcaaggacaagctgggcaaggcttgccgcatctacgcgccggtcggctcgcatgagacgctgctagcctacctggtgcgccgcctgctggaaaacggcgccaactcctccttcgtcaaccgcatcgtcgacgaaaacgtgtccatcgacgaactggtgaccgatccggtggccgaggccgccggcttttccggcatgccgcacagcaagattccgctgcctgaggcgctgtacggcgaaggccgccgcaattccaaaggcctggacctgtccagcgagcacgtgctggccacgttgcagctgggcctgcaggcgtccgagcagcagcgttgggccgccttccccatgctgggagatggcgatgtcaccgacggcgagctgcaggaagtgcgcaatccggccgaccacagcgatgtggtgggcaaggtgatagaggccagcgccgccgacgtcgagcgcgcgctggccctatcggccggcatcgccgccgcctgggccgcgacgccggtagccgagcgcgcggccagcatccgccgcatggccgacctgatggaggcgcacatgccggcgctgatgggcctggcggtgcgcgaggcgggcaagacgctgaacaacgccatcgccgaagtgcgcgaggcggtggatttctgccgctactacgccgcgcagatcgtgtctgagttcgacaacgccagccaccggccgctgggtcctgtggtgtgcatcagcccgtggaacttcccgctggccattttcatcggcgaagtcgtcgcgtctttggccgccggcaatactgtactggccaagccggccgagcagaccagcctgatcgccgcctacgcggtgcgcctgctgcacgaggcgggcatcccgcgcgcggcgctgcagttcctgccgggccgcggcgaggtggtcggcgccgcgctgaccggcgacgcgcgcatccagggcgtgatcttcaccggttccaccgaggtggcgcagatcatcaaccgcacgctggcaaaacgccaagacgatccggtgctggtggcggaaaccggcggcatgaacgcgatgatcgtcgacagctcggcgctgccggaacaggtggtcaccgatgtgctgagctctgccttcgattccgccggccagcgttgctcggcgctgcgggtgctgtacctgcagaacgacatcgccgacaaggtgatcgcgatgatcaagggggcgatggatgagctgaccatcggcaatccggccaagctgaccaccgacgtcggtccggtgatcgacgccgaggcccaggccggcctgctcgcccacatcgccaggatgaagaactccgcccgcgcgatgcaccagaccaagctgtccgcggcgtgcgagcagggcactttcgtcgcgccgacgctgttcgagatcgacaatctgtcggagctcaagcgcgaagtgttcggcccggtgctgcacgtgctgcgctatgccgcgtcggatctggacaaggtggtggccgagatcaacgccaccggctatggcctgacccacggcatccacagccgcatcgacgaaaccatcgccgacatctgcggcaagatcaaagtgggcaatatctacgtcaaccgcaacatcgtcggcgcggtggtcggggtgcagcccttcggcggcgagggcaagtccggcaccggtcccaaggcaggcggtccgtactacctgtaccgcctgacccgtgccgcctggcagccgaagctggccgccgtgccggcggcggccgatttgtccgcgctggacgcgctggcggccgcggccaaggcgcagagcctggcgctggacggcgcgatcgccgccgcgcgcaaggaaagcccgctgacgcatagcgtggcgttgccggggccgaccggagaaaacaacttgctgtccttcgccggccgcggccgcataggctgcgtcgccgacgacgcgcaggcgctggccgaacagctggccgcggccttcgccgccggcaaccgcgcggtgctggccgataacgagctgggacgcaagttcgcgtccgccttgaacggccatgtgtcgctggctgccgacgtgctggaagcggatgtcgatgcggtgttgtacgccggcgccaaggccgaggaggcacggcgcgagctggccgcccgcgacggcgcgctggttccgctgatcctgcgcggcgaaaatggctacaatgtgcatcggctggtggtcgagcgcgcgcttagcgtcaataccacggcggccggcggaaacgccagcctgatgagcatgaccgaatga

SEQ ID NO: 12571 - protein, 1197 aa, Chromobacterium violaceum
MQFESFAHQQSALRDAITAAYRRDERECVQALLPQAAMSPEQVASVQDLARRLVTEVRRERTRSSGVDALMHEFSLDSSEGIALMCLAEALLRIPDRETADKLIRDKISRGDWKAHLGNSSSLFVNAAAWGLLVTGKLVSSHSANGLSAAMTRLIAKGGEPLIRKGVDMAMRMLGKQFVTGETIEEALANGREREARGYRFSYDMLGEAAMTEADAQRYLKDYVTAIHAIGKESNGRGIYDGPGISVKLSAIHPRYARLKHERMMTELLPRLKALFLLAKQYNIGLNIDAEEADRLEISMDLVEALANDADLNGFEGIGIVVQAYQKRCPFVIDFLIDLARRTGHRFMVRLVKGAYWDAEIKRAQVDGLPGYPVYTRKVYTDVSYLACAKKLLAAQDAIYPQFATHNAYSLSAIYNLAAGKDYEFQCLHGMGETLYDQVVGKDKLGKACRIYAPVGSHETLLAYLVRRLLENGANSSFVNRIVDENVSIDELVTDPVAEAAGFSGMPHSKIPLPEALYGEGRRNSKGLDLSSEHVLATLQLGLQASEQQRWAAFPMLGDGDVTDGELQEVRNPADHSDVVGKVIEASAADVERALALSAGIAAAWAATPVAERAASIRRMADLMEAHMPALMGLAVREAGKTLNNAIAEVREAVDFCRYYAAQIVSEFDNASHRPLGPVVCISPWNFPLAIFIGEVVASLAAGNTVLAKPAEQTSLIAAYAVRLLHEAGIPRAALQFLPGRGEVVGAALTGDARIQGVIFTGSTEVAQIINRTLAKRQDDPVLVAETGGMNAMIVDSSALPEQVVTDVLSSAFDSAGQRCSALRVLYLQNDIADKVIAMIKGAMDELTIGNPAKLTTDVGPVIDAEAQAGLLAHIARMKNSARAMHQTKLSAACEQGTFVAPTLFEIDNLSELKREVFGPVLHVLRYAASDLDKVVAEINATGYGLTHGIHSRIDETIADICGKIKVGNIYVNRNIVGAVVGVQPFGGEGKSGTGPKAGGPYYLYRLTRAAWQPKLAAVPAAADLSALDALAAAAKAQSLALDGAIAAARKESPLTHSVALPGPTGENNLLSFAGRGRIGCVADDAQALAEQLAAAFAAGNRAVLADNELGRKFASALNGHVSLAADVLEADVDAVLYAGAKAEEARRELAARDGALVPLILRGENGYNVHRLVVERALSVNTTAAGGNASLMSMTE

SEQ ID NO: 12572 - DNA, 1806 bp, Neurospora crassa
  CDS (1)..(1806)
atgtcggcacggaggcttcagaggctgtctcttaccacttcgagtggtctgagatcagctcgcacatcctcgactaccatcaactctgcattgctaaggccgcagctatataaccagagatccaggacagccatacccagcatcgtcaggacgaactctaccctcgcaaccttcaaagtccctacagtggccaacgagcccaatcaacactatgccaaaggctcagaatcacgacacaagctcacggaagcttatacggcgctttcaaagaatcttcctgtcgacgttcccattaacatccgcggaaggacgcttagcaaagcagacaccaagtaccaggtgaaccccgccgatcaccaacagaaaatagccaattatgccgtggcaacccccgaaatggtcaacctggctatcaatgccgccctgaacgcaaagccggcatgggaaagcttgcccttcgctgacagagcggcagtcttcctcaaggccgccgatctgattagcaccaagtatcgctacgagttgatggccgcaacaatgttgggccaaggcaagaacgcctggcaggccgaaatcgatgccgctgctgagctctgtgactttctccgcttcaacgtccaatatgcggagcaactatacgctcagcaaccggcacataactcccccggtgtctggaaccgtgtcgagtacaggccacttgagggctttgtctatgccgtcaccccgttcaacttcactgccattgcgggcaaccttccaggcgtggcagcactgctgggcaatgttgtggtctggaagccgagcgattccgcgatcctcagcaactaccttctgtacaaggtccttctcgaagcgggactcccgcccgatgtcattcagttcatccccggcgatcctgagttggtgacaaaggaagtgctcgcgcacaaggactttgcggctctacactacacaggcagcactgccgtcttccgtaagctctatggccagattggcgctggcgttgctgagggtaggtatcgatcatatcctcgcattgttggcgaaaccggtggcaagaacttccacctggttcacaagtctgccgatctacgaaacgctgttgtccagacggtccgcggtgcattcgaataccagggccagaagtgcagcgccacttcccgactgtacgttgccaagtcgatttggccagatttccaggagcttctcgtccaagaaacggagaagttgaaagttggcccacctcatgatcatggaaacttcatgggcccggtcattcatgccgcctctttcaagaagctgagcacggctattgacgagggcaaaaaagacccagacctccagctaattgcaggaggagaatacgacagctcggttggttactacgtcaagccaaccatctttgtgtccaagacgccagaccataaactcttttcgacggagctgttcggacccgtcttgacggtctacgtctatgatgactacgtagacagcactacctctatctacgacatcatcgacggagctacggaatatgggctgacgggctcaatctttgcaagtgaccggagcgttatccggttcgcagaggagaaactccgcaactcggcaggaaacttctacattaactgcaagagtacgggtgctgttgtaggccagcagccatttggtggcagccgagcgagcgggaccaatgacaaggccggcagcatcaacctcctgagtcggtttgttagcatgagaagcatcaaggaggaatttaactcgacgaccacggtgacatatcccagcaatgaggtcgagtag

SEQ ID NO: 12573 - protein, 601 aa, Neurospora crassa
MSARRLQRLSLTTSSGLRSARTSSTTINSALLRPQLYNQRSRTAIPSIVRTNSTLATFKVPTVANEPNQHYAKGSESRHKLTEAYTALSKNLPVDVPINIRGRTLSKADTKYQVNPADHQQKIANYAVATPEMVNLAINAALNAKPAWESLPFADRAAVFLKAADLISTKYRYELMAATMLGQGKNAWQAEIDAAAELCDFLRFNVQYAEQLYAQQPAHNSPGVWNRVEYRPLEGFVYAVTPFNFTAIAGNLPGVAALLGNVVVWKPSDSAILSNYLLYKVLLEAGLPPDVIQFIPGDPELVTKEVLAHKDFAALHYTGSTAVFRKLYGQIGAGVAEGRYRSYPRIVGETGGKNFHLVHKSADLRNAVVQTVRGAFEYQGQKCSATSRLYVAKSIWPDFQELLVQETEKLKVGPPHDHGNFMGPVIHAASFKKLSTAIDEGKKDPDLQLIAGGEYDSSVGYYVKPTIFVSKTPDHKLFSTELFGPVLTVYVYDDYVDSTTSIYDIIDGATEYGLTGSIFASDRSVIRFAEEKLRNSAGNFYINCKSTGAVVGQQPFGGSRASGTNDKAGSINLLSRFVSMRSIKEEFNSTTTVTYPSNEVE

SEQ ID NO: 12574 - DNA, 1985 bp, Brachydanio rerio
  CDS (108)..(1778)
agtatcaaaattccacctcagcgccgtggttcctcaacaggaggatatttctgaattgtatatatataaataatatctctgtgcttccctgtacggccaaatcaacgatgctgcgagcgaggtctgccgtcagtcagtcgtggaaagggttcaagactttctcgtgtgtagcggtggaggtgaagaatgagcccgttctggagtttaaagagggcagtaaagagagagcagaactggaggaggcgttacgaaacctgaagggaaaaacagaagaaattccatgtgtgatcggaaatgaagaagtgtggaccaaagacatccgattccagctgtctcccttcaaccattctcaccaagttgcaaagttctgctatgctgacaaggatcttctaaataaagccattgaggcttcagtcgctgctcggagggaatgggatcttaaaccggtctcagatcgagcccagatcttcttcaaagctgccgacatcatcagtgggcccaagagagcagaagtactggccaagactatgatcggacagggtaagactgtggttcaggcggagatcgacgcagctccagaactcattgacttcttcaggtttaatgccaaacatgcaattgagcttgaagaccagcagccgctggacagtgacggcagcacaaacaccatgctgtaccgcggcctagagggatttgttgctgctgttgctccatttaacttcacagcgattggcggaaacctggccggcactcctgctcttatgggtaacgttgtgctgtggaaacccagtgataccgccatgtctgccagttatgcagtctataagatcctgagagagtctggattgccaccgaacatcattcagtttgtcccggcagatgggccagtgtttggagacacagttacgtcctctgagcacctcgccggcatcaacttcaccggcagcgtcccaacgtttaagcggttgtggaagcaggtcgcccagaatctggacatctacaagaatttccctcgcgttgctggagagtgtggtgggaagaacttccactttgtgcacaagtctgcagacgtccgcagtgtggtgaccggcaccatccgctccgcgtttgagtacggaggacagaaatgttctgcctgctctcgtatgtacgtcccagactctctctggcctcagatcagacagggcctcctggacgtctacaaacagatcaaagttggagacccagtggaagatttcagcactttcttctcagcggtgattgatgacaagtctttctccaggattaaaggctggcttgaacacgccagatcttctccacatctgaagatcatcgctggaggaaactgcgacgacaagaagggctatttcgtggagcccacaataatcgagaccaccgacccacaggagaagatcatgaatgaggagatcttcggacccgtcctgacagtctacgtttaccctgaaaacgactacaagaaagtcctgcacttaatagacaacacttctccatacgccctaacaggagccatcttcccccaagacaaatctgttatagaggaggccggaaaagctttaagaaatgctgcaggaaactattatatcaatgataaatcgacaggatcaatcgtggcccagcagccttttggtggcgccagagcgtcaggcaccaacgacaaacccggcggcccccattacgtcctacgctggacatcccctcaggtggtcaagcagacacacgtcccactcacagaatggaaatatccttacatgagctaaaagaccgcttcatttctctaaaatccttcctaaaagactcttcttaccgtcccaaaaccgcagacaaagtgtggtaatgatgaagagcaacagtaaaaagcagaccagactgaatgtatccccgaagatttctctgcaaacatcactggattattaatacaagctattaattcagcaaagaaaaaaaaaaaaaaaaaaaaaaaaaaa

SEQ ID NO: 12575 - protein, 556 aa, Brachydanio rerio
MLRARSAVSQSWKGFKTFSCVAVEVKNEPVLEFKEGSKERAELEEALRNLKGKTEEIPCVIGNEEVWTKDIRFQLSPFNHSHQVAKFCYADKDLLNKAIEASVAARREWDLKPVSDRAQIFFKAADIISGPKRAEVLAKTMIGQGKTVVQAEIDAAPELIDFFRFNAKHAIELEDQQPLDSDGSTNTMLYRGLEGFVAAVAPFNFTAIGGNLAGTPALMGNVVLWKPSDTAMSASYAVYKILRESGLPPNIIQFVPADGPVFGDTVTSSEHLAGINFTGSVPTFKRLWKQVAQNLDIYKNFPRVAGECGGKNFHFVHKSADVRSVVTGTIRSAFEYGGQKCSACSRMYVPDSLWPQIRQGLLDVYKQIKVGDPVEDFSTFFSAVIDDKSFSRIKGWLEHARSSPHLKIIAGGNCDDKKGYFVEPTIIETTDPQEKIMNEEIFGPVLTVYVYPENDYKKVLHLIDNTSPYALTGAIFPQDKSVIEEAGKALRNAAGNYYINDKSTGSIVAQQPFGGARASGTNDKPGGPHYVLRWTSPQVVKQTHVPLTEWKYPYMS

SEQ ID NO: 12576 - DNA, 3822 bp, Bordetella bronchiseptica
  CDS (1)..(3822)
atggctagcacgactctgggcgtcaaggtcgacgacgcattgcgcgatcgcctcaaagccgccgcgcagaaactgaactgcaccccgcactggctgcacaagcaggccattctttcctatctcgacagaatcgaacgcggccatctgccggcggagatggcccatctggggcgcgacgagcgcggcgaggacgaggacgcaggcgcgtcggccgatgccatgccgcctttcttcgagttcggccaggacgtgcaaccgcaatccgtgctgcgcgccgccatcaccgcagcctatcgccggcccgagccggaatgcgtgccgttgctgctggggcaggcccgcgtggccggccccgagaaggtgcacgccatggccagcaagctggtccacgcgctgcgggccaagcgcagcggcggcggcgtcgaaggactgatccaggagttctcgctgtccagccaggaaggcgtggcgctgatgtgcctggccgaggcgctgttgcgcattcccgaccgcgccacccgcgatgccctgatccgcgacaagatcgcgcacggcgactggcgctctcacatgggcggatcgcagtcgctgtttgtcaacgccgcgacctggggcctgatgatcaccggcaagctggtcgccgtcagcagcgagcagtcgctgtccaaggcgctgacgcgcctgatcggcaagggcggcgagccgctggtgcgcaagggcgtgaacatggccatgcgcatgatgggcgagcagttcgtctcgggccagacgatctccgaagccctggccaacaaccgcaagatggaggcgcggggctttcgctactcgtacgacatgctgggcgaggccgccaccacggccgccgacgccgaacgctattacgcggcgtacgagcaggccatccatgccatcggcaaggcggccgccggacgcggcatctacgaaggcccgggcatctcgatcaagctgtcggcgctgcatccgcgttatgcgcgcgcccagcgcgaccgggtcatggccgagctgctgccgcgcgtcaaggcgctgacgctgctggcgcgccaatacgatatcggcctgaacatagacgccgaggaagccgaccggctcgagatttcgctggacctgctggaagccttgtgtttcgtccccgagctggacggctggaatggcatcggcttcgtcatccaggcctatcagaagcgcgcgccgttcgtgatcgattacgtgatcgacctggccaagcgcagccgtcaccgcctgatggtgcgcctggtcaagggggcgtattgggacacggagatcaagcgcgcccaggtcgacggcctggaggggtatccggtctacacgcgcaaggtgtacaccgacgtcgcctacctggcctgcgcgcgcaggctgctggcggcgcccgaggccacatacccgcagttcgccacccataacgcctataccctgtcggccatctaccagatggcgggacagaactactacccggggcagtacgagttccagtgcctgcacggcatgggcgaaccgctgtacgaggaggtggtcgggccgctggcgcaaggcaagctgaaccgcccgtgccgcatctatgccccggtgggcacgcacgaaaccctgctggcgtacctggtgcgccgcctgctggaaaatggcgccaacacttccttcgtcaacctgatcggcgacgacagcatcacggtcgagcaactggtggccgatccggtcgaggcggcgtcccgcatcgtgccgctgggcgcgccgcacgagaaaatccccctgccgcgcgagctgtacggcagcgtgcagcagggcgcgcgggccaactcggccggcctggacctgaccaacgagcatcgcctgggctcgctgtcggcggccctgctggccagcgccgcgatcgactggcgcgcctggcccatgctgggcgagggagatcccggctgggatccggccggcgcggtcgaagtggccaacccggccaacctgcgcgacatcgtcggccacgtcatgcaggccacgccgcaacatgtggaacaggccctgcgcgacgccgccaacgcggcgcccatctggcagtccacgccggtgcccgagcgcgcgcagtgcctgcggcgggcggcccagctgctggaagagcagatgcagacgctgcttggcctgatcgtgcgcgaggccggcaagtcgttgcccaacgccatcgccgaggtgcgcgaagcggtggacttcctgcgctattacgccgaccaggccgagcgcgaattcgacaacgatacccatcgtccgctgggccaggtactgtgcatcagcccatggaacttcccgctggccattttcaccggccaggtcgccgccgcgctggccgccggtaacaccgtgctggccaagccggccgagcagacgtcgctgatcgccggccaggcggtggccatcctgcgcgccgcgggcgtgcccgccggcgcggtgcaactgctgccgggccgtggcgaaaccgtgggggcccagctggtggccagtccgcaggtgcgcggcgtgatgttcaccggctcgaccgaggtggcgcgcatcatcgccggcgcgctggccgaacgcctggacgatcagggccacaccattccgctgatcgccgagaccggcggccagaacgccatggtgatcgattcgtcggcgctggccgagcaggtcgtgttcgatgtgctgacctcggcgttcgactccgccggccagcgctgctccgcgctgcgcgtgctgtgcctgcaggaggacagtgcggatcacgtgctggccatgctgcgcggcgcgatgcgcgagctgcgcgtgggcaatcccgaccgcctgtcggtcgacgtggggcccgtgatcgacgccgaggcgcgcaacggcatccagggccatatcgaggccatgcgctcgtccggacgcccggtcgaccaggtcgagctggcgggcgaatgccgctacggcacgttcgtgccgccgacgctgatcgagatcgaccatatcggcgagctcacgcgcgaagtgttcggcccggtgctgcacgtattgcgctaccggcgcgacgacctggacgggctgatcgagcagatcaacgccaccggttatgggctgaccttcggcgtgcatacccgcatcgacgaaaccatcgcccgcgtcaccgaacaggtgcacgctggcaacctgtatgtcaaccgcaacatcgtgggcgccgtggtcggggtgcaacccttcggaggcgaaggcctctcgggcaccggcccgaaggcgggggggccgctgtacatgtaccggctgctggccacgcgcccggccggcctgccgcccgccctcgacccggcggcgccgatgccgcaggcgcttgccttgccgggcccgaccggcgagaccaatacctaccgggtcgagccgcgcggcgcggtctattgcgtggccgccaccgaggccggcgcccgggcgcaatgggccgtcgtgagccagaccggcaaccatgcctggttcgccgatacgccggcggcgcgcgcctggatcgccggcctggacgccaggctgcgcgagcaggctgccttgctggaagattccgaacttgatgaggccgatttccaggcggtgctgttcgagggggacggcgacgccttgcgcgcgctgaacatgcgcatcgcccaacgtcccggccccctggtgtccgtgcatggcctgagcgccgatgccctggccgccggggccagctacgcgcccgaccgcctgctggccgagcgttcgatcagcgtcaatacggcggccgctggcggcaacgccagcctgatgacgataggttga

SEQ ID NO: 12577 - protein, 1273 aa, Bordetella bronchiseptica
MASTTLGVKVDDALRDRLKAAAQKLNCTPHWLHKQAILSYLDRIERGHLPAEMAHLGRDERGEDEDAGASADAMPPFFEFGQDVQPQSVLRAAITAAYRRPEPECVPLLLGQARVAGPEKVHAMASKLVHALRAKRSGGGVEGLIQEFSLSSQEGVALMCLAEALLRIPDRATRDALIRDKIAHGDWRSHMGGSQSLFVNAATWGLMITGKLVAVSSEQSLSKALTRLIGKGGEPLVRKGVNMAMRMMGEQFVSGQTISEALANNRKMEARGFRYSYDMLGEAATTAADAERYYAAYEQAIHAIGKAAAGRGIYEGPGISIKLSALHPRYARAQRDRVMAELLPRVKALTLLARQYDIGLNIDAEEADRLEISLDLLEALCFVPELDGWNGIGFVIQAYQKRAPFVIDYVIDLAKRSRHRLMVRLVKGAYWDTEIKRAQVDGLEGYPVYTRKVYTDVAYLACARRLLAAPEATYPQFATHNAYTLSAIYQMAGQNYYPGQYEFQCLHGMGEPLYEEVVGPLAQGKLNRPCRIYAPVGTHETLLAYLVRRLLENGANTSFVNLIGDDSITVEQLVADPVEAASRIVPLGAPHEKIPLPRELYGSVQQGARANSAGLDLTNEHRLGSLSAALLASAAIDWRAWPMLGEGDPGWDPAGAVEVANPANLRDIVGHVMQATPQHVEQALRDAANAAPIWQSTPVPERAQCLRRAAQLLEEQMQTLLGLIVREAGKSLPNAIAEVREAVDFLRYYADQAEREFDNDTHRPLGQVLCISPWNFPLAIFTGQVAAALAAGNTVLAKPAEQTSLIAGQAVAILRAAGVPAGAVQLLPGRGETVGAQLVASPQVRGVMFTGSTEVARIIAGALAERLDDQGHTIPLIAETGGQNAMVIDSSALAEQVVFDVLTSAFDSAGQRCSALRVLCLQEDSADHVLAMLRGAMRELRVGNPDRLSVDVGPVIDAEARNGIQGHIEAMRSSGRPVDQVELAGECRYGTFVPPTLIEIDHIGELTREVFGPVLHVLRYRRDDLDGLIEQINATGYGLTFGVHTRIDETIARVTEQVHAGNLYVNRNIVGAVVGVQPFGGEGLSGTGPKAGGPLYMYRLLATRPAGLPPALDPAAPMPQALALPGPTGETNTYRVEPRGAVYCVAATEAGARAQWAVVSQTGNHAWFADTPAARAWIAGLDARLREQAALLEDSELDEADFQAVLFEGDGDALRALNMRIAQRPGPLVSVHGLSADALAAGASYAPDRLLAERSISVNTAAAGGNASLMTIG

SEQ ID NO: 12578 - DNA, 1731 bp, Kluyveromyces lactis
  CDS (1)..(1731)
atgctatcatctcgtattcagctattgcgctcttcaaaacgatgcgttgcgcagctatcccatattcaaccacctaaacaaattggcaatgagccagttaaagcgttcggtagtaaggatttggttgattgggatttactaagggcttctttatctaagttcaaaaactcctctttggacgttcctttagtcattaacggcgaacgtatttattataacgacgacggtggtaagagaggcattttccagcaattgaacccagccaaccactctgaagttttagctaacgttactcaggctactaatgaagatgttaaagctgcaatccaagcttctaaacaagctaaggacaaatggtacaaattgccatattacgagcgtgcctccgttttcatgaaggcagctgatttgatttgtaccaaataccgttatgacatgctcgctgccactatgttgggtcaaggtaagaatgtataccaagcagaaatcgattgcatcactgaattggctgatttcttcagattcaacgtgaagtatgctaatgaattgtacgcccaacaacccattgaatcttctcccggtgtatggaacagggctgaatacagacctttagaaggctttgtgtatgcagtaactccgttcaatttcactgccattgctggtaatttgatcggtgcgcctgcgttgatgggtaacactgttgtgtggaaaccttctcaaaacgccaatttgtccaactacttgttattaactgttttggaagaagcaggtttgccaaatggtgttgtgaattttgtcccaggtaacgcagtggaagtcaccaaggaagttttgagcgactcggaattcgctgctttacatttcactggttctactgctgttttcaagcaactatatggagatatccagaagggtgttgtgaatggtttgtacagagactatccgcgtattgtcggtgagactggtggtaagaatttccacttgatccatccaagtgctaacattcctcattctgttctatccactttgagaggtgcatttgagttccaaggtcaaaaatgttctgctacttccagagtatacttgcccgaaagtaagagcgaggaattttttcgtgatttaggaggtgtcttatctgaagttcaaccagtgaacacatcggcatctaagattaacggtggtgatttacacggttttattggcccggtgatccatgaaggtagttttgataaattggccaaagtgattgacgatgccaagaacgatccagaattggaaattgttttcggaggcttccatgataaatctaagggttattacatccaaccaacaatcataaagactacaaatccaagacatccttatttaagccaagaattctttggtccaatattgactgtatacgaatatccagacgcaaaattcgaagacgtgtgtgaactggttgattccaccagccaatatggtttaacgggatccatattcgcccgtgaccgtgaggctattaagatcgctgatgaaaaattgaaatacagtgcaggaaacttctacatcaacgataaatctaccggggctgttgtcgctcaacaatggtttggtggtgccagaatgagcggtactaatgacaaggccgggtctggaaatatcttgaacagatttgttagcgtcaggaacatcaaagaaaactattatgaattgacagactacagatatccatccaattacgaataa

SEQ ID NO: 12579 - protein, 576 aa, Kluyveromyces lactis
MLSSRIQLLRSSKRCVAQLSHIQPPKQIGNEPVKAFGSKDLVDWDLLRASLSKFKNSSLDVPLVINGERIYYNDDGGKRGIFQQLNPANHSEVLANVTQATNEDVKAAIQASKQAKDKWYKLPYYERASVFMKAADLICTKYRYDMLAATMLGQGKNVYQAEIDCITELADFFRFNVKYANELYAQQPIESSPGVWNRAEYRPLEGFVYAVTPFNFTAIAGNLIGAPALMGNTVVWKPSQNANLSNYLLLTVLEEAGLPNGVVNFVPGNAVEVTKEVLSDSEFAALHFTGSTAVFKQLYGDIQKGVVNGLYRDYPRIVGETGGKNFHLIHPSANIPHSVLSTLRGAFEFQGQKCSATSRVYLPESKSEEFFRDLGGVLSEVQPVNTSASKINGGDLHGFIGPVIHEGSFDKLAKVIDDAKNDPELEIVFGGFHDKSKGYYIQPTIIKTTNPRHPYLSQEFFGPILTVYEYPDAKFEDVCELVDSTSQYGLTGSIFARDREAIKIADEKLKYSAGNFYINDKSTGAVVAQQWFGGARMSGTNDKAGSGNILNRFVSVRNIKENYYELTDYRYPSNYE

SEQ ID NO: 12580 - DNA, 1485 bp, Bacillus cereus
  CDS (1)..(1485)
atgagtcaactagctgtaaatcttcatgaaaaggtagagaaatttcttcaaggtacaaaaaagttatatgtgaatggatctttcattgaaagcgcttccggtaaaacatttaaaacacctaacccagcaactggtgaaacacttgccgtcgtttctgaagctggtcgcgaagatattcataaagctgtagtcgcagctcgtatggcttttgacgaaggtccttggtctcgtatgagcaccgctgagcgaagccgtctcatgtacaagttagctgatttaatggaagaacataaagaagagcttgcacagctcgaaacattagataacggaaagccaatccgtgaaacaatggcagcagacataccacttgcaattgagcatatgcgctattacgctggatgggctacgaaaatcgttggtcaaacaattcctgtttccggtgattactttaactatacacgccatgaagctgttggtgtcgttggtcaaattatcccttggaacttcccgcttcttatggcaatgtggaaaatgggagcagcgcttgctacaggatgtacaatcgttttaaaacctgcagaacaaactccactatctgctctatacttagctgaattaattgaagaagctggattcccgaaaggtgttattaatatcgtacctggattcggtgaatcagctggacaagctctcgttaatcatccactcgttgataaaattgcatttaccggttctactcctgtcggtaaacaaattatgcgacaagcatccgaaacattaaaacgcgttacacttgaattaggcggtaaatcaccaaatatcatattgccagatgctgatttatctcgcgcgattcctggtgcactttctggtgttatgtttaaccaaggacaagtatgctctgctggatcacgcttatttgttccgaagaaaatgtatgataatgtcatggctgatctcgtcctctattctaaaaaactaaatcaaggtgtcggtcttaaccctgaaacaacaattggccctctcgtttccgaagaacaacaaaaacgtgtaatgggctacattgaaaaagggattgaagaaggcgctgaagtactttgcggaggaagtaatccattcgatcaaggctacttcgtttctcctacagtattcgctgacgtaaatgatgaaatgacgatcgcaaaagaagaaattttcggtccagttatttctgcaataccgtttaacgatattgacgaagtaattgaacgtgcaaataaatcacaattcggcttagcggctggtgtgtggacagaaaatgttaaaacagcacactatgttgcaagtaaagtacgtgcaggtacagtatgggtaaactgttataacgtctttgatgcagcatctccatttggaggatttaaacaatctggtcttggccgtgaaatgggatcttacgcattaaataactatacagaagtaaagagcgtttggcttaacttaaattaa

SEQ ID NO: 12581 - protein, 494 aa, Bacillus cereus
MSQLAVNLHEKVEKFLQGTKKLYVNGSFIESASGKTFKTPNPATGETLAVVSEAGREDIHKAVVAARMAFDEGPWSRMSTAERSRLMYKLADLMEEHKEELAQLETLDNGKPIRETMAADIPLAIEHMRYYAGWATKIVGQTIPVSGDYFNYTRHEAVGVVGQIIPWNFPLLMAMWKMGAALATGCTIVLKPAEQTPLSALYLAELIEEAGFPKGVINIVPGFGESAGQALVNHPLVDKIAFTGSTPVGKQIMRQASETLKRVTLELGGKSPNIILPDADLSRAIPGALSGVMFNQGQVCSAGSRLFVPKKMYDNVMADLVLYSKKLNQGVGLNPETTIGPLVSEEQQKRVMGYIEKGIEEGAEVLCGGSNPFDQGYFVSPTVFADVNDEMTIAKEEIFGPVISAIPFNDIDEVIERANKSQFGLAAGVWTENVKTAHYVASKVRAGTVWVNCYNVFDAASPFGGFKQSGLGREMGSYALNNYTEVKSVWLNLN

SEQ ID NO: 12582 - DNA, 1485 bp, Bacillus cereus
  CDS (1)..(1485)
atgttaaagacaaatattgagctgaaaccaaaagtggaagcgttcttaaatgaagaaattaaaatgtttattaatggcgaatttgttgctgctattgggggaaagacgtttgaaacgtataatccggctacagaagatgttctagctgtcgtatgtgaagcgcaagaagaggatattgatgctgcagtaaaagcggcaagatctgcatttgaatccggtccgtgggcagaaatgactactgctgaaagagcgcatcttatttataaattagcagatttaattgaagaacatagagaagaattagcgcaactagaagctttagataatggaaagccatatcaagtagcacttgatgatgatatttcagcaactgtagaaaattatcgttattacgcaggatgggctacaaaaattattgggcaaacaatcccaatttcaaaagattacttaaattacacgagacatgaacctgtaggtgttgtaggtcagattattccgtggaattttccgctcgttatgtcttcttggaaaatgggagctgcactggcgacaggttgtacgatcgtattaaagccagcagagcaaacgcctttatctttactatatacagcaaaactttttaaagaggctggatttccaaacggtgttgtaaactttgtaccaggctttggtcctgaagcaggagcagcaattgtaaatcatcatgacattgataaagttgcttttacaggatctactgttacaggaaagtatattatgcgtcagtctgcagaaatgattaagcatgtaacgttagagcttggcggcaaatcaccaaatatcattttagaagatgcggacttggaagaagcaattaatggtgcattccaaggtattatgtataatcacggtcaaaattgtagcgcaggatcacgtgtatttgttcatcgtaaacattatgaaactgtagtagatgcacttgtgaaaatggcgaacaacgtaaaacttggagcaggtatggagaaaggaacggaaatgggtccactcgtatctaagaaacaacaagagcgtgtgttacattacattgagcaagggaagaaagaaggcgctacagttgcggctggtggtgaacgtgcacttgaaaagggttatttcgttaagccaactgtattcacagatgttacagacgatatgacaatcgttaaggaagaaatatttggaccagttgttgttgttctgccatttgattcgacagaagaagtaattgaacgagcgaacaactcatcctatggccttgctgcgggtgtatggacgcaaaatatcaaaacgggtcatcaagtggcaaataaattaaaagcaggaacagtgtggattaatgattataacttagaaaatgcagctgcaccatttggtggatacaaacaatctggtattggccgcgaattaggttcatatgcgcttgataattatacagaagtgaaaagtgtttgggtaaatataaagtaa

SEQ ID NO: 12583 - protein, 494 aa, Bacillus cereus
MLKTNIELKPKVEAFLNEEIKMFINGEFVAAIGGKTFETYNPATEDVLAVVCEAQEEDIDAAVKAARSAFESGPWAEMTTAERAHLIYKLADLIEEHREELAQLEALDNGKPYQVALDDDISATVENYRYYAGWATKIIGQTIPISKDYLNYTRHEPVGVVGQIIPWNFPLVMSSWKMGAALATGCTIVLKPAEQTPLSLLYTAKLFKEAGFPNGVVNFVPGFGPEAGAAIVNHHDIDKVAFTGSTVTGKYIMRQSAEMIKHVTLELGGKSPNIILEDADLEEAINGAFQGIMYNHGQNCSAGSRVFVHRKHYETVVDALVKMANNVKLGAGMEKGTEMGPLVSKKQQERVLHYIEQGKKEGATVAAGGERALEKGYFVKPTVFTDVTDDMTIVKEEIFGPVVVVLPFDSTEEVIERANNSSYGLAAGVWTQNIKTGHQVANKLKAGTVWINDYNLENAAAPFGGYKQSGIGRELGSYALDNYTEVKSVWVNIK

SEQ ID NO: 12584 - DNA, 1425 bp, Bacillus cereus
  CDS (1)..(1425)
atgaaaaagcatttatatataaacggaagttggaaatctgtaaacacgtataaaccattatacgcaccatattctgaagaaacattagcggaaattgcacaaggaacggaagaagatgtaaaagaggctgttactgctgcaaaaaatgcaatgacaaaaatgaataaattatctgcatatgatcgtgcgactattttagagaaagttgcacaaaaaatggatgaaagaagagaagaatttgcagagattattgcaaaagaagctgcaaaaccaatacgtgctgcaaggggagaagtagatcgtactgttcaaacgtacaaatttgcagctgaagaagcgaagcgtatatatggtgagacattgccattagacgccgcacctggtgcagatgggcgtattgcatatacaatccgaaagccgattggggttataggggctattacaccatttaatttcccattaaatttagtagcgcataaagttggaccagcaatcgctgccggaaatacagttgtattaaagccagctgatcaaacgccattatcatcttatgcattagttgagttatttgaagaggcaggattgccaaatggagctttaaatatcatttctggccctggccccacggttggtgaggcaatcgtcaaaaatgattacgttgcttctattacttttaccggaagtccaaaagttggaatcggaataaaacaaaaggctgggctaaaacgagttacgttagaactaggctcaaatgctgctgttattattgatgaagatgtagagttaacagatgaaataattgaacgtgtaaaatggggagcatttgttaataatgggcaagtttgtatttcagtacaacgtgtttttgtacatgaaacgaaaatacatgaatttctctcaaagctaaagaaagcgatggaatcagttgttgttggtgatccatcgcttgaggaaacggatgtatcagctttaatttcaaaaaaagatgtagagcgaattgatatgtgggttcaagaagcaattaaggaaggagcaactgttttatgtggtggtaagaagcaggatgcaagaatttttgaaccgactgtattaacaaatgttccagatcatgtatctgtgcagtgccaagaagtattcggtccactcatgacagtaaatacatttaaagaatttgatgaagcgattgagcaagtaaataattcgcgttacggcttacaggcgggagtatttacaaataatttatttaaagcaatgcgtgcaattgatgagctagaggttggtggtgtcatgattaatgatattccaacgttcagagtagatcatatgccttatggtggtgtgaaagaaagtggcacgggacgcgaaggaattaaatatgcaatagaagaaatgacagaaatgaaattagtatgtattaaaaaataa

SEQ ID NO: 12585 - protein, 474 aa, Bacillus cereus
MKKHLYINGSWKSVNTYKPLYAPYSEETLAEIAQGTEEDVKEAVTAAKNAMTKMNKLSAYDRATILEKVAQKMDERREEFAEIIAKEAAKPIRAARGEVDRTVQTYKFAAEEAKRIYGETLPLDAAPGADGRIAYTIRKPIGVIGAITPFNFPLNLVAHKVGPAIAAGNTVVLKPADQTPLSSYALVELFEEAGLPNGALNIISGPGPTVGEAIVKNDYVASITFTGSPKVGIGIKQKAGLKRVTLELGSNAAVIIDEDVELTDEIIERVKWGAFVNNGQVCISVQRVFVHETKIHEFLSKLKKAMESVVVGDPSLEETDVSALISKKDVERIDMWVQEAIKEGATVLCGGKKQDARIFEPTVLTNVPDHVSVQCQEVFGPLMTVNTFKEFDEAIEQVNNSRYGLQAGVFTNNLFKAMRAIDELEVGGVMINDIPTFRVDHMPYGGVKESGTGREGIKYAIEEMTEMKLVCIKK

SEQ ID NO: 12586 - DNA, 1632 bp, Streptomyces avermitilis
  CDS (1)..(1632)
atggatgctgtgacccaggtccccacccccgtcaatgagccggtgcacggctatgcccccggctcgcccgagcgcgcccgtctggaggccaagctcaaggagctggccgagaacccgatcgagctgccgatgaccatcggcggcgagaagcggctcggcggcggtgagcgcttcgaggtggtgcagccgcacaaccacaaggccgtcatcggcaccggcgcgcacgccacgcagcaggacgcgcaggacgcgatcgacgccgcgctggccgccgccccggcctggcgcgcgatgtccttcgacgaccgcgccgcgatcatcctgcgcgccgccgagctgctgtccggcccgtggcgcgagaccctcgccgcctccaccatgctcggccagtcgaagaccgcccagcaggccgagatcgactgtccgtgcgaactggtcgacttctggcgcttcaacgtcaagtacgcccgcgacctgctcgccgagcagcccccggccaactcgccgggcgtctggaaccgcctcgaccaccgcccgctcgagggcttcgtctacgcgatcaccccgttcaacttctcggcgatcgcgggcaacctgccgacggctccggcgctcatgggcaacgtggtcgtgtggaagccgtccccgacgcagacccacgccgccgtgctgctgatgcggctcctggaggaggcgggcctgcccaagggcgtcatcaacctcgtcaccggtgacggcatcgaggtctccaaggtcgccctggagcaccgcgatctcgcgggcatccacttcacgggttcgaccaagaccttccagtacctgtggaagacggtcggcaacaacatcgagaagtaccgctcgtacccgcgcctggtcggcgagaccggcggcaaggacttcctggtcgcgcacccgagcgccgaccgcgcggtcctgaagaccgccctgacccgcggtgccttcgagtaccagggccagaagtgctccgcgacctcccgcgcctaccttccggcctccatctggaactccggcttcaaggaggagttcgcggccgaggtcgactacctgaccatgggtgacgtcaccgacctgtcgaacttcgtcggcgcggtcatcgacgagcgctcgttcgccaagaacaaggcggccatcgaccgcgccaagtcggacccgacctgcacgatcgtggcgggcggcgagtacgacgactcggtcggctacttcgtgcgcccgacggtcgtcgagtgctcggacccggagaacgaggtcttcaagaccgagtacttcggcccgttcctcgccgtgcacgtctacgaggacgacgcgtacgacgagatgctgacccagatggagtcggcctcggactacgcgctgacgggtgcggtcgtctccaacgaccgtgcggcggccgcgtacacgatggacaagctccgctacgccgcgggcaacttctacatcaacgacaagtcgaccggcgccgtcgtcggccagcagcccttcggcggcggccgtgcctcgggcacgaacgacaaggcgggcgccccgcagaacctgatgcgctggacgctgacccgcgccatcaaggagacgctggtcccgccgaccgactacacgtacccgcacatgggctga

SEQ ID NO: 12587 - protein, 543 aa, Streptomyces avermitilis
MDAVTQVPTPVNEPVHGYAPGSPERARLEAKLKELAENPIELPMTIGGEKRLGGGERFEVVQPHNHKAVIGTGAHATQQDAQDAIDAALAAAPAWRAMSFDDRAAIILRAAELLSGPWRETLAASTMLGQSKTAQQAEIDCPCELVDFWRFNVKYARDLLAEQPPANSPGVWNRLDHRPLEGFVYAITPFNFSAIAGNLPTAPALMGNVVVWKPSPTQTHAAVLLMRLLEEAGLPKGVINLVTGDGIEVSKVALEHRDLAGIHFTGSTKTFQYLWKTVGNNIEKYRSYPRLVGETGGKDFLVAHPSADRAVLKTALTRGAFEYQGQKCSATSRAYLPASIWNSGFKEEFAAEVDYLTMGDVTDLSNFVGAVIDERSFAKNKAAIDRAKSDPTCTIVAGGEYDDSVGYFVRPTVVECSDPENEVFKTEYFGPFLAVHVYEDDAYDEMLTQMESASDYALTGAVVSNDRAAAAYTMDKLRYAAGNFYINDKSTGAVVGQQPFGGGRASGTNDKAGAPQNLMRWTLTRAIKETLVPPTDYTYPHMG

SEQ ID NO: 12588 - DNA, 3141 bp, Coxiella burnetii
  CDS (1)..(3141)
atgacagatactcacttgcttttttttgaaaaagcgatagcgcaaaatgcgatccgaccatcgttaaataaaacctatcgaatggatgaaaccacatgcgttaaccaccttctgaaaacaatcgcttttactccccggctggaagcagctgtcagtcgtttggccaaagagctggtaacggcggtgcgggaacaagagagtgagaagggcggtatcgaaggtttcatgatgcaatacgatttatccactgaagaaggcattttattaatgtgcttagcagaagctttgctgcgcgtgccggataaagaaaccgaaaaccttttaattcgagataaattaacgagtgcagaatggaataaatacgtaggcgctagcgaatcttcgtttgtgaatttcgcgacatggggacttgcattatcgggaaaaattttaaagaaagaaaaagatgggcaattcaagaatgtttggcgcaatctcgttcgcagaagtggcgaaccggtcatccgcaaagcagttcgtgaagcgatgaaattaatgagcgaacattttgttttggggcggaccattgaagaagctgtcaaacgttcacaaagcgctataaaagaaggctttcgtcattcttacgacatgttaggtgaagtggcgcgcacccaagaggacgccgatcgttattatgattcctatcatcgtgccattagtgttttaggaaaaagtcatcccacaaaatccgttcatgaggcgccaggcatttccgttaaattatccgctttataccctcgatacgattttaaaaaacgagaattagcggtgccttttttgattgagcgcgtaaaagaattggcattgcatgctaaagaacaaaaaatcggcatgaccattgacgcggaagaagcggatcgcttggatatttctctcgatatttttgaagcgctttttacggatgaagcgtttgaaaattggcaaggtttagggcttgctgtgcaagcttatcaaaaacgagccttttatttaatcgattggttaattgatttagctcaacgacaaaaacgtcgcattcctgttcgtttagtaaaaggagcttattgggataccgaaataaaattagcgcaaatggaaggacttagtggctatccggtttttacccgaaaagtaaatacagatatatcttacattgcgtgcgctcagaaaatgttgaacgcgcaagacgccatttatccgcaatttgcaacgcataatgcctactccgttgcagcgatattaaatcttatggatcaccattacgataattacgaatttgaatttcagcaattgcagggtatgggtaaagcgctccatcattacattgtcactaaacttaaattaccgtgtcgagtttacgcgcctgtcggctatcacgaagatttattaccttatttagtccgacgattactggaaaatggtgcgaacagttcgtttgttaatcgcattgctgacaaaaccgtgcccgttgaccagcttatcgaaagtcccgtcaaaaaaatcgaagcttttggggatattcccaatccgaaaattcctttacctaaaggtattttcaaaacgcggactaattcaagtggcattgatttaagtaatttcgctgaattaatgcctttaaatgaggaaattcatcatgccttggaaaaagaatgggaggcagcgccgtttttacaagaaattaaaaatggtaaacctgtttttgatccaacggataatcgtcgccaaataggggtaattgaacttgcgaatgaatccgatgtagagaaagcgatacaagcgggtcattcagcattcccaaactgggatcaaaaagggatttccgcacgggcgactattttaagaaaaatggcggatttattagaaaaacataaagcggaattaatggcagtggtggttcgcgaagggggaaggacgctgcaaaatgcactgtcagaagtgcgagaagcgacagatttttgtcgttactatgctgagcaggcggaacagcatttaagtgataaggctttgccaggctacacgggtgaaagtaataccctgcggatgaatggacgtggaattattttgtgtatcagcccttggaattttcccattgctatttttacagggcaaattgccgccgctttggtgactggtaatgccgttatcgcaaaaccctcgggacagacgcctttaactggcgcgttggtgacgcggttgtttcatgaagcgggtgtgccgaaagaaattttgcagttaatgccgggttcgggcaaaacggtgggacaggcgcttatcgaggataccaaaatcagtggcgtgattttcacgggttcagatgctaccgcgcggcatattcaaaaaacgttggccgcccgcccgggcccgatcgtgccctttgtagcagaaacctccggtattaatgccatgatcgcagattcgaccgctttacccgaacagttagttaatgacgtcattgtttctgcctttgatagcgctggacagcgctgttcagcacttcgaattttgtatattcaagaggatatcgcggatgacgttattaagatgctaaagggcgcaatggccgaaattaaaatgggcgaccccctgctcttatccacggatgtcggtcctgttattgacgctaatgcgcaaaaaacgctgcaaaaacaccaagcattgatgcaaaaagaagcgaaattaatttataaagtggatttgcctcgcgaaaccgattttgggactttcgttgcgccacaagcctacgaattgcctaatttgggactgattactgaggaagtatttggacctattttgcatgttattcgttataagcgagaaaatttgaataaagttatcgaagaaatcaacgggctgggttacggtttaaccttcggcatccaaagccgcatagatgaaacagtcgattatatccagcagcgtattaacgcaggaaatatttacgttaatcgcaatacggttggcgccgtggtaggcgtgcagccttttgggggcagttggttgtccggtaccggccccaaagcgggtggtcctcattatcttccccgtttttgcatagaaagcacactgactatcaacacgacggcagccggcggaaatgcttcgcttatggcgatggaggattag

SEQ ID NO: 12589 - protein, 1046 aa, Coxiella burnetii
MTDTHLLFFEKAIAQNAIRPSLNKTYRMDETTCVNHLLKTIAFTPRLEAAVSRLAKELVTAVREQESEKGGIEGFMMQYDLSTEEGILLMCLAEALLRVPDKETENLLIRDKLTSAEWNKYVGASESSFVNFATWGLALSGKILKKEKDGQFKNVWRNLVRRSGEPVIRKAVREAMKLMSEHFVLGRTIEEAVKRSQSAIKEGFRHSYDMLGEVARTQEDADRYYDSYHRAISVLGKSHPTKSVHEAPGISVKLSALYPRYDFKKRELAVPFLIERVKELALHAKEQKIGMTIDAEEADRLDISLDIFEALFTDEAFENWQGLGLAVQAYQKRAFYLIDWLIDLAQRQKRRIPVRLVKGAYWDTEIKLAQMEGLSGYPVFTRKVNTDISYIACAQKMLNAQDAIYPQFATHNAYSVAAILNLMDHHYDNYEFEFQQLQGMGKALHHYIVTKLKLPCRVYAPVGYHEDLLPYLVRRLLENGANSSFVNRIADKTVPVDQLIESPVKKIEAFGDIPNPKIPLPKGIFKTRTNSSGIDLSNFAELMPLNEEIHHALEKEWEAAPFLQEIKNGKPVFDPTDNRRQIGVIELANESDVEKAIQAGHSAFPNWDQKGISARATILRKMADLLEKHKAELMAVVVREGGRTLQNALSEVREATDFCRYYAEQAEQHLSDKALPGYTGESNTLRMNGRGIILCISPWNFPIAIFTGQIAAALVTGNAVIAKPSGQTPLTGALVTRLFHEAGVPKEILQLMPGSGKTVGQALIEDTKISGVIFTGSDATARHIQKTLAARPGPIVPFVAETSGINAMIADSTALPEQLVNDVIVSAFDSAGQRCSALRILYIQEDIADDVIKMLKGAMAEIKMGDPLLLSTDVGPVIDANAQKTLQKHQALMQKEAKLIYKVDLPRETDFGTFVAPQAYELPNLGLITEEVFGPILHVIRYKRENLNKVIEEINGLGYGLTFGIQSRIDETVDYIQQRINAGNIYVNRNTVGAVVGVQPFGGSWLSGTGPKAGGPHYLPRFCIESTLTINTTAAGGNASLMAMED

SEQ ID NO: 12590 - DNA, 1539 bp, Caenorhabditis elegans
  CDS (1)..(1539)
atgctctcattcgcagctcgacgctccttaatcacacaaaaatgcgccgccagcacgtacagcggtctaacatcggcggattttctcaaaaagaagacaaatgagccgattttagagtatcgaaaaggaagcaaagaacgacaggatttggaggcagcgttggcgttctacagcaagaacatcacagaagttccattgagaattggcgacaagaaaatcacgaataaattggagcagaagcaagttattccctctgaccatcgttcaacacttgccaagtacacttatgccaccggagagcaaattcaagaagccatcgatgtggctcttcaggcgagaggcgcctgggagagaaaaccgcttaaagaacgagctgaaattttgctccgcgccgccgatttggccgctggaaagtaccgaatgaagctgaacgcctccacgatgctcggccagggaaagaatattattcaggctgaaattgacgccgcctgtgagctcatcgatttcttccgattcaacgcggttttcgctatggagctggagcattatgagccgatttccacgaaaatcaccaaaaatacgatgcagttccgtggaatggagggattcgtcgccgcaatcgcaccgttcaattttacggcgatcggaggaaatttgccgactgctccggcgcttatgggtaacgtctccctctggaagccatcgaacaccgccgtgctctccaattatataatctacgaactcctcgaggaagctggtatgccacctggaattctctcattcttgccatcagatggccccgttttcggtgacgtcatcaccgcatctccacacttgagcgctgtcaatttcactggctccgtgccaactttcaagacgatttggagaaaagtcgccgagaatttggataactatgtgacttttccgaaactcatcggagaatgcggcggaaaaaacttccactttgtgcatccatccgcccacgtggacgctgtcgccgctggaaccgcccgttccgcctgggaatattcgggacaaaagtgctcggcgtgctccaggatgtacgcgccaaaatcgatttggccaaagattctcgagaaaatctcggcgattcacaaagagatcaagcttggagatgttcgcgatggatccgtctttctgtcggctgtgatcgatgataaggcgtttgccaggctcaaggcctacattgactttgcgaaaaccggagccgacggagcaaatgtggtgctcggcggaaaatgtgacgacaaaacgggatacttcatcgagccgaccctgatcactgtgacggatccgaagagcaagcttctcactgaggaaatgttcggaccggtggtgacggtactggtctacgaggattcgaaggttgatgaggtgctcgcgactgtgaaagacgcgacaccttatgggctgactggcgccgttttttcgcaggataaggagttcctttataggttggcaactacaaaaaatacaagtttttgcacaggttttcagggactcaaaaattttatctaa

SEQ ID NO: 12591 - protein, 512 aa, Caenorhabditis elegans
MLSFAARRSLITQKCAASTYSGLTSADFLKKKTNEPILEYRKGSKERQDLEAALAFYSKNITEVPLRIGDKKITNKLEQKQVIPSDHRSTLAKYTYATGEQIQEAIDVALQARGAWERKPLKERAEILLRAADLAAGKYRMKLNASTMLGQGKNIIQAEIDAACELIDFFRFNAVFAMELEHYEPISTKITKNTMQFRGMEGFVAAIAPFNFTAIGGNLPTAPALMGNVSLWKPSNTAVLSNYIIYELLEEAGMPPGILSFLPSDGPVFGDVITASPHLSAVNFTGSVPTFKTIWRKVAENLDNYVTFPKLIGECGGKNFHFVHPSAHVDAVAAGTARSAWEYSGQKCSACSRMYAPKSIWPKILEKISAIHKEIKLGDVRDGSVFLSAVIDDKAFARLKAYIDFAKTGADGANVVLGGKCDDKTGYFIEPTLITVTDPKSKLLTEEMFGPVVTVLVYEDSKVDEVLATVKDATPYGLTGAVFSQDKEFLYRLATTKNTSFCTGFQGLKNFI

SEQ ID NO: 12592 - DNA, 3132 bp, Vibrio parahaemolyticus
  CDS (1)..(3132)
atgtttacagctacgaacgtgttgacaccggaatttatcgggcagccgcttgataagttgtggtcactgatctcgccattgtatatggtggacgagtctcaatggctagagcaattattgccactagcgacgccgacaacggaagaaaaatcggcgatcactaaccaaacgaccaaacttattgaagccattcgtgccgataagaagtcaatccagatgattgatgcacttttgctggaatacagtctcgatactcaagaaggtatcttgctgatgtgtcttgcagaagcgttaatgcgaatcccggatgcggcaaccgcagacgcgctgattaaagacaagttaagcgttgcggactggaaatctcacctgaaaaactcggactctgttttcgttaacgcgtcaacatggggtctaatgctgacaggtaaagtggtcggtcttggtgagcaaggcacccagagcccaagtcaggctgtaaaccgtctggttaacaaattctctgaacctgtgattcgtaaagccatgtatcaggcaatgaagatcatgggtcaccagtttgtccgcggccgcacgattgaagaagcgcagaaaaatggtcgcccgatgcgcgacaaaggtttcacttactcatttgatatgttgggtgaagcggcgctaacaactgcggatgcaaacaaatacttcaaagattacctaatggcgatcgaagcggtgggtcgcgagacttacggtaacgacaccagccctgcgccttcggtttctatcaagctttcagcattgcaccctcgctacgaagtggcgaacgaagagcgtgttatgactgagctgtacgaaacgctcatgcaactactaaaacgcgcgattgaagtcgacgttgcgatcacgattgatgcagaagaagctgatcgccttgagctgtctctaaagctgttcgagaagatttaccgcagtgacctcgtgaaaggttggggcaagtttggtcttgttgtgcaagcgtactcgaagcgtgctctaccagtattggtttggctcaatgcccttgcgaaagagcaaggtgacttgatcccacttcgcttggtaaaaggcgcgtactgggatagcgaaatcaaatggtcacaacaagcgggctacgaaaactacccggtgtacacacgcaaagaagcgaccgatgttgcttaccttgcatgtgcgcgtttcttattaagcgaaggcgtacgtggcaatatcttcccgcaatttgccagccacaatgcgcacacagttactgcgattgcagtgatggcgcagcataaggattttgaattccaacgcctacacggcatgggagattcactctacaaccacgtgatggagaaatacggccaacctgttcgtatttacgctccagttggtagccacgcggatctactgccttaccttgttcgtcgtttgctagaaaatggcgcaaacagctcgtttgtacaccgtttggttgacgcgcgttgcccaatttctgaactgacacatcaccctgtggatgcgctaaccagttttgcgacgctgaataacgataagatcccaatgccttcaggtattttccctgagcgtaaaaactcttacggcgtcaacattgatatcgaaagcgaagcaaaaccatttgaagcgcaagttgaaagcttcctaaacaataagtgggttgcgggccctgtgatcaacggtgaacgttttgccgaaagcatgatcaaggaaaacctcgctgagatcattaccgcgccttacgatcgtcgtgttgaagtgggtcaagtcgcttttgcaactcttgatcatgtttccgctgcgattgaagcggcgcaagcggcattcccagaatggaaaggcactgcgattgagcaaaaagcgaagtgtttagaaacacttgctgacctgatggaagcaaacttggcggagttggtggcgatttgtcatcaagaagcgggtaaaaccattcacgacagcattgatgaagttcgtgaagcggttgatttctgtcgttactacgcaaaacaagcgcaaaacctacaaccatttgaactggaaggttttgatggtgtgaaacgcatttcaagccgtgaaggtcttggtgtgttcgtttgtattagcccttggaacttccctctggcgattttccttggtcaagtaaccgcggcgcttgttgcgggtaacactgtagttgctaaaccggctgaacaaaccagcttgattgctgctcgcgcgattgatttgatgctggaagctggcttcccagctggcgtaattcaattacttcctggtcgcggtggtgagattggtcatgcactaacctctcacgacgccatcgcaggtgtcgcatttacgggctctacggcaacggcacagcgcatcaacgtaacgttggcagagcgtaccgcgaagccagtaccgtttatcgcggaaactggcggccaaaacgccatgatcgtcgacagtactgcactgccagagcaggtggttcgtgatgtgattcgctctgcgtttgcatcggcgggtcaacgctgttctgcgcttcgtgtgctgtttgttcaagaagacgttgcggaccgcatcatcacccttatccaaggcgcgatgaaagagctacatgttggcttgccttacttgcacaaaaccgatgtgggtccggttattgaccgcaatgcgaagcaaaaactccttgctcacctagaacagatgagcagcacgcagaagaaagttgcgcagctgcaactggaagaagcgtgtcaatacggcgattttgttgcgccaagtgcgtttgaaatctcaggcattgatgttctgaaagaagagcaatttggtcctatcttgcacattgttcgctttaaagcgtctgaactgccaaacgtggtagagcagatcaaccaaacaggttttggtctaacaatgggcattcacagccgcaacgaaaccacttatcgctggattgaaaaacacgctcgcgtgggtaactgctacatcaaccgagatcaagttggtgcggttgttggcgttcagccatttggtgggcaaggcttgtctggtacaggtccaaaagctggtggtcctcactacttgtaccgctttactcaacatcttcttgctcaagcagagaacgcataa

SEQ ID NO: 12593 - protein, 1043 aa, Vibrio parahaemolyticus
MFTATNVLTPEFIGQPLDKLWSLISPLYMVDESQWLEQLLPLATPTTEEKSAITNQTTKLIEAIRADKKSIQMIDALLLEYSLDTQEGILLMCLAEALMRIPDAATADALIKDKLSVADWKSHLKNSDSVFVNASTWGLMLTGKVVGLGEQGTQSPSQAVNRLVNKFSEPVIRKAMYQAMKIMGHQFVRGRTIEEAQKNGRPMRDKGFTYSFDMLGEAALTTADANKYFKDYLMAIEAVGRETYGNDTSPAPSVSIKLSALHPRYEVANEERVMTELYETLMQLLKRAIEVDVAITIDAEEADRLELSLKLFEKIYRSDLVKGWGKFGLVVQAYSKRALPVLVWLNALAKEQGDLIPLRLVKGAYWDSEIKWSQQAGYENYPVYTRKEATDVAYLACARFLLSEGVRGNIFPQFASHNAHTVTAIAVMAQHKDFEFQRLHGMGDSLYNHVMEKYGQPVRIYAPVGSHADLLPYLVRRLLENGANSSFVHRLVDARCPISELTHHPVDALTSFATLNNDKIPMPSGIFPERKNSYGVNIDIESEAKPFEAQVESFLNNKWVAGPVINGERFAESMIKENLAEIITAPYDRRVEVGQVAFATLDHVSAAIEAAQAAFPEWKGTAIEQKAKCLETLADLMEANLAELVAICHQEAGKTIHDSIDEVREAVDFCRYYAKQAQNLQPFELEGFDGVKRISSREGLGVFVCISPWNFPLAIFLGQVTAALVAGNTVVAKPAEQTSLIAARAIDLMLEAGFPAGVIQLLPGRGGEIGHALTSHDAIAGVAFTGSTATAQRINVTLAERTAKPVPFIAETGGQNAMIVDSTALPEQVVRDVIRSAFASAGQRCSALRVLFVQEDVADRIITLIQGAMKELHVGLPYLHKTDVGPVIDRNAKQKLLAHLEQMSSTQKKVAQLQLEEACQYGDFVAPSAFEISGIDVLKEEQFGPILHIVRFKASELPNVVEQINQTGFGLTMGIHSRNETTYRWIEKHARVGNCYINRDQVGAVVGVQPFGGQGLSGTGPKAGGPHYLYRFTQHLLAQAENA

SEQ ID NO: 12594 - DNA, 3954 bp, Pseudomonas syringae
  CDS (1)..(3954)
atggccaccaccactttgggcgtcaagctcgacgaccctacccgcgagcgattgaaagccgccgcccattcgatcgaccgcacgccgcactggttgatcaagcaggcgattttcaattacctggaaaagctggaaagtggtgcaaccttgcttgagctgaacggcgcgacaggcaaagacagcgaagaccgtggtgagctggcagaagatgcaggcctgcaatgctttctggattttgccgaaagcattcagccgcagtcagtgctgcgtgcggcgatcacttccgcctaccgtcgcccggagcaggaagtggtgcctatgctgctggaacaggcacgcctgacagcgcctgtcgccgaagcgaccaacaagctcgccgcgtcgattgccgaaaaactgcgcaatcaaaaaagcgcgggcgggcgcgcaggcatcgttcaaggcctgctgcaggagttttcgctgtcctcccaggaaggcgttgccctgatgtgtctggctgaagcactgctgcgtattcccgacaaaggcactcgcgatgccttgattcgcgacaagatcagcaacggcaactggcagccgcacctgggcaacagcccgtcgctgttcgtcaacgcagccacctggggcctgctgctgaccggcaagctggtcgccacgcacaacgaagcaggcctgacctcctcgctgagccggatcatcggcaagcgcggcgaaccgatgatccgcaagggcgtcgacatggccatgcgcctgatgggtgagcagttcgtcaccggcgaaaccattggcgaggctctggccaatgccagtcgtttcgaagccaagggcttccgctactcctacgacatgctgggtgaagcagcgttgaccgaacacgacgcgcagaaatatctggcgtcctacgagcaggccattcattccatcggcaaagcctcccacggtcgcggcatctacgaaggcccgggtatttccatcaagctgtcggcgctgcatccgcgctacagccgcgctcagtacgagcgcgtcatggacgagctctacccgcgcctgctgtcgctgaccctgctggccaaacagtacgacatcggcctgaacatcgacgccgaagaagccgaccgcctggagctgtcgcttgatctgcttgagcgcctgtgcttcgagccgcaactgaccggctggaacggtatcggtttcgtgattcaggcttaccagaagcgctgcccttatgtgatcgactacgtgatcgatctggctcggcgcagtcgtcatcgcctgatgatccgcctggtaaaaggcgcgtactgggacagcgaaatcaagcgtgcgcaggttgaaggtctggaaggctatccggtctacacccgcaaggtgtacaccgacgtttcctatatcgcctgcgcccgcaaactgctggccgcaccggaagtcatctatccgcagttcgccacccacaacgcccacaccctggcggccatctaccagattgccggtcagaattattaccccggccagtacgagttccagtgcctgcacggcatgggcgagccactctacgagcaggttgttggcaaagtcgccgacggcaagctgaaccgtccgtgccgcgtgtacgcgccggttggcactcacgaaacgctgctggcctatctggtccggcgcctgctggagaacggcgccaacacctcgttcgtcaaccggattgccgaccattcgatctcgattcaggaactcgtcgccgatccggtcaaccagatcgaacgcatggcaacgcaggaaggcgggttcggcttgccacacccgcgtattccgctgccgcgcgacctgtatggcaccgagcgcgccaactccagcggcatcgatatggccaacgaacatcgtctggcgtcgctgtcctcagccctgctgtcgaccgcgcacaacgactggaaagctgcgccaatgctcggctgcccggccagtgaaggcacacttgctgcggcgttgaacccgtcggatctgcgtgacgtggtcggccatgtgcaggaagcctccttgcaggatgtcgataatgccatccagtgcgccttgagcgccggcccgatctggcaggccacgccgcccgccgaacgcgccgcgattctggagcgcgccgccgacctgatggaaggcgagattcagccgctgatgggcctgctggtccgtgaagcaggcaagacgttcgcgaacgccatcgccgaagtgcgtgaagcggtggacttcctgcgctactacgcagtgcaggcgcgcaacgacttcaccaatgatgcgcaccgtcctttgggcccggtggtctgcatcagcccatggaacttcccgctggcaatcttcagtggtcaggtggcggctgcattggctgcaggtaacccggtactggccaaacccgccgagcagacgccgctgattgcagctcaggcggtacgcctgctgcttgaagccgggatcccggaaggcgtggtgcaattgctgcccggtcgcggtgaaaccgtcggggccgggctggtgggcgatgagcgcgtcaagggcgtgatgttcaccggctccaccgaagtcgcccgcctgctgcaacgcaatgtcgccgatcgcctcgactctcagggtcgccctatcccactaatcgccgaaaccggcggccagaacgcaatgatcgtggactcctcggcgctgaccgaacaagtggtcatcgacgtagtgtcctcggcgttcgacagcgccgggcaacgttgctcggcactgcgcgtgctgtgcctgcaggaagattcggccgatcgcgtcattgaaatgctcaagggcgcgatggccgaaagccgtctgggcaacccggaacgcctgtccgtggacatcgggccggtgatcgatgccgaggccaaggccggcatcgagaaacacatccaggcgatgcgcgacaagggccgcacggtttatcaggttgccatcgccgaaagcgccgaactcaagcgcggcacctacgtgatgccaaccttgatcgagctggaaagcttcgatgaactgcaacgcgaaatcttcggcccggtgctgcacgtggtgcgctacaagcgcaaggagctcggccttttgatcgaccagatcaatgcatccggctacggcctgacgctcggcgttcacacgcgcatcgacgaaaccatcgccaaggtcatcgataacgtcaacgccggtaacgtctacgtcaaccgcaacatcgtcggtgccgtggtcggggttcagccgtttggcggcgaaggcctgtctggcaccggccctaaagccggtggcccgctgtacctgtatcgcctgttgtcgacacgaccgctggatgccatcgaaaaatcgtttgtgcgtggcgatgcattggttgcacctgatacacgtctgcgcgaagtgatgagcaaaccgctgcaagccttgaaggcctgggcagcgagcagccagcacgccgaactggatgtgctgtgcggccagtacgccgagcaatcgcaaagcggcatcacccgccaactggccggcccgaccggcgagcgcaacagctacgccattctgccacgcgaacacgtgctgtgcctggctgacgacgagaacgacctgctgacccaactggcagccgtactggctgtcggcagctcagccgtatggccggaaaccgacatcagcaaaccgctcttcgctcgcctgccaaaagaagttcaggctcgcatcaagctggtgcctgactgggccaaggacgaagtcgctatcgacgctgttctgcaccacggcgactccgaccaattgcgcgccatctgccaacagatcgcccagcgcagcggcgcaatcgtcggcgtcaacggtctgtcccacggcgaaaccaacgtccctctggaacgcctggtgatcgaacgggcactgagcgtcaacacggcggctgcggggggcaatgcgagcttgatgacgataggatga

SEQ ID NO: 12595 - protein, 1317 aa, Pseudomonas syringae
MATTTLGVKLDDPTRERLKAAAHSIDRTPHWLIKQAIFNYLEKLESGATLLELNGATGKDSEDRGELAEDAGLQCFLDFAESIQPQSVLRAAITSAYRRPEQEVVPMLLEQARLTAPVAEATNKLAASIAEKLRNQKSAGGRAGIVQGLLQEFSLSSQEGVALMCLAEALLRIPDKGTRDALIRDKISNGNWQPHLGNSPSLFVNAATWGLLLTGKLVATHNEAGLTSSLSRIIGKRGEPMIRKGVDMAMRLMGEQFVTGETIGEALANASRFEAKGFRYSYDMLGEAALTEHDAQKYLASYEQAIHSIGKASHGRGIYEGPGISIKLSALHPRYSRAQYERVMDELYPRLLSLTLLAKQYDIGLNIDAEEADRLELSLDLLERLCFEPQLTGWNGIGFVIQAYQKRCPYVIDYVIDLARRSRHRLMIRLVKGAYWDSEIKRAQVEGLEGYPVYTRKVYTDVSYIACARKLLAAPEVIYPQFATHNAHTLAAIYQIAGQNYYPGQYEFQCLHGMGEPLYEQVVGKVADGKLNRPCRVYAPVGTHETLLAYLVRRLLENGANTSFVNRIADHSISIQELVADPVNQIERMATQEGGFGLPHPRIPLPRDLYGTERANSSGIDMANEHRLASLSSALLSTAHNDWKAAPMLGCPASEGTLAAALNPSDLRDVVGHVQEASLQDVDNAIQCALSAGPIWQATPPAERAAILERAADLMEGEIQPLMGLLVREAGKTFANAIAEVREAVDFLRYYAVQARNDFTNDAHRPLGPVVCISPWNFPLAIFSGQVAAALAAGNPVLAKPAEQTPLIAAQAVRLLLEAGIPEGVVQLLPGRGETVGAGLVGDERVKGVMFTGSTEVARLLQRNVADRLDSQGRPIPLIAETGGQNAMIVDSSALTEQVVIDVVSSAFDSAGQRCSALRVLCLQEDSADRVIEMLKGAMAESRLGNPERLSVDIGPVIDAEAKAGIEKHIQAMRDKGRTVYQVAIAESAELKRGTYVMPTLIELESFDELQREIFGPVLHVVRYKRKELGLLIDQINASGYGLTLGVHTRIDETIAKVIDNVNAGNVYVNRNIVGAVVGVQPFGGEGLSGTGPKAGGPLYLYRLLSTRPLDAIEKSFVRGDALVAPDTRLREVMSKPLQALKAWAASSQHAELDVLCGQYAEQSQSGITRQLAGPTGERNSYAILPREHVLCLADDENDLLTQLAAVLAVGSSAVWPETDISKPLFARLPKEVQARIKLVPDWAKDEVAIDAVLHHGDSDQLRAICQQIAQRSGAIVGVNGLSHGETNVPLERLVIERALSVNTAAAGGNASLMTIG

SEQ ID NO: 12596 - DNA, 3954 bp, Pseudomonas putida
  CDS (1)..(3954)
atggcgactaccacccttggggtcaaactcgacgacccgacccgtgagcgactcaaagcagctgcgcagtccatcgaccgcacgcctcactggttgatcaagcaagcgatcttcaattacctggagaagctcgagggtggtgccaccctgaccgaactcaacggtcatgccagcaacccggccgacgatgccggtgaagtccaggccgaccacagccaccagtgcttcctcgaatttgccgagagcatcttgccgcagtcggtactgcgctcggcgatcaccgccgcctaccgccgccccgagcaggaagtggtgccgatgctgctggagcaggcgcgcctgagcgcgccgctggccgacgccaccaacaagctggccgcaagcattgccgaaaaactgcgcaaccagaaaagcgtcggcggccgtgccggtatcgtccagggcctgctgcaggaattctcgctgtcgtctcaggaaggcgtggcgctgatgtgcctggccgaagccctgctgcgtatccccgacaaaggtacccgtgatgcgctgatccgcgacaagatcagtaccggcaactggcagccgcacctgggcaacagcccgtcactgttcgtcaacgccgccacctgggggctgctgctgaccggcaagctggtcagcacccataacgaaaccggcctcacctcctcgctcacccgcatcatcggcaagagcggcgagccgatgatccgcaagggcgtcgacatggccatgcgcctgatgggtgagcagttcgtcaccggcgagaccattgccgaagccctggccaacgccagccgtttcgaggccaaaggcttccgttactcctacgacatgcttggcgaagccgcactgaccgagcacgacgcgcagaagtacctggcgtcctacgagcaggccatccactcgatcggcaaggcctcgcatggccgtggcatctatgaaggcccaggcatctcgatcaagctgtcggcactgcacccgcgctacagccgggcccagtacgagcgcgtgatggaagagctgtacccgcgcctgctgtcgctgaccctgctggccaagcagtacgacatcggccttaacatcgacgccgaagaagccgaccgcctggagctttcgctggacctgctcgaacgcctgtgcttcgagccatccctggctggctggaacggcatcggcttcgttatccaggcctaccagaagcgctgcccgtacgtgatcgactacgtcatcgatctggccaagcgcagccgccaccgcctgatgatccgcctggtaaaaggcgcctactgggacagcgagatcaagcgtgcccaggtcgaaggcctggaaggctacccggtctatacccgcaaggtgtacaccgacgtgtcctacgtcgcctgcgcccgcaagctgctggccgtgccagaagccatctacccgcagttcgccacccacaacgcccacaccctgtcggccatctaccacattgccgggcagaactattacccgggccagtacgagttccagtgcctgcacggcatgggcgaaccgctgtacgagcaagtggtcggcaagattgccgatggcaagctgaaccgcccgtgccgcgtgtatgcaccggtcggcacccatgaaacgctgctggcctacctggtgcgccgcctgctggaaaacggcgcgaacacctcgttcgtcaaccgcattgccgaccactcgatttccatccaggaactggtcgccgacccggtggccagcatcgagcgcatgggtacccaggaaggcagtatcggcctgccgcacccacgcattcccctgccgcgcgacctgtatggcaccgaacgggccaactcggccggcatcgacatggccaatgaacaccgcctggcgtcgctgtcctgcgccatgctggccaccgctcacaacgactggaaggctgccccgctgctggcctgcgccgccagcgagagcgctgccgcaccggtgctgaacccggctgaccaccgcgacgtcgtcggccatgtgcaggaggccaccgttgccgacgttgacaacgccatccagtgcgcactgaacgccgcgccgatctggcaggccaccccaccagccgagcgtgctgccattctggagcgcaccgccgacctgatggaggccgagatccagccgctgatgggcctgctcatccgcgaggccggcaagaccttcgccaacgccattgccgaagtgcgtgaagccgtggacttcctgcgctactacgcggtgcaggcacgtaacgacttcagcaacgacgcccaccgcccactgggtcctgtggtgtgcatcagcccatggaacttcccgctggcgatcttcaccggccaggtggccgcagccctggctgccggcaacccggtactggccaagcctgccgagcaaaccccactgatcgccgcccaggccgtgcgcctgctgctggaagctggcatcccagaaggcgtgctgcagctgctgccgggccgcggtgaaactgtcggtgccggcctggtcggagacgagcgcgtcaaaggcgtgatgttcaccggctccactgaagtggcccgcctgctgcagcgcaacgtcgctggccgtctggacaaccagggccgcccgatcccgctgatcgccgaaaccggcggccagaacgcgatgatcgtcgactcctcggcactgaccgaacaggtcgtgatcgacgtggtgtcctcggccttcgacagtgccggccagcgttgctcggccctgcgcgtactgtgcttgcaggaagactccgccgaccgcgtaatcgagatgctcaagggcgccatggctgaaagccgcctgggctgcccggaccgcctggccgtggacatcggcccggtgatcgatgccgaagccaaagccggcatcgagaagcacatccagggcatgcgcgagaaaggccgcccggtctaccaagtcgccattgccgatgctgccgagatcaagcgcggcaccttcgtcatgccaaccctgatcgagctggacagcttcgacgagctgaagcgcgaaatcttcggccccgtgctgcacgtggtgcgctacaaccgccgcaatctggaccagctgatcgagcagatcaacaactccggctacggcctgaccctcggcgtgcacacccgtatcgacgagaccatcgccaaagtggtggaaaccgccaacgccggcaacatgtacgtcaaccgcaacattgtgggtgcagtggtgggcgtgcagccgttcggtggtgaaggcctgtctggcaccggcccgaaagccggcggcccgctgtacctctaccgcctgctgtcgacccgcccggccgacgccattggccgccacttccagcagcaggacggcgaaggcacgccggaccgcaccctgcacgaacagctggtaaagccgctgcacggcctgaaggcctgggccgagaacaaccagctggccgacctggccgcgctgtgcagccagttcgccagccagtcgcagagcggcatcgcccgcctgctgccaggcccgaccggcgagcgcaacagctacaccattctgccgcgtgagcacgtgctgtgcctggccgacaacgaaaccgacctgctggcgcagttcgccgcggtactggccgttggcagctcggcggtgtgggttgacggtgaaccgggcaaggccctgcgcgcccgcctgccgcgtgagctgcaggccaaggtgaagctggtcgcggactggaacaaggatgaagtggcgttcgacgccgtgatccaccatggcgactcggaccagctgcgcggcgtatgccagcaggtggccaagcgtgccggggcgatcgttggggtgcacgggctgtccagcggggatcaccagattgcgctggagcgcctggtcatcgagcgcgcggtgagcgtgaacactgcagcggcgggtggtaacgccagcctgatgaccattggctaa

SEQ ID NO: 12597 - protein, 1317 aa, Pseudomonas putida
MATTTLGVKLDDPTRERLKAAAQSIDRTPHWLIKQAIFNYLEKLEGGATLTELNGHASNPADDAGEVQADHSHQCFLEFAESILPQSVLRSAITAAYRRPEQEVVPMLLEQARLSAPLADATNKLAASIAEKLRNQKSVGGRAGIVQGLLQEFSLSSQEGVALMCLAEALLRIPDKGTRDALIRDKISTGNWQPHLGNSPSLFVNAATWGLLLTGKLVSTHNETGLTSSLTRIIGKSGEPMIRKGVDMAMRLMGEQFVTGETIAEALANASRFEAKGFRYSYDMLGEAALTEHDAQKYLASYEQAIHSIGKASHGRGIYEGPGISIKLSALHPRYSRAQYERVMEELYPRLLSLTLLAKQYDIGLNIDAEEADRLELSLDLLERLCFEPSLAGWNGIGFVIQAYQKRCPYVIDYVIDLAKRSRHRLMIRLVKGAYWDSEIKRAQVEGLEGYPVYTRKVYTDVSYVACARKLLAVPEAIYPQFATHNAHTLSAIYHIAGQNYYPGQYEFQCLHGMGEPLYEQVVGKIADGKLNRPCRVYAPVGTHETLLAYLVRRLLENGANTSFVNRIADHSISIQELVADPVASIERMGTQEGSIGLPHPRIPLPRDLYGTERANSAGIDMANEHRLASLSCAMLATAHNDWKAAPLLACAASESAAAPVLNPADHRDVVGHVQEATVADVDNAIQCALNAAPIWQATPPAERAAILERTADLMEAEIQPLMGLLIREAGKTFANAIAEVREAVDFLRYYAVQARNDFSNDAHRPLGPVVCISPWNFPLAIFTGQVAAALAAGNPVLAKPAEQTPLIAAQAVRLLLEAGIPEGVLQLLPGRGETVGAGLVGDERVKGVMFTGSTEVARLLQRNVAGRLDNQGRPIPLIAETGGQNAMIVDSSALTEQVVIDVVSSAFDSAGQRCSALRVLCLQEDSADRVIEMLKGAMAESRLGCPDRLAVDIGPVIDAEAKAGIEKHIQGMREKGRPVYQVAIADAAEIKRGTFVMPTLIELDSFDELKREIFGPVLHVVRYNRRNLDQLIEQINNSGYGLTLGVHTRIDETIAKVVETANAGNMYVNRNIVGAVVGVQPFGGEGLSGTGPKAGGPLYLYRLLSTRPADAIGRHFQQQDGEGTPDRTLHEQLVKPLHGLKAWAENNQLADLAALCSQFASQSQSGIARLLPGPTGERNSYTILPREHVLCLADNETDLLAQFAAVLAVGSSAVWVDGEPGKALRARLPRELQAKVKLVADWNKDEVAFDAVIHHGDSDQLRGVCQQVAKRAGAIVGVHGLSSGDHQIALERLVIERAVSVNTAAAGGNASLMTIG

SEQ ID NO: 12598 - DNA, 3321 bp, Bacteroides thetaiotaomicron
  CDS (1)..(3321)
atggtacaacgtccgcaggacaagaaattcctcgtgaagatgctggatgaatcttcgcaaatccgtgaccgaaggatacttgccaaacgtatcaaaacccttctcgaccaatacggcgttcccgaatttctgaacaagcgggacagcttcctgttcaaaatgtatcaggcattcggccatcatttcgactttatcgccatccccatcatcaagaagcgcctgcgcatgaacacctcgcaggtcatcatcaacgaagcgcgtccgcaactcacgaagcatctggccatccgtgcaaaggagaaaatcgggcagaacgtcaacctgctgggcgaagtggtgctcggcaacggagaagccgaccatcgttaccaccattatctgaaagcgctcgaatcacccgacatcaactacatatcagtgaaaatatcgggaatctatgcgcagacacacgccttgaattatgaagaaagttttccggaactcatttcgcgaatgtccgcgctttatcagaaagcgattgatttcccctatacggacgaagaaggagtcagacgatccaagtttatcaatctggatatggaggagtacaaagatacccatttcacattacgcctcttcaagacagtgctcagcctgccgcagttcaagaactattccgccggaatcgtcgttcaggcatatctgccggacgcatacgactttcagaccgaactgatcgaatttgccaaagcacgtgtggcagaaggcggtgctccgatcaagatgcgtctggtgaaaggctgcaacctggaaatggaaaccgtcatctcttcgctgagaggctggcccaatccgatccgcccttccaaagaagaagtagacgccaactacctgcatctgctggaacgggcactgatgcccgaaaacgcaagggtattgcatcttggagtagcttcccataacctgttctccatcgcctacgcctatctgctggctcagaaatatggtacagccgaatacatgaccttcgaaatgctggaagggatggcgaaccacctatggagagcccaatccatgctcggcaaccgggtgattctttatactcccgtagtgaaaaacgaacattttctgaatgccgtctcatatctcgtccgccggatggatgagaatacggcacctgataacttcctgactcactctttcaatctgagaccgaacacaaaagagtgggatttcctggctaagcagttcgaagatgcctacgccatgaaagatcaactgagtcatgtgtccccacgcacacagaatcgcaatcttccttacacgcccgtcccaccggcagacgtcctgaagaatgaaccggacacggacttcgacctgccacagaatcaggaatgggtgcgttctatcttctccaaatggaagaaagacggaacggaacagccggaaatcattccgctgcaaataggtgcggaaacggtggtatgcgaaagccgctacccatatacagaccgttgtcaggacgatgaagtctgtatctgtgaaatgtcgcaggcggacagcgcacaagtggagaaaatcatcgaaattgcagaggcagaccctgccggatggagaaagaccacactcgaagaacgccaccggatcatgtacgaagcagccaaccggctcgccgatatgcggggcgatctgataggctgtatgtgtgccgtgacgggtaaaaccgtcattgaaggtgatgtagaagtatcggaagcggtagactatgcccgtttctatacgacagcgatgaagaagtttgccgcgctggatgacgtagaaatgaaaccgaaaggcaccatactggtcatctccccgtggaacttcccctgtgccatccctgtgggcggcatagtagccggactggcgggaggaaataccgttatactgaaacctgccaccgtagccgcccctgttgcgtggatgtttgccaaggcattctgggatgccggtgtgccgaaggaagcgctgcaagtcatcatcacccgccgggaagcactgaaagtactgactaccgcccccgccatcaaacatatcattctgacaggaggaacggacaccgcacagaatatcgcaaaagccaatccgaccactccgttatcggcagaaacgggaggtaaaaacgttattatcctcacagcgtcgggcgaccgtgaccacgccatcatgaacatcgtcacttctgccttcggcaatgccggacagaagtgttccgcctgttcgctgttgttagtcgaacgttccgtatacgaagacgaaaacttccgtagcaagctgaaagatgcggcgacaagcctgaaaaccggcagtgtgtggaatgccggaaatatcgtcggtccgatgattaccaacaagaacgataagttactgcaagccttcaacctcgaaccgggtgagtcatggctggttcccccgcgtttcatcgaccgcagagagtacatccttgcaccaactgtcaaatggggagtaaaaccggaaagtttctcattccgcaccgaattgttcggtcccctgctgagcgtggcctgtatcgagaaccttgaagaaggaatcaggctggtgaacgggttggattacggattgacctccggcctgcaaagtctggatgaaaaggagcagaagctgtggaagaactccgtaatggcaggaaacctgtatatcaaccggggaattaccggagccatcgtcaaccggcaaccattcggaggaatgaaactatccgccttcggtggtggtatcaaagcaggtggccccaactactgtacctgtttcctcgaaatcaccgacaaaccggacagccggaccgactaccgacagagttatgccaaagcctatcaggaagagttctcaaaaccgagagacgtcaaccggctatatggagaacaaaacctcttccgctatctgcctttgaagaacatgattctacgcctcttcccgaaagatacagacgaagaagcgacgatgattgcacacgccgcccgtatatgcagaactccgctcaccatcagttttggcccgacagatgatcgtagcagcagacttgccggactcggctgcacactccggaaagaatcattagaggacttcctgaaagaattgcccgaatatgaaagagtacgtacctgttcgccggatatacccgatgtcatgtacgaacgggcagcggaaaccaataaatacattgcgacagcaccgcctgtgaagcaagggcgcatcgagctgatacactatatcaaggagcaaagcatcgcctttgagtatcaccggtatggcagtatttcggaagtaccgccttgcgaataa

SEQ ID NO: 12599 - protein, 1106 aa, Bacteroides thetaiotaomicron
MVQRPQDKKFLVKMLDESSQIRDRRILAKRIKTLLDQYGVPEFLNKRDSFLFKMYQAFGHHFDFIAIPIIKKRLRMNTSQVIINEARPQLTKHLAIRAKEKIGQNVNLLGEVVLGNGEADHRYHHYLKALESPDINYISVKISGIYAQTHALNYEESFPELISRMSALYQKAIDFPYTDEEGVRRSKFINLDMEEYKDTHFTLRLFKTVLSLPQFKNYSAGIVVQAYLPDAYDFQTELIEFAKARVAEGGAPIKMRLVKGCNLEMETVISSLRGWPNPIRPSKEEVDANYLHLLERALMPENARVLHLGVASHNLFSIAYAYLLAQKYGTAEYMTFEMLEGMANHLWRAQSMLGNRVILYTPVVKNEHFLNAVSYLVRRMDENTAPDNFLTHSFNLRPNTKEWDFLAKQFEDAYAMKDQLSHVSPRTQNRNLPYTPVPPADVLKNEPDTDFDLPQNQEWVRSIFSKWKKDGTEQPEIIPLQIGAETVVCESRYPYTDRCQDDEVCICEMSQADSAQVEKIIEIAEADPAGWRKTTLEERHRIMYEAANRLADMRGDLIGCMCAVTGKTVIEGDVEVSEAVDYARFYTTAMKKFAALDDVEMKPKGTILVISPWNFPCAIPVGGIVAGLAGGNTVILKPATVAAPVAWMFAKAFWDAGVPKEALQVIITRREALKVLTTAPAIKHIILTGGTDTAQNIAKANPTTPLSAETGGKNVIILTASGDRDHAIMNIVTSAFGNAGQKCSACSLLLVERSVYEDENFRSKLKDAATSLKTGSVWNAGNIVGPMITNKNDKLLQAFNLEPGESWLVPPRFIDRREYILAPTVKWGVKPESFSFRTELFGPLLSVACIENLEEGIRLVNGLDYGLTSGLQSLDEKEQKLWKNSVMAGNLYINRGITGAIVNRQPFGGMKLSAFGGGIKAGGPNYCTCFLEITDKPDSRTDYRQSYAKAYQEEFSKPRDVNRLYGEQNLFRYLPLKNMILRLFPKDTDEEATMIAHAARICRTPLTISFGPTDDRSSRLAGLGCTLRKESLEDFLKELPEYERVRTCSPDIPDVMYERAAETNKYIATAPPVKQGRIELIHYIKEQSIAFEYHRYGSISEVPPCE

SEQ ID NO: 12600 - DNA, 3281 bp, Mus musculus
  CDS (130)..(1818)
ccgaaggaggtggaccgggcgatgctgcgcctcccgcagaggtagtgcgctccgggcttgtctagtccagccctgcggggctgactcttagcttcccacagctgcgcaagactgttaagagtctccgcgatgctgccgctgccgtcgctccgccgatccctgctgtcccacgcctggaggagcgctgggctgcgatggaagcacacctcttctctaaaggtggccaatgagcccatcttagcattctctcagggaagccccgagcgggatgcactgcagaaggctctgaaggacctgaagggccagacggaagccatcccctgcgttgtcggggacgaggaggtgtggacctccgatatacagtaccagttgtcgccctttaaccatgcacacaaggtggccaagttctgctatgctgataaggccttgctcaacagagccatcgatgctgccttggctgccaggaaagagtgggacctgaagcccatggcagaccgggcccaggtcttcctgaaggcggcagatatgctgagtgggccccgaagggcggaagtccttgccaagaccatggtgggacagggcaagaccgtgatccaagcagagatcgatgctgcagccgaactcatcgacttcttcaggttcaacgcaaagttcgccgtggaactggagggggaacagcccatcagcgtgccacccagcaccaaccacacggtgtaccgggggctggagggcttcgtggcggccatctctcccttcaacttcaccgcgattggaggcaacctggcaggcgctccggccttaatgggcaacgtggttctgtggaagcccagtgacactgccatgctggctagctacgccgtctaccgcatcctccgggaggccggcttgccccccaacataatccagtttgtgccagccgacgggccaaccttcggggacacagtcaccagctcagagcacctttgtggcatcaattttacaggcagtgtccccaccttcaaacacctgtggaggcaggtggcccagaacctggaccggttccgtaccttcccacgcttggctggagagtgtggcgggaagaatttccatttcgtgcacagctcggccgacgtggacagcgtggtgagcgggacgctgcgctcggcattcgagtacggcggccagaagtgctcagcctgctcgcgcctctacgtgccgaagtcgctgtggccgcagatcaaagggcgactgctggaggaacacagcaggatcaaagtgggggatcctgcagaggactttgggaccttcttctccgcagtgattgatgccaaggcctttgctcgcattaagaagtggttggagcatgcacgttcctcgcccagcctcagcatcctggcagggggccagtgtaacgagtcagtgggttactacgtggaaccatgtatcattgagagcaaggacccacaggaacccatcatgaaggaggagatcttcggtcctgtgttgacagtatatgtgtacccagatgataaatacagagagacgctgaagctggtcgacagcactaccagctatggcctcacgggggcagtgttcgcccaggataaagcgattgtccaggaggccacgaggatgctgaggaacgctgctggcaacttctacatcaacgataagtctactgggtctgtggtgggccagcagccctttgggggcgcccgggcctcaggaaccaatgacaagccaggaggtccccactacatcttacgctggacatcaccccaggtcatcaaggagactcataagcccctgggggactggcgatactcctacatgcagtgagcccaggccagcacctctgttgtcaagcagatgtccatccagatgactgacatctctgcactgaccccctgctccccaccagctcctcctggactctctacagctgagctggaccctgtcctggccactgggtgcctgtcctcggagtcaggtgcccaggcttcgggtcatattggggaggatcagcccaatccacccagaattctcatctgctgcagaacgccctggtacctggcaggttccccgcctgtctgcttttctctcttcatcctgggcctggtgactcagagggcctcagaacctaaagggatattctcaggaccctgtcagggaaggagacagctctggtgtctcacttcaccactcagagactcctgactttggccttgtcccctacacatgtccagtgagataggacctcagccagatgactgcaggggcaccagctggctttgccccttggtctgtgctagctcctcctgcagggacttgtatccagccatatgcctttagtcccatgtgccttcctccagggtgcttgtgcatccctgagccttcatccctcctggacacctgctgggagtgaccagtggtggtcgtcccatacaggctgagtctgggaaacctcgaggtgggcctccattccatactcttgtgggatggatgcagccagcccagtggtagccagggagagctcctgcttgggtcctggataatcaaatgtttctagtggcttaagagcacacatgactttttaaggacatttgcctggggtccacatggaactggtatagctgtcaccaagggctacactgaagggtggggtaccagtatcagggccagctctgccttctgcttcctttcagggtccatgttgcttcccagggagcaggactcggctacaaatgtcccagttgtgcagttgtacactgtgagggggtggggctactgccacccgagaaaaaaaaatgccagatatctactcaaagtggccatggagggaggggaagggcagactggcttctcattcctaatctaatgaactgccagcgtcttgtcacgtggttctgtgcggtgtcatgggagggaggagtgactccggagcccaatggctaggtttagaaatggctttctgtcccaccccccccaaagtggtcatcaaaaaaatcatgtaatttctccaaccttccatgtctaaaatggtgatgattccgtcatatgcacggaggatcaatgggctaattcctgtggatttcagacaaatgatcagaaatgtcacccgttcgtttgttctcctaccagtatgtgctgtggtggctgatcttatgtgtcacctttgcctggccacggttcccagagacctggtcagccactgtggaagtttttatgatggtgcaataaatacgtgggcaaaataaaaaaaaaaaaaaaaaaaaaaaaaaaaaaaaaaaaaaaaaaaaaaa

SEQ ID NO: 12601 - protein, 562 aa, Mus musculus
MLPLPSLRRSLLSHAWRSAGLRWKHTSSLKVANEPILAFSQGSPERDALQKALKDLKGQTEAIPCVVGDEEVWTSDIQYQLSPFNHAHKVAKFCYADKALLNRAIDAALAARKEWDLKPMADRAQVFLKAADMLSGPRRAEVLAKTMVGQGKTVIQAEIDAAAELIDFFRFNAKFAVELEGEQPISVPPSTNHTVYRGLEGFVAAISPFNFTAIGGNLAGAPALMGNVVLWKPSDTAMLASYAVYRILREAGLPPNIIQFVPADGPTFGDTVTSSEHLCGINFTGSVPTFKHLWRQVAQNLDRFRTFPRLAGECGGKNFHFVHSSADVDSVVSGTLRSAFEYGGQKCSACSRLYVPKSLWPQIKGRLLEEHSRIKVGDPAEDFGTFFSAVIDAKAFARIKKWLEHARSSPSLSILAGGQCNESVGYYVEPCIIESKDPQEPIMKEEIFGPVLTVYVYPDDKYRETLKLVDSTTSYGLTGAVFAQDKAIVQEATRMLRNAAGNFYINDKSTGSVVGQQPFGGARASGTNDKPGGPHYILRWTSPQVIKETHKPLGDWRYSYMQ

SEQ ID NO: 12602 - DNA, 1641 bp, Streptomyces coelicolor
  CDS (1)..(1641)
atggacgctgtgacccaggtccccacccccgtcaacgagccggtgcacggctacgcgcccggttcgcccgagcgcgcccgtctggaggccaagctcaaggagctggccgacaacccgatcgacctgccttgcaccatcggtggcgagaagcggatgggcggcggcgagcgcttcgacgtcgtgcagccgcacaaccacaagtcccgcctgggcacgtacgccaacgccacgcaagcggacgcccaggacgcgatcgacgccgccctggccgccgcccccgcgtggcgcgcgatgtccttcgacgaccgcgcggcgatcatcctgcgcgccgccgagctgctgtccggcccgtggcgcgagaccatcgccgcctccaccatgctcggccagtccaagaccgcccagcaggccgagatcgacagcccctgcgagctgatcgacttctggcgcttcaacgtgcactacgcgcggaacatcctcgccgagcagcccccggccaactcccagggcgtgtggaaccgtatggaccaccgcccgctggagggcttcgtctacgcgatcacgccgttcaacttcagcgcgatcgcggccaacctgcccaccgccccggccctgatgggcaacgtcgtggtgtggaagccgtccccgacgcagacccacgccgccgtgctgctcatgcagctgctggaggaggccggactgcccaagggcgtcatcaacctggtcaccggcgacggcatcgcggtctccgaggtcgccctggagcaccgggacctcgcgggcatccacttcaccggttcgaccaagaccttccagcacctgtggaagacggtcggcaacaacatcgagaagtaccgcacctacccgcgcctggtcggcgagaccggcggcaaggacttcctggtcgcccacccgagcgccgaccgcgccgtcctcaagacggccctgacccgcggtgccttcgagtaccagggccagaagtgcagcgccacctcccgcgcgtacatcccggcgtcgatctggaacgacgggttcaaggaggagttcgccgccgaggtcgactacctcaccatgggtgacgtcaccgacctgtcgaacttcatcggcgcggtcatcgacgagcggtccttcgccaagaacaaggccgccatcgaccgggccaaggaggacgagacctgcacgatcgtcgcgggcggctcctacgacgactcggtcggctacttcgtccgcccgaccgtcgtcgagtgcaccgacccggagaacgaggtcttccgcaccgagtacttcggccccttcctcgccgtgcacgtgtacgacgacagcgccgacgacgcgtacgacgcgatgctgacccagatggagtcggtctcggactacgcgctcaccggctcggtgatctccaacgaccgcgcggcggccgcgtacacgatggagaagctgcgctacgcggcgggcaacttctacatcaacgacaagtcgaccggtgccgtggtcggccagcagcccttcggcggcggccgcgcctccggcaccaacgacaaggccggcgccccgcagaacctgatgcgctggacgctgacccgcgccatcaaggagacgctggtcgcaccgaccgactacacgtacccgcacatgggctga

SEQ ID NO: 12603 - protein, 546 aa, Streptomyces coelicolor
MDAVTQVPTPVNEPVHGYAPGSPERARLEAKLKELADNPIDLPCTIGGEKRMGGGERFDVVQPHNHKSRLGTYANATQADAQDAIDAALAAAPAWRAMSFDDRAAIILRAAELLSGPWRETIAASTMLGQSKTAQQAEIDSPCELIDFWRFNVHYARNILAEQPPANSQGVWNRMDHRPLEGFVYAITPFNFSAIAANLPTAPALMGNVVVWKPSPTQTHAAVLLMQLLEEAGLPKGVINLVTGDGIAVSEVALEHRDLAGIHFTGSTKTFQHLWKTVGNNIEKYRTYPRLVGETGGKDFLVAHPSADRAVLKTALTRGAFEYQGQKCSATSRAYIPASIWNDGFKEEFAAEVDYLTMGDVTDLSNFIGAVIDERSFAKNKAAIDRAKEDETCTIVAGGSYDDSVGYFVRPTVVECTDPENEVFRTEYFGPFLAVHVYDDSADDAYDAMLTQMESVSDYALTGSVISNDRAAAAYTMEKLRYAAGNFYINDKSTGAVVGQQPFGGGRASGTNDKAGAPQNLMRWTLTRAIKETLVAPTDYTYPHMG

SEQ ID NO: 12604 - DNA, 1494 bp, Oceanobacillus iheyensis
  CDS (1)..(1494)
atgacagcgcttacattagagacggatgtattaaaaaattttattgatggtaaatgggtagatgtgaataataccactgccgttacaaatcctgcaaatggtgaacgtatcgtgcaagtaccattgtctgatcaatctcatgttgaggaggctgttcaggctgcgataaaggctcaaaaggaatgggcacttgttcctgcacctcaacgtgcagaagtattgtaccgtgttggaatgattatgaaggataaaaaagaacgactatctcgtctgttgaccatggagaatggaaaggtactagaagaagcaagaggagaagtacaagaaggaatcgatatggctttttatatggctggggaaggtcgacgattgtttggccaaactacaccagcggaattaaaagataaattcgcgatgagtcagcgggttcctgtaggtgtcgtcggtatcattacaccatggaacttcccgattgcaattgctacttggaagtcattcccagcgattgtagctggaaatgcggtggtttggaaaccagcaacggaaactcccattatggcatatgagttagctaaaatatttgaagaagcaggattaccaagtggtgtcatcaatgttgtttttggtaaaggatcagaagtgggagattcgatggttcagcataaagatatcagagttatatcgtttacgggatcgaatgacacagggagaaatattgcatcagattgtgggaagcagttaaagaaggtatcacttgaaatgggcggaaagaatgcagtgattgttatggatgatgcagatttagacttagcggtagaaggaattctctggagtgcgtttggaacgagtgggcagcgttgtacagcttgcagtcgtgtgattgttcatcataaagtaaaaaagacgttggaagagagacttttagctgcaatggatcatttaacgattggtaatggattggaagacggaattaaagtaggaccaattatcaatgaagcaggattaaataaaatcaagaaatatatcgaagtgggcaagcaggagggtgctactttattagcaggaggaactgaatgggaaaccaataatccagggtattattttactccgaccttattcaccgatgctaagcctgacatgcggattgcacaagaggagatttttgggcctgttgtttcattaattgaagtaagtagttttgaagaagccattgaagtaaataatcaagttacgtttggcttatccagttctatttttacaaaggatgtaaatcgtgtttttaaagcacaacgtgatttagatacgggcattgtttatgtgaatgctggaacaacaggtgctgagattcatttaccttttggtggaacgaaaggaactggaaatggacatcgtgactctggcgtccaggcgttagatgtattcactgaatggaaggcgatttatgttgactatagcggaaaattacaacgtgcccagatagacacagaggaataa

SEQ ID NO: 12605 - protein, 497 aa, Oceanobacillus iheyensis
MTALTLETDVLKNFIDGKWVDVNNTTAVTNPANGERIVQVPLSDQSHVEEAVQAAIKAQKEWALVPAPQRAEVLYRVGMIMKDKKERLSRLLTMENGKVLEEARGEVQEGIDMAFYMAGEGRRLFGQTTPAELKDKFAMSQRVPVGVVGIITPWNFPIAIATWKSFPAIVAGNAVVWKPATETPIMAYELAKIFEEAGLPSGVINVVFGKGSEVGDSMVQHKDIRVISFTGSNDTGRNIASDCGKQLKKVSLEMGGKNAVIVMDDADLDLAVEGILWSAFGTSGQRCTACSRVIVHHKVKKTLEERLLAAMDHLTIGNGLEDGIKVGPIINEAGLNKIKKYIEVGKQEGATLLAGGTEWETNNPGYYFTPTLFTDAKPDMRIAQEEIFGPVVSLIEVSSFEEAIEVNNQVTFGLSSSIFTKDVNRVFKAQRDLDTGIVYVNAGTTGAEIHLPFGGTKGTGNGHRDSGVQALDVFTEWKAIYVDYSGKLQRAQIDTEE

SEQ ID NO: 12606 - DNA, 3951 bp, Wigglesworthia glossinidia brevipalpis
  CDS (1)..(3951)
atggataccagaatattaggaataaaattagacaacaaattatcccatcgtatcgaaaatatatcaagtagattaaatcgtactccacattggataattaagcaggccatttttcttcacctagatgatttagagaaaaaatcaaaatctagcgaaaaattaatagaaaataaaaatgaaattcaagattatcaagacaaaataaatgaaaaaattatttttaaacctttctttgaatttgcacaacaaatattacctcaatcttatttaagatttaatacaacaaacgcttggagtactcctgaaaaagaaattgttccaaagttattagaactatctaaatgcgaagaagaaactgaaaaaaaaattcatgagctatcaaagtatctagcaaaaggattaagagaaaaatcaaaaaagtacaatagagaacaaatggttcaagatttactacgagaatttcctttatcttctaaagaaggtatagctttaatgtgtttagcagaagccttgctaagaataccagatgtaaatacaagaaattctttaataaaagacaaaataaaaaataaagattggaaaagccattttggatccaataaaggtttatttataaattcagcagtatggggtttatgtataactaataatttaatcaaaagacataaagaaaaaaatttaagttcatatttaaataaagttattcaaaaaataggagagccaatcgtaggaaaagctataaacgtagctatgaaattaatgggaaaacaatttgttgtaggagaaaatatacaacaagctctaaaaaatacaaacattttagaaaaaaaaggtttttcatattcatatgatatgcttggagaagcagctttaacagaagaagatgcacaaaaatacatgacttcttatgaaaacgcaattcattgtataggaaaatcatctttgggaaaaggaatatataaaggaccaggtatatctattaaattatcagctattcatcctcgttattctagaaataaatatgaaaaagttatgtctgaattatatcctagattaagatcgttaactttattagctagacattatgacataggtatgaatatagatgctgaagaggcaaacagattagaaatttctatagatttattagataaattatgttgtgaaccatctttatttggatggagtggtattgggtttgtagtacaagcttatcaaaaaagatgtatgtatgtaatagaagaactaattgatatagcaaaacgtacgaaaagaagattaatggtaaggttagtaaaaggagcttattgggatagtgaaataaaaaatgcacaaattgaaggaatagaagactatccagtatttacgagaaaagcatatacagacatatcttatttagcatgtgctaaaaaacttctatcagaaagtaatcatatatatccacaatttgctactcacaatgctcatactgtatcatctatatatcattttgctggagagaattattattcaggacaatatgaatttcaatgtttacacggtatgggagaacaattatacgaaaaagtagtaggtaatgccattgataaaaaattagatcgtccatgtagaatttatgctcctgtaggtacacataaaactttacttgcttatttagtaagaagaattttagaaaacggagctaataattcatttattaatcgcatatcagataataatgtttctattgaaaaattagttttaagtccgataaaagagtctataagtatatcaaaaaaagaaaatgttgaaattggaacttctcatccaaatattcctttgccaaaaaatttatatggaaataatagagaaaattctcatggatttaatttttctaatgaaaatgttttagcaaaattatcatctgacttgttaaaaaattcagataaattttggaaagttactccaataattcattcaaaattagataaaggatctattagtaaaattataaatccagctaataaaaaagatataataggagagtgtcaaagttctactttaaaagacgttgaatctgctcttgaaagctcggtaaaaggaattgaattatggtcttcaaaagaaccattagagagatctaaaattttatatgatatttctaacaagatagaaaaaaatactaatatttttattaatttactcgttagagagtcaggaaaaacttttcctaatgccgtttccgaaataagagaagcagttgattttttaagatattactcaaatcaaataaaaccttttaataataaaacacatattcctttagggtgtgtgttatgcataagtccatggaattttcctttagctatttttttaggacaaatttcagctgctttagcttctggaaatgcagtaatagctaaacctgcagaacaaacgcctatagttgcatatgaagctattaaattaatgatagattctggaataccaagtgagtctttacagtttttacctggaagtggaaaaataataggaaattctctatctaaagatcatcgtatacacggagttatgtttacaggatctactcaagttgctcgtttattgcaattgaatttatctgatcgtttaagcaaaggaagacctgttcctctaattgctgaaactggcggtctaaatgccatgattgtagattcttcagcattaacagagcaagtagtatctgatattattgtttctgcttttgatagcgctggacagcgttgttctgctttaagactattatgtatacaagaagatgtatcagaaaaaactttaaatatgattaaaggagctattgattcttatactgtaggaaatccagaatatttttcaacagatattggtcctgtgatagataaaaatgcaaaaatcaatattgatcaacatattttgaatatgaaaaaaagcaaccattctgtatggcagagtgaaatgtcttatgacacaaaacaagatctaggaaattttgttttaccaacattgatagaattagacgatatagatcaaataaaagaagaagtatttggtccagttttacatattgttaaatttaaatatgaagaaatgaataatatatttgaaaaaataaattcttctggatatggattgactatcggtattcattctagaatagaagaaaatatagaaaaagtcacaacatcaacaaaagttggaaattattatgtaaatagaaacatagtaggagcagtagttggggttcagccttttggtggagaaggtttatctggtactgggccaaaagcaggaggtccattatatctatacagattgctttctgatagaaaagaaaaaaatattttatcttcattagaagaactagataaaaataaaaaagtagatttgactagatgcgaaaaaatacaagaatcttgtgtcagtttaatagaatggatttctgtaaactatccagatttagaaaaatattgtaattattttatttcacaatctcaatcaggaagctcaagagtgctacaaggacctactggagagaagaatacctatttgttgcttccaagagaaagaatattatgtttatcaaatgatgaaaatgatttactaattcaattagcagctgttaccagtattggagggaaagcaattttatctcataatccaattacacaaaaaatattttctattcttccacaatctgttttaaaaaatgtaattcttatcccaaattggaaaagagaagattcaatgtttgatatagttttatttcacggcgatgaattacaattaaaagaagtgttggaaattttatctaaaaaaagaggtccagtaataaatgttcatagccataaaaatggagataaaaaaatatttttagaaaaacttttaatagaacgtacaataagtttaaacactactgctgcaggtggaaatactactttattgagtatggtttaa

SEQ ID NO: 12607 - protein, 1316 aa, Wigglesworthia glossinidia brevipalpis
MDTRILGIKLDNKLSHRIENISSRLNRTPHWIIKQAIFLHLDDLEKKSKSSEKLIENKNEIQDYQDKINEKIIFKPFFEFAQQILPQSYLRFNTTNAWSTPEKEIVPKLLELSKCEEETEKKIHELSKYLAKGLREKSKKYNREQMVQDLLREFPLSSKEGIALMCLAEALLRIPDVNTRNSLIKDKIKNKDWKSHFGSNKGLFINSAVWGLCITNNLIKRHKEKNLSSYLNKVIQKIGEPIVGKAINVAMKLMGKQFVVGENIQQALKNTNILEKKGFSYSYDMLGEAALTEEDAQKYMTSYENAIHCIGKSSLGKGIYKGPGISIKLSAIHPRYSRNKYEKVMSELYPRLRSLTLLARHYDIGMNIDAEEANRLEISIDLLDKLCCEPSLFGWSGIGFVVQAYQKRCMYVIEELIDIAKRTKRRLMVRLVKGAYWDSEIKNAQIEGIEDYPVFTRKAYTDISYLACAKKLLSESNHIYPQFATHNAHTVSSIYHFAGENYYSGQYEFQCLHGMGEQLYEKVVGNAIDKKLDRPCRIYAPVGTHKTLLAYLVRRILENGANNSFINRISDNNVSIEKLVLSPIKESISISKKENVEIGTSHPNIPLPKNLYGNNRENSHGFNFSNENVLAKLSSDLLKNSDKFWKVTPIIHSKLDKGSISKIINPANKKDIIGECQSSTLKDVESALESSVKGIELWSSKEPLERSKILYDISNKIEKNTNIFINLLVRESGKTFPNAVSEIREAVDFLRYYSNQIKPFNNKTHIPLGCVLCISPWNFPLAIFLGQISAALASGNAVIAKPAEQTPIVAYEAIKLMIDSGIPSESLQFLPGSGKIIGNSLSKDHRIHGVMFTGSTQVARLLQLNLSDRLSKGRPVPLIAETGGLNAMIVDSSALTEQVVSDIIVSAFDSAGQRCSALRLLCIQEDVSEKTLNMIKGAIDSYTVGNPEYFSTDIGPVIDKNAKINIDQHILNMKKSNHSVWQSEMSYDTKQDLGNFVLPTLIELDDIDQIKEEVFGPVLHIVKFKYEEMNNIFEKINSSGYGLTIGIHSRIEENIEKVTTSTKVGNYYVNRNIVGAVVGVQPFGGEGLSGTGPKAGGPLYLYRLLSDRKEKNILSSLEELDKNKKVDLTRCEKIQESCVSLIEWISVNYPDLEKYCNYFISQSQSGSSRVLQGPTGEKNTYLLLPRERILCLSNDENDLLIQLAAVTSIGGKAILSHNPITQKIFSILPQSVLKNVILIPNWKREDSMFDIVLFHGDELQLKEVLEILSKKRGPVINVHSHKNGDKKIFLEKLLIERTISLNTTAAGGNTTLLSMV

SEQ ID NO: 12608 - DNA, 2943 bp, Synechococcus elongatus
  CDS (1)..(2943)
atgaccggtctttacgaagcagaaacgatcgcgatcgcccggcaactgtgggcggccagccaagagtcccgcaacttttttagccaactgcgggagcaaatgcgcattgaagataagctcctcggctgggccatggaacatccgggtctacgggtacaactctttcgcctcattgactgtctgcccagtctgcgcagtcaaaccgaggtggcacgccacctgcaggagtacctcagtgatcccagtgtggagttgccgcccgggctgaaaaaactcttgaactttgcccagccggattccctgccggcccaagcagcggcaaccaccttcacaacagcagtgcaagccctggcccacaagtacattgccggtgaaaccaccgagcaggtgctaaaaaccattggccgtctgcgcaagcagggcatgctggtgacgatggatattcttggggaagcggtgattacggaggcagaggcacagcagtattgcgatcgctaccttgacttgatggagcacctcagtcccttgggccaacgggagggcgtgaatccagtccaggtctccgtaaagctgacggccttttactcccagtttgatcctttggatgtttctggctgccgtgccaaggtgggagagccgattcgccggctgttgcatcgtgcccaagaattgggggtggcagtgcactttgatatggagcagtatgcctacaaagacattaccttggcgatcctcaaggatattttgctagagccagagtttcgcgatcgcgccgatattgggctaacactgcaggcctatttgcgggatagctaccaagatgcccaagacctcattacttgggtacaacagcggggcacccccatcactgtgcgggtggtcaagggcgcctactgggatcaggaactcattaaggcagtgcaacatcattggccgttgcccgtctatcaacacaaacagaacacggatgccaactttgagcgcatcattgaactgctcctgagtcaccatacggtgttgcgcacagcgatcgcgagccataatgtgcgttcccaagcgcgggcgatcgcaattgctcaacggcagcacattccgcccacggccatggaatgccaagttctctacggcatggccgataaactggccaaggcattggtggaggcagggcaaacggtgcgggtctattgtccctatggcgatctcattccggggatggcctacctgattcggcgactcctggaaaataccgccaatagttcctttttacgccaacagttgggggctgtggccatcgaggaattactggccccaccggaaccaacggcggactttgaagccgtgaacgttcatctgaccacgggcaagacttcaacctttgtcaatgctgccaatagtgactatgcccgagccagccagcgggaagccattcaagcggccttaatccatgtccatcgccaactggggcaaacctatactcccatcatcaatggcgatcgcgtcaatccccgcgaatacagtgagtccctgaacccttcgcagccggaggaaatcgtcggtcgggttggcttggccaccattgaggatgccgagcatgcgatccgggctgccaaagccgctcaagcccaatggcaacagacctccgtggctgaacgggcaaccctgctccggcgggcagcagacctcctagaggcacagcgccatgaactggtggcttggatgtgctacgaagtgggcaaggtggtggcagaaggggatgccgaagtctccgaagccgttgatttttgccgctactacgccgatgaaatggagcgcctcagcagcggctatgaccgcaactttcccggtgaaaccaaccattaccactaccaagggcggggccttgcggttgtgatttctccttggaactttcccttggcgattcccaccggtatgaccgcggccgccctagtgacaggtaactgcacgattctcaaacctgcggatcccgccgccgtcgttgctgccaaactagcggagatcctgatggccgccggttttccgccgggggtgtttcagtttctccccggacgtggctccgtgattggcccctatttaacccaacatcccgatgtacatctcatcgcctttactggctcccaagaggtgggttgccgcattattgctgaggcagcagtgttacagcggggacaaagccacatcaagcgggtgattgccgagatggggggcaaaaacgccatcatcattgacgaaagtgccgacttagatcaggcagtggcgggggttgtgcagtccgcctttggctacagcggccaaaaatgctccgcctgttcgcgggtgattgtccttgagtccatctacaaaccctttgtggagcgcttagtggcggccacccagtccctgaatattgggccagcccacttgcccagtacccgtgtcggaccggtggtgacagccgctgcccgcgatcgcattcaggaatacattgccaaaggacagcaagaggcggaactcctcttgagcgtaccggtaccggagatgggctattttgtctcgcccacgatctttaccaacgtgccccccacggccacgatcgcccaagaggaaatttttggcccggtgctggccgtcctacgggcagaaaccttcacccaagcccttgcaattgccaatgccaccgcctatgccctgacaggggggctgtattcgcggacgccctcccatattcagcaggccaaagcccaatttgctgtagggaacctgtacatcaatcgggggattacaggggcgatcgtggatcggcagccctttggcggctttaagctgtcggggattggctccaaagccggtggacgcgattacctgctgcaattccttgaaccgcgggtcattaccgagaatgtccaacgtcaagggtttgcccccattgccggagtcgatgattga

SEQ ID NO: 12609 - protein, 980 aa, Synechococcus elongatus
MTGLYEAETIAIARQLWAASQESRNFFSQLREQMRIEDKLLGWAMEHPGLRVQLFRLIDCLPSLRSQTEVARHLQEYLSDPSVELPPGLKKLLNFAQPDSLPAQAAATTFTTAVQALAHKYIAGETTEQVLKTIGRLRKQGMLVTMDILGEAVITEAEAQQYCDRYLDLMEHLSPLGQREGVNPVQVSVKLTAFYSQFDPLDVSGCRAKVGEPIRRLLHRAQELGVAVHFDMEQYAYKDITLAILKDILLEPEFRDRADIGLTLQAYLRDSYQDAQDLITWVQQRGTPITVRVVKGAYWDQELIKAVQHHWPLPVYQHKQNTDANFERIIELLLSHHTVLRTAIASHNVRSQARAIAIAQRQHIPPTAMECQVLYGMADKLAKALVEAGQTVRVYCPYGDLIPGMAYLIRRLLENTANSSFLRQQLGAVAIEELLAPPEPTADFEAVNVHLTTGKTSTFVNAANSDYARASQREAIQAALIHVHRQLGQTYTPIINGDRVNPREYSESLNPSQPEEIVGRVGLATIEDAEHAIRAAKAAQAQWQQTSVAERATLLRRAADLLEAQRHELVAWMCYEVGKVVAEGDAEVSEAVDFCRYYADEMERLSSGYDRNFPGETNHYHYQGRGLAVVISPWNFPLAIPTGMTAAALVTGNCTILKPADPAAVVAAKLAEILMAAGFPPGVFQFLPGRGSVIGPYLTQHPDVHLIAFTGSQEVGCRIIAEAAVLQRGQSHIKRVIAEMGGKNAIIIDESADLDQAVAGVVQSAFGYSGQKCSACSRVIVLESIYKPFVERLVAATQSLNIGPAHLPSTRVGPVVTAAARDRIQEYIAKGQQEAELLLSVPVPEMGYFVSPTIFTNVPPTATIAQEEIFGPVLAVLRAETFTQALAIANATAYALTGGLYSRTPSHIQQAKAQFAVGNLYINRGITGAIVDRQPFGGFKLSGIGSKAGGRDYLLQFLEPRVITENVQRQGFAPIAGVDD

SEQ ID NO: 12610 - DNA, 3180 bp, Shewanella oneidensis
  CDS (1)..(3180)
atgttcaaagcgagtgaagtgctggcaggccgctacgattctgccaatctcgacgaactgttcaaagctgtcaccgacaactacattgtcgatgaagaacaatacttgtcagagctaatcaaactagtcccctccagtgatgaagcgattgagcgcgtcactcgtcgtgcccacgaactggtgaacaaagttcgtcaatttgagaaaaaaggcttaatggttggcatcgatgccttcctacagcaatacagcttagagactcaggaaggtatcatcctgatgtgtttagccgaagccctactgcgtattcccgatgcggccaccgctgacgccttgattgaagataaactttcaggtgcaaaatgggatgaacacttaagcaagagcgattcggtactggttaacgcctccacttggggcctgatgctcaccggtaaaattgtcagcttagataaaaaaatcgacggcagctcaagtaacctattaggccgtttagtcaatcgtttaggtgaacccgtgatccgccaagccatgatggccgcgatgaaaatcatgggtaaacagttcgttcttggccgcaccatgaaagaagcgcttaagaacagcgaagacaagcgtaaattaggttacacccactcctacgatatgctgggcgaagccgcgctgacgcgtaaagatgccgaaaaatactttaccgattatgccaatgcgattaccgagttaggcgcgcaaagctataacgaaagtgaatctccacgcccaacgatttcaattaagttgtcggcattgcacccacgttacgaagtcgctaacgaagaccgtgtactaaccgagctgtatgacaccgtcattcgcctaattaaactcgcgcgcgggttaaatatcggtatttctatcgacgccgaagaagttgaccgtctcgaactgtcattaaagctgttccaaaaactgtttaattctgaagccactaaaggctggggattactgggtatcgttgttcaagcttactctaagcgcgcgctacctgtactggtatggttaacccgcctagcgaaagagcaaggcgatgaaatcccggttcgcttagtcaaaggcgcttactgggatagcgagcttaaatgggcgcagcaggcaggcgaagccgcttacccactttacacccgcaaagcagggacagacgtatcttacttagcctgtgcgcgttacctgttatccgacgccacccgcggcgcgatttaccctcaatttgccagccacaacgcgcaaaccgttgcggcaatttccgatatggcgggcgatcgtaaccacgaattccaacgtctacacggtatgggacaagagctgtacgacaccattctgtcggaagcgggcgcgaaagcagtacgtatctacgcccccatcggtgcccataaggatctgctgccctacttagtacgtcgcctactggaaaacggtgcgaacacctcgttcgtgcacaaactggtcgatccgaaaacgcctattgagtctttagtggttcatccgttaaagacattgaccagctacaaaaccctggctaacaacaaaatcgttttacctatcgatattttcggtagcgatcgcaaaaattccaagggactcaatatgaacattatttcagaagcagagccattcttcgcggccttagacaaattcaaatcaacacagtggcaagcgggtcctctggttaatggtcaacccttaactggcgagcacaaaaccattgttagcccattcgataccactcaaactgtgggtcaagtggcctttgccgacaaagcagctatcgaacaagccgtgtcttctgctcatgcggctttcggctcttggacccgtacacctgttgaagtgcgcgcctcggcactgcaaaagctagcggatctgttagaagaaaaccgcgaagaactgattgccctctgtacccgtgaagcaggtaagagcattcaagacggtatcgacgaagtgcgtgaagccgtcgacttctgccgttactacgcagtacaagccaagaagctgatgtcaaaacctgaactgctcccaggcccaacaggcgagttaaacgaactcttcctccaaggtcgcggtgtatttgtgtgtatcagcccatggaacttcccattagcgatcttcttaggccaagtctcagcggccctagcagcgggtaacactgtggtcgcaaaacctgcggaacagacgtcaatcattggttaccgcgcagtgcagttagcacaccaagcgggtattccaacggacgtgctgcaatatctgccaggtacaggcgccaccgttggtaacgcactgacggctgatgagcgcattggcggcgtatgctttaccggttcaacgggcacagccaaactgattaaccgcacgctggcaaaccgtgaaggcgcgatcattccgttaatcgccgaaaccggtggccaaaacgccatggtggttgattctacttctcaaccagaacaagtggttaacgatgtagtgtcttcatccttcaccagcgcgggtcaacgctgctcggcgctgcgcgtactcttcctgcaggaagatattgctgaccgcgttattgatgttctgcaaggtgcgatggatgagctagtgattggcaatccaagttcaatcaaaactgacgtaggtccagtgattgatgcaacagccaaagccaaccttgatgcccatatcgaccacattaagcaagttggcaagctgatcaagcaaatgtctctgccagcgggcactgagaatggtcactttgtagcgccaacagccgttgaaattgattcaatcaaagtgcttgaaaaagaacactttggcccaatcctgcacgtgatccgttacaaagcatcagaacttgcccatgtgatcgatgaaatcaacagcacaggctttggtttaaccttaggtatccacagccgtaacgaaggccatgccctcgaagtggcggataaagtgaatgtcggcaacgtgtacattaaccgtaaccaaatcggcgcggtggttggagtacagcctttcggcggtcaaggtctatctggcacaggtccaaaagccggtggtccacactacttaacccgtttcgtgactgaaaaaacccgcactaacaacatcaccgctatcggtggtaatgcgaccctgctgtcactcggtgatagcgacgcctaa

SEQ ID NO: 12611 - protein, 1059 aa, Shewanella oneidensis
MFKASEVLAGRYDSANLDELFKAVTDNYIVDEEQYLSELIKLVPSSDEAIERVTRRAHELVNKVRQFEKKGLMVGIDAFLQQYSLETQEGIILMCLAEALLRIPDAATADALIEDKLSGAKWDEHLSKSDSVLVNASTWGLMLTGKIVSLDKKIDGSSSNLLGRLVNRLGEPVIRQAMMAAMKIMGKQFVLGRTMKEALKNSEDKRKLGYTHSYDMLGEAALTRKDAEKYFTDYANAITELGAQSYNESESPRPTISIKLSALHPRYEVANEDRVLTELYDTVIRLIKLARGLNIGISIDAEEVDRLELSLKLFQKLFNSEATKGWGLLGIVVQAYSKRALPVLVWLTRLAKEQGDEIPVRLVKGAYWDSELKWAQQAGEAAYPLYTRKAGTDVSYLACARYLLSDATRGAIYPQFASHNAQTVAAISDMAGDRNHEFQRLHGMGQELYDTILSEAGAKAVRIYAPIGAHKDLLPYLVRRLLENGANTSFVHKLVDPKTPIESLVVHPLKTLTSYKTLANNKIVLPIDIFGSDRKNSKGLNMNIISEAEPFFAALDKFKSTQWQAGPLVNGQPLTGEHKTIVSPFDTTQTVGQVAFADKAAIEQAVSSAHAAFGSWTRTPVEVRASALQKLADLLEENREELIALCTREAGKSIQDGIDEVREAVDFCRYYAVQAKKLMSKPELLPGPTGELNELFLQGRGVFVCISPWNFPLAIFLGQVSAALAAGNTVVAKPAEQTSIIGYRAVQLAHQAGIPTDVLQYLPGTGATVGNALTADERIGGVCFTGSTGTAKLINRTLANREGAIIPLIAETGGQNAMVVDSTSQPEQVVNDVVSSSFTSAGQRCSALRVLFLQEDIADRVIDVLQGAMDELVIGNPSSIKTDVGPVIDATAKANLDAHIDHIKQVGKLIKQMSLPAGTENGHFVAPTAVEIDSIKVLEKEHFGPILHVIRYKASELAHVIDEINSTGFGLTLGIHSRNEGHALEVADKVNVGNVYINRNQIGAVVGVQPFGGQGLSGTGPKAGGPHYLTRFVTEKTRTNNITAIGGNATLLSLGDSDA

SEQ ID NO: 12612 - DNA, 1455 bp, Oceanobacillus iheyensis
  CDS (1)..(1455)
atggctgaattgaaagcgataacaacatatcaaatgtacattaacggagagtttgtcaatgctagtaacaatgaaacacttgaggttacaaatcctgcaacagaggaaatagtttcaacagttccaaaagctagcttagaagatactagaagagcaatcgatggttctgcaaaagcgcaaaaagactgggcaaaccttccttcaagtaaacgagcatcttatctattcgcaataagtaaagagattcgatcaaacattgatgaatatgcaaagattatttctgaggaaatgggaaaaccgcttgatcaagctgttgtagaagttagtgttactgctgactactttgaatatattgctggttgggcaagaaaatatgaaggtgaaatcgtaccaagtgacagagaaaaagaaaacatccttgtattcaaacaaccaattggtgttgtagccggtatattaccttggaattttccgttcttcttaattgcacgaaaagctgcacctgctatattaactggaaatactatagtgctcaaaccaagtagtgtttctcctaataatgcgttagcttttgctaagattttagataaagtcggattaccaaaaggtgttattaatatagttactggtgcaggtagcattgttggtgaagaattatctaaaaacgaaaaaatcggaatgatcagcttaacaggaagcacagaggctggatcaagagtaatggagaaagcatcgaaaaacatcacaaaagtgtctcttgagttaggaggcaaagcgccttcgattgtgatggaagatgcagatattgacttggctgtaaaatccgttcttgattctcgaatcatcaatacaggacaggtttgtaactgtacagaaagagtttatgtacatgaagatgtagctgatgaatttattgaaaaaatcacaaaagcaatgtccaatgttagttatggaaatcctcttggaaatgaacaaatcgatatgggaccactttcaaatgaagcaggtcttaaaaatgtagaagatatggttaagcgcgcagtagaaaatggagcaactgtattaacaggtggaaaccgagtgaacacagaggctggatactattatgaacctactgtactatcaaatgtcgataatagctttgaaattatgaaagaagaagtgttcgggcctgtattacctattgctacttttacttcattggatgaagcaatcgaattagcaaatgactgccaatatggattaacatctgctatttttacaaataacgtgaattacatgatgcgcgctagtaatgaattagaattcggagaaacctatgttaatagagaaagcttcgaagcaattcaaggattccatgctggttggaaaaaatcaggaattggcggagcagacggaaaacatgggttaggagaatttctacaaactcatgttgtctacattcaatataaataa

SEQ ID NO: 12613 - protein, 484 aa, Oceanobacillus iheyensis
MAELKAITTYQMYINGEFVNASNNETLEVTNPATEEIVSTVPKASLEDTRRAIDGSAKAQKDWANLPSSKRASYLFAISKEIRSNIDEYAKIISEEMGKPLDQAVVEVSVTADYFEYIAGWARKYEGEIVPSDREKENILVFKQPIGVVAGILPWNFPFFLIARKAAPAILTGNTIVLKPSSVSPNNALAFAKILDKVGLPKGVINIVTGAGSIVGEELSKNEKIGMISLTGSTEAGSRVMEKASKNITKVSLELGGKAPSIVMEDADIDLAVKSVLDSRIINTGQVCNCTERVYVHEDVADEFIEKITKAMSNVSYGNPLGNEQIDMGPLSNEAGLKNVEDMVKRAVENGATVLTGGNRVNTEAGYYYEPTVLSNVDNSFEIMKEEVFGPVLPIATFTSLDEAIELANDCQYGLTSAIFTNNVNYMMRASNELEFGETYVNRESFEAIQGFHAGWKKSGIGGADGKHGLGEFLQTHVVYIQYK

SEQ ID NO: 12614 - DNA, 4029 bp, Escherichia coli O6
  CDS (1)..(4029)
atgcaacatcatagatatttcacgataacgttaagttgcacctttcagaacaacaggagtaatggcatgggaaccaccaccatgggggttaagctggacgacgcgacgcgtgagcgtattaagtctgccgcgacacgtatcgatcgcacaccacactggttaattaaacaggcgattttttcttatcttgaacaactggaaaacagcgatactctcccggagctaccagcgctgctttctggcgcggccaatgagagcgatgaagcaccgactccggcagaggaaccacaccagcctttcctcgactttgccgagcaaatattgccccagtcggtttcccgcgccgccatcaccgccgcctatcgccgcccggaaaccgaagcggtttctatgctgctggaacaagctcgcctgccgcagccagtagctgaacaggcgcacaaactggcgtatcaactggccgataaactgcgtaatcaaaaaaacgccagtggtcgcgcaggtatggttcaggggttattgcaggagttttcgttgtcatcgcaggaaggcgtggcgctgatgtgtctggcggaagcgttgttgcgtattcccgacaaagccacccgtgacgcgttaattcgcgacaaaatcagtaacggtaactggcagtcacacattggtcgtagcccgtccctgtttgttaatgccgctacctgggggctgctgtttaccggcaaactggtttccacccataacgaagccagcctctcccgctcgctgaaccgcattatcggtaagagcggtgaaccgctgatccgcaaaggtgtggatatggcgatgcgcctgatgggcgagcagttcgtcacgggcgaaaccatcgcggaagcgttagccaatgcccgcaaactggaagagaaaggtttccgttactcttacgatatgctgggcgaagccgcactgactgccgcagatgcacaagcgtatatggtttcctatcagcaggcgattcacgccattggtaaagcgtctaacggtcgtggcatctatgaaggtccgggcatttcaatcaagctgtcggcgctacatccgcgttatagccgcgcccagtatgaccgggtaatggaagagctttacccgcgtctgaaatcactcaccctgctggcgcgtcagtacgatattggtattaacatcgatgccgaagaggccgatcgtctggagatctccctcgatctgctggaaaaactctgtttcgagcctgaactggcaggctggaacggcatcggttttgttattcaggcttatcaaaaacgctgcccgttggtgatcgattacctgattgatctcgccacccgcagccgtcgccgtctgatgattcgcctggtgaaaggcgcgtactgggatagtgaaatcaagcgtgcacagatggacggccttgaaggttatccggtttatacccgcaaggtgtataccgacgtttcttatcttgcctgtgcgaaaaaactgctggcggtgccaaatctaatctacccgcagttcgcgacgcacaacgcccatacgctggcggcaatttatcaactggcgggtcaaaactactacccgggtcagtacgagttccagtgcctgcatggtatgggcgagccactgtatgagcaggtcaccgggaaagttgccgacggcaaacttaaccgtccgtgtcgtatttatgctccggtcggtacacatgaaacgctgctggcatatctggtgcgccgcctgctggaaaacggtgctaacacctcgtttgttaaccgtattgccgacacctctttgccactggatgaactggtcgccgatccagtcactgctgtagaaaaactggcgcaacaggaagggcaaactggattaccgcatccgaaaattcccctgccgcgcgatctttacggtcacgggcgcgacaactcggcagggctggatctcgctaacgaacaccgtctggcctcgctctcttcagccctgctcaatagtgcactgcaaaaatggcagtccttgccaatgctggaacaaccggtcgcggctggtgagatgtcgcccgttattaaccctgcggaaccgaaagatattgtgggctatgtgcgtgaagccacgccgcgtgaagtagaacaggcgctggaaagtgcggttaataacgcgccaatctggtttgccactcctccggctgaacgcgcggcgattttgcatcgcgctgccgtgctaatggaaagccagatgcagcaactgattggtattctggtgcgtgaagccggaaaaaccttcagtaacgccattgccgaagtgcgcgaagcggtcgattttctccactactatgccggacaggtgcgggatgatttcgctaacgaaacccaccgtccattagggcctgtggtatgtatcagtccgtggaacttcccgctggctattttcaccggacagatcgctgccgcactggcggcaggtaacagcgtgctggcaaaaccggcagaacaaacgccgctgattgccgcgcaagggatcgccattttgctggaagcgggtgtaccgccaggcgtggtgcaattgctgccaggtcggggtgaaaccgtgggcgcgcaactgacgggtgatgatcgcgtgcgcggggtgatgtttaccggttcaaccgaagtcgctacgttactgcagcgcaatatcgccagccgcctggacgctcagggtcgccctattccgctcatcgctgaaaccggcggcatgaacgcgatgattgtcgattcttcagcactgaccgaacaagtcgtaatagatgtgctggcctcggcgtttgacagtgcaggtcagcgttgttcggcactgcgcgtgctgtgcctgcaagatgagattgccgaccacacgctgaaaatgctgcgcggcgcaatggccgaatgccggatgggtaatccgggtcgcctgaccaccgatatcggtccggtgattgatagcgaagcgaaagccaatatcgagcgtcatattcagaccatgcgtagtaaaggccgtcaggtgttccaggcggtgcgggaaaacagcgaagatgcccgtgaatggcaaagcggcacctttgtcgctccgacgctgatcgaactggatgactttgccgaattacaaaaagaggtctttggtccggtgctgcatgtggtgcgttacaaccgtaaccagctcccagagctgatcgagcagattaacgcttccggctatggtctgacgcttggcgttcatacgcgtattgatgaaaccattgcccaggtcactggctcggcccaggtcggtaatctgtacgttaaccgtaatatggtgggcgcggtggttggggtgcaaccgttcggcggcgaagggttgtctggcaccgggccgaaagcaggcggtccgctctatctctaccgtctgctggcgaatcgcccggaaagtgcactggcagtgacgctcgcgcgtcaggatgcggagtatccggtcgatgcgcagttgaaagccgcattgactcagccgctaaatgcactgcgggaatgggcggcaaaccgtccagaattgcaggcgttatgtacgcaatatggcgagttggcgcaggcaggaacacaacgattgttgccagggccgacgggtgaacgcaacacctggacgctgctgccgcgtgagcgcgtgttgtgtattgcggatgatgaacaggatgcgctgactcagctcgccgccgtgctggcagtgggtagccagatgctgtggccggatgatgcgctacatcgtcagttagtgaaggcattgccatcggcagtcagcgaacgtattcaactggcgaaagcggaaaatataaccgctcaaccatttgatgcggtgatcttccacggtgattcggatcagcttcgcgcattgtgtgaagccgttgccgcgcgggatggtgcaattgtttcggtgcagggttttgcccgtggcgaaagcaatatccttctggaacggctgtatatcgagcgttcgctgagtgtgaataccgctgctgctggcggtaacgccagtttaatgacgatcggttaa

SEQ ID NO: 12615 - protein, 1342 aa, Escherichia coli O6
MQHHRYFTITLSCTFQNNRSNGMGTTTMGVKLDDATRERIKSAATRIDRTPHWLIKQAIFSYLEQLENSDTLPELPALLSGAANESDEAPTPAEEPHQPFLDFAEQILPQSVSRAAITAAYRRPETEAVSMLLEQARLPQPVAEQAHKLAYQLADKLRNQKNASGRAGMVQGLLQEFSLSSQEGVALMCLAEALLRIPDKATRDALIRDKISNGNWQSHIGRSPSLFVNAATWGLLFTGKLVSTHNEASLSRSLNRIIGKSGEPLIRKGVDMAMRLMGEQFVTGETIAEALANARKLEEKGFRYSYDMLGEAALTAADAQAYMVSYQQAIHAIGKASNGRGIYEGPGISIKLSALHPRYSRAQYDRVMEELYPRLKSLTLLARQYDIGINIDAEEADRLEISLDLLEKLCFEPELAGWNGIGFVIQAYQKRCPLVIDYLIDLATRSRRRLMIRLVKGAYWDSEIKRAQMDGLEGYPVYTRKVYTDVSYLACAKKLLAVPNLIYPQFATHNAHTLAAIYQLAGQNYYPGQYEFQCLHGMGEPLYEQVTGKVADGKLNRPCRIYAPVGTHETLLAYLVRRLLENGANTSFVNRIADTSLPLDELVADPVTAVEKLAQQEGQTGLPHPKIPLPRDLYGHGRDNSAGLDLANEHRLASLSSALLNSALQKWQSLPMLEQPVAAGEMSPVINPAEPKDIVGYVREATPREVEQALESAVNNAPIWFATPPAERAAILHRAAVLMESQMQQLIGILVREAGKTFSNAIAEVREAVDFLHYYAGQVRDDFANETHRPLGPVVCISPWNFPLAIFTGQIAAALAAGNSVLAKPAEQTPLIAAQGIAILLEAGVPPGVVQLLPGRGETVGAQLTGDDRVRGVMFTGSTEVATLLQRNIASRLDAQGRPIPLIAETGGMNAMIVDSSALTEQVVIDVLASAFDSAGQRCSALRVLCLQDEIADHTLKMLRGAMAECRMGNPGRLTTDIGPVIDSEAKANIERHIQTMRSKGRQVFQAVRENSEDAREWQSGTFVAPTLIELDDFAELQKEVFGPVLHVVRYNRNQLPELIEQINASGYGLTLGVHTRIDETIAQVTGSAQVGNLYVNRNMVGAVVGVQPFGGEGLSGTGPKAGGPLYLYRLLANRPESALAVTLARQDAEYPVDAQLKAALTQPLNALREWAANRPELQALCTQYGELAQAGTQRLLPGPTGERNTWTLLPRERVLCIADDEQDALTQLAAVLAVGSQMLWPDDALHRQLVKALPSAVSERIQLAKAENITAQPFDAVIFHGDSDQLRALCEAVAARDGAIVSVQGFARGESNILLERLYIERSLSVNTAAAGGNASLMTIG

SEQ ID NO: 12616 - DNA, 1623 bp, Corynebacterium efficiens
  CDS (1)..(1623)
atgggagtattccccgggggtttttgcatgcctgctggaattccgccaatctcccgctggcacccaaggactatcaaccccggcgcgcccgtgcccgtagcctggtggggacaatctcacctctctcggaaggacacacccatgactgatccgcttgatgtctctgcactcctgaccaaggtccccaccggtctgctcatcggcgacacctggcgggactcctccgacgggtccacctacaccgtggacaaccccgccaccggccagaccatcgccaccctcgcatcggccaccagcgacgatgccctcgccgcactcgatgccgcctgcgaggtccagtccagctgggccaggacccccgcccgggaacgctcggagatcctgcgccgcgccttcgacctgatcaatgaacgtgccgaggaattcgccaccctcatgaccctggagatgggcaaaccgatcgccgaggcccgtggtgaggttacctacggcaatgagttcatgcgctggttctccgaggaggccgtgcgcacctacggccgccacggccagacacccgagggcacccaccgcatgctcaccgtgcgcaaaccggtcggcccctgcctactgatcaccccgtggaacttccccctggccatggccacccgcaaggtcgcccccgcgatcgccgccggctgcaccatggtgctcaagcccgcacgcctgaccccgttgaccgcccagtactttgcgcagaccatgctcgatgccggccttcccgcaggtgtgctcaatgtggtgtccggggcatcggccagcgcgatctccaaccccatcatggaggacgatcgcctgcgcaaggtctccttcaccggttccaccccggtgggcaaacaactgctgaagaaggctgccgacaaggtcctgcgcacctccatggagctcggtggcaacgccccgttcatcatcttcgaggatgccgacctggatctggccgtcgagggtgccatgggggcgaagatgcgcaacatcggtgaggcctgcaccgccgccaaccgcttcctggtccacgactccatcgcccaggacttcagccgccgactggctgagcgtttcaaccaactcacactcggcaacggcctcgacgacggtgtcaccgtcggtcccctggtcgaggcgaaggcacgcgagaacgtcgcaaagcttgtcgacgacgccgtcaccgagggcgccaccgtgctcaccgggggcaccgccggcgagggggagggctacttctaccagcccaccgtgctggtcgatgtcgcgcccggcgcgcggatcctcaccgaggagatcttcgggccggtcgcaccgatcatcacgttcaccaccgaggaggaggccatccagctggccaatgacaccgaatacggactggcctcctacctgttcacccgtgattatgcccggatgttccggatctccgaccagttggagttcggtctgctcggtttcaactcaggggtgatctccaatgccgcggccccgttcggtggcgtcaagcagtccggcatcggccgggagggtggtaccgagggcatcgatgagtacacgcaactgcagtacatcggcatccgcgacccctacacggatcgctga

SEQ ID NO: 12617 - protein, 540 aa, Corynebacterium efficiens
MGVFPGGFCMPAGIPPISRWHPRTINPGAPVPVAWWGQSHLSRKDTPMTDPLDVSALLTKVPTGLLIGDTWRDSSDGSTYTVDNPATGQTIATLASATSDDALAALDAACEVQSSWARTPARERSEILRRAFDLINERAEEFATLMTLEMGKPIAEARGEVTYGNEFMRWFSEEAVRTYGRHGQTPEGTHRMLTVRKPVGPCLLITPWNFPLAMATRKVAPAIAAGCTMVLKPARLTPLTAQYFAQTMLDAGLPAGVLNVVSGASASAISNPIMEDDRLRKVSFTGSTPVGKQLLKKAADKVLRTSMELGGNAPFIIFEDADLDLAVEGAMGAKMRNIGEACTAANRFLVHDSIAQDFSRRLAERFNQLTLGNGLDDGVTVGPLVEAKARENVAKLVDDAVTEGATVLTGGTAGEGEGYFYQPTVLVDVAPGARILTEEIFGPVAPIITFTTEEEAIQLANDTEYGLASYLFTRDYARMFRISDQLEFGLLGFNSGVISNAAAPFGGVKQSGIGREGGTEGIDEYTQLQYIGIRDPYTDR

SEQ ID NO: 12618 - DNA, 2159 bp, Sorghum bicolor
  CDS (223)..(1866)
agagagagagaggcacccggcagccattactcgtcctcactcccacaccaacaacctccatccagtgcctgccgcagccgcttctgctgcagcggggacgcgtgcaagtacaggaggatatccgcttccattactgcgctgcgccgcggcggaaacagcagcagcagaggggttcttcgattcggggggttcggccggcgggcgcaataaattttgcccgggatggctcggagggccgcgtcctcgctcgtctcccgctgcctcttggccagggcctctgcccccgccgcgccacccgctgtcccctctgcgctgcgcaggccagatgggatgcgcggactgttgccaggcgtccttcagaggttcagcactgcagcagcagtagaggagcccatcacgccctcagtccaagtgaactatacaaagctcctcattaatggcaactttgttgatgctgcatccggcaagaccttcccaactctggaccctcgtacaggggaggtgattgctcatgtggctgagggtgatgcagaggacattaaccgtgcagtagctgctgcccgcaaggcttttgatgaagggccatggccgaagatgactgcctatgagaggtcccgtatcctactgcggtttgctgatttgattgagaagcacaatgatgagcttgctgctttggagacgtgggacaacggaaagccatatgagcaagcagcccatattgaagtaccaatggtggcccgtcttatgcgttactatgctggttgggctgataagatccatgggctcgttgtgccagctgatggcccacaccatgtacagatcttgcatgagccaatcggtgttgcaggtcagatcatcccatggaacttccctcttctgatgtttgcctggaaagttggccctgctttggcatgtggaaacactctcgtgctcaagactgctgagcaaactcctctatcggctttgtatatctccaagctgttgcatgaggctggactacctgagggtgttgtgaatgtcgtttctggttttggccctactgctggtgctgctcttgctagtcacatggatgttgataagcttgcatttacgggatctaccgataccggcaaagttgttcttgagttggctgcaaggagcaaccttaagacagtgacactggagttaggaggcaagtctccttttatcatcatggatgatgctgacattgaccatgctgttgagcttgcgcactttgccctgttctttaaccaggggcaatgctgttgtgctggatctcgcacatttgtacatgagcgtgtttatgatgagtttgtggagaaagccaaggctcgtgcattgaagcgcgtcgttggtgatccattcaggaaaggtgttgaacagggcccgcagattgacgacgagcaattcaacaagatcttgcgctacattaggtctggtgttgacagtggagctaaccttgtgacgggtggtgataggttgggtgagaaaggttactacatccagccaacgattttctcagatgtccaggatggcatgaagattgctcaggaggagatatttgggcctgttcagtcaatcctcaagttcaaggatctcaatgaggttattaagagggcaaatgcgagcccatatggattggccgctggtgtgttcaccaatagcttggacacagccaacaccctgacgcgtgcgctcagggctgggaccgtctggattaactgcttcgacatcttcgatgctgcaattccctttggtgggtacaagatgagcggcattgggagggagaagggcattgacagcctgaagaactacctgcaagtgaaggcagtcgtcacccctatcaagaacgccgcgtggttgtagatgctgcaagtatggccttctggataagaactacggatattcatttcctcatcacatcccgcacaataatatgaaggcgataatcagttagatgacgatgaagaacgaacagctataataagatttgccctttggttgtcagttatatctctaataagccttttggttggtgccatattgtgcaatttggctgcaccctttttcttttggataagactatattgtagcaacggattttgcagagttcattatgaaaaaacatttgttagaagagcaaaaaaaaaaaaaaaaaa

SEQ ID NO: 12619 - protein, 547 aa, Sorghum bicolor
MARRAASSLVSRCLLARASAPAAPPAVPSALRRPDGMRGLLPGVLQRFSTAAAVEEPITPSVQVNYTKLLINGNFVDAASGKTFPTLDPRTGEVIAHVAEGDAEDINRAVAAARKAFDEGPWPKMTAYERSRILLRFADLIEKHNDELAALETWDNGKPYEQAAHIEVPMVARLMRYYAGWADKIHGLVVPADGPHHVQILHEPIGVAGQIIPWNFPLLMFAWKVGPALACGNTLVLKTAEQTPLSALYISKLLHEAGLPEGVVNVVSGFGPTAGAALASHMDVDKLAFTGSTDTGKVVLELAARSNLKTVTLELGGKSPFIIMDDADIDHAVELAHFALFFNQGQCCCAGSRTFVHERVYDEFVEKAKARALKRVVGDPFRKGVEQGPQIDDEQFNKILRYIRSGVDSGANLVTGGDRLGEKGYYIQPTIFSDVQDGMKIAQEEIFGPVQSILKFKDLNEVIKRANASPYGLAAGVFTNSLDTANTLTRALRAGTVWINCFDIFDAAIPFGGYKMSGIGREKGIDSLKNYLQVKAVVTPIKNAAWL

SEQ ID NO: 12620 - DNA, 3201 bp, Xanthomonas campestris
  CDS (1)..(3201)
atgaacgcccagccagacacgtttgcttcttcccacctcgcgcgcccgctgttggcgcccgaactgcccgccgcgcccggcgccttgcgtgccgccatcaccgctgcctggctcaaggacgaaaccgagcacgtccgtgaattgctggagcaggcgcgcctgccggccgcagagcaggccaaggtgcaggcgctggccgccgacctggtcacccgggtgcgcgcacgtgcccaggatcagggcgcgatcgaagccttcatgcgccaatacgatctgggcagcgaagaaggcgtgctgctgatgtgcgtggccgaagccttgctgcgcattcccgaccaggacaccgccgacaagctgatccgcgacaagctgggcgaggcggactggaaaaagcacgtgggtggcagtgattcggtgctggtcaacgcatccacctggggcttgatgctcaccggcaagctggtgcagctcaacgaccttacccgcgccgatgtgccgggcgccttcaaacggctgatcggccgcgtcggcgagccggtgatccgtttggccgtgcgccaggcgatgaagatcatgggccaccagttcgtcatgggccgcaccatcggcgaggcgctggcgcgttcgcgcaagggtgacaacgccaattaccgctattcgttcgacatgctcggcgaaggcgcgctcaccatgaaggatgcgcagcgctatctgcaggcgtatcgcgatgccatccacgcgattggccgcagtggtagtttcgtgggcacagacgtgttcgccgcgcccagcatttcgatcaagttgtccgcgctgtatccgcgctacgaacacgccaagcgcgcacgcgtgatggccgagctggttcccggcgtgctggagctggcacaactggccaagtcctacggcatcggctacaccgtcgatgccgaagaggccgaccgcctggagctgtcgctggacatcatcgaagccacgttctccgatccatcgctggatggttgggagggctacgggctcgcagtgcaggcgtatcagaagcgcacgccctacacgatcgatttccttgccgatctggcgcgtcgcgttggccgccgcattccggtgcgtctggtcaagggcgcgtattgggacgctgagatcaagcgtgcgcagatcgacggccaccccgggtatccggtgtttacccgcaagcagaacaccgacgtgtcctatctggcctgcgcacgccgcatgttcgcgcacagcgacgcgctgtacccgatgttcgccacccacaacgcacagaccatcgctgcggtgcgcgcgatctcggcaggaaagacctacgagcaccagaaactgcacggcatgggcgatgacctgtatgccgaggtgattccggccgatcggctgggattgccgtgccgggtgtatgcgccggtcggctcgcacgaagacctgttgccgtacctggtccgtcgcttactggaaaacggcgccaactccagcttcgtcaatcgcatcaccgacgaagacgtcgccatcgaagacctgatccgcgatccggtcgaggcggtgtcctcgtttgcgtccatcccgcaccccaagatcccgctgccggccgacctgctgcgcagccagaaccagaacaggaagaattccatgggcgccaacctcgccaacgataacgatctgcggcagctggccgaccaactcaccgccgcaatcaagccgtggaaggccgcgccgctggtgccgggtgccgtgatcaccacgccaagcgaggccgtgttcaacccggccgaccgccgcgagacagtcggtcactggcagcccgcggacccagccaccgtgcagaaggcattggcgtctgccgccgccgctcagccagcctggaatcgcacgcccgccgccagccgcgccaccatcctcgaacacgccgcagacctgctcgaggcccgcatgccggagttcatggcgatctgcgtcaaggaagcaggcaagaccctgccggacgccgtggccgaggtacgcgaagccgtggacttcctgcgctattacgctgcccaggcgcgtgcgcagtttggtgcgcctgagcgcctgccgggccccaccggcgaatccaacgagctgcaactgcatggccgcggcgtgttcgtctgcatcagcccctggaacttcccgctggcgatcttcctgggccaagtggctgcggcgctggcggcaggcaataccgtcatcgccaagccggccgagcagaccaacctggtgggctttgcggcggtcaaactgttgcatgaagccggcgtgccggaagccgctgtgcagttcctgcccggcgatggcgccacggtcggcgccgcgttgaccaacgacccccgcgttgccggcgtcgccttcaccggctccaccgataccgcccgcatcatcaatcgcacgctcgccgcgcgtgacgccgcgattggcgtactgatcgccgagaccggcggccagaatgccttcatcgccgattcgtcctcgctcccggaagccgtagtcaaggacgccatctccagcgccttcatctctgctggtcagcgctgctcggccgcccgcgtgctgttcgtacaggacgacatcgccgacaaggtcatgaccatgctcgccggcgcgatgggcgagctgaaaatcggcgacccggccctgctctccaccgacgttggtcccgtaatcgacgccgatgccctgaagatcctggaagaacacgcgagccgcatggacagcgaagcacgcctgatcggcacgaccacgctggacagcgccacggcacatggcagcttctttgctccacgtgcctacgaattgaagtccctggcgcagctgcagcgtgagattttcggccccgtgctgcacatcattcgctggaaagccgaccagctggattcggtcatcgatcagatcaacgccaccggctatggcctcaccctgggcgtgcattcgcggatcgatgagaccatcgatcgcatcacctcgcgcgtggccgtaggcaatgtctacgtcaatcgcaaccagatcggcgctgtggtcggcgtgcagccgttcggtggccagggattgtcaggcaccggcccgaaggccggcggtcctcactacctgctgcgctttgccaccgaaaaggtcgtcaccgtgaacaccaccgcagccggcggcaatgcttcgctgctgaccttgggtgactga

SEQ ID NO: 12621 - protein, 1066 aa, Xanthomonas campestris
MNAQPDTFASSHLARPLLAPELPAAPGALRAAITAAWLKDETEHVRELLEQARLPAAEQAKVQALAADLVTRVRARAQDQGAIEAFMRQYDLGSEEGVLLMCVAEALLRIPDQDTADKLIRDKLGEADWKKHVGGSDSVLVNASTWGLMLTGKLVQLNDLTRADVPGAFKRLIGRVGEPVIRLAVRQAMKIMGHQFVMGRTIGEALARSRKGDNANYRYSFDMLGEGALTMKDAQRYLQAYRDAIHAIGRSGSFVGTDVFAAPSISIKLSALYPRYEHAKRARVMAELVPGVLELAQLAKSYGIGYTVDAEEADRLELSLDIIEATFSDPSLDGWEGYGLAVQAYQKRTPYTIDFLADLARRVGRRIPVRLVKGAYWDAEIKRAQIDGHPGYPVFTRKQNTDVSYLACARRMFAHSDALYPMFATHNAQTIAAVRAISAGKTYEHQKLHGMGDDLYAEVIPADRLGLPCRVYAPVGSHEDLLPYLVRRLLENGANSSFVNRITDEDVAIEDLIRDPVEAVSSFASIPHPKIPLPADLLRSQNQNRKNSMGANLANDNDLRQLADQLTAAIKPWKAAPLVPGAVITTPSEAVFNPADRRETVGHWQPADPATVQKALASAAAAQPAWNRTPAASRATILEHAADLLEARMPEFMAICVKEAGKTLPDAVAEVREAVDFLRYYAAQARAQFGAPERLPGPTGESNELQLHGRGVFVCISPWNFPLAIFLGQVAAALAAGNTVIAKPAEQTNLVGFAAVKLLHEAGVPEAAVQFLPGDGATVGAALTNDPRVAGVAFTGSTDTARIINRTLAARDAAIGVLIAETGGQNAFIADSSSLPEAVVKDAISSAFISAGQRCSAARVLFVQDDIADKVMTMLAGAMGELKIGDPALLSTDVGPVIDADALKILEEHASRMDSEARLIGTTTLDSATAHGSFFAPRAYELKSLAQLQREIFGPVLHIIRWKADQLDSVIDQINATGYGLTLGVHSRIDETIDRITSRVAVGNVYVNRNQIGAVVGVQPFGGQGLSGTGPKAGGPHYLLRFATEKVVTVNTTAAGGNASLLTLGD

SEQ ID NO: 12622 - DNA, 3201 bp, Xanthomonas axonopodis
  CDS (1)..(3201)
atgaacgctcagctcgacccgcttgcctccacctcagttgcgcgcccgctgctggcgcccgaactgcccgccgcacctggcgctttgcgtgccgccatcaccgcggcctggctcaaggacgaaaccgagcacgtgcgtgaattgctcgaccaggcacgcctgcctgtcgctgagcaagccaacgtgcaggcgatcgctgccgatctggttacccgtgtgcgggcgcgttcgcaggaccagggcgccatcgaagccttcatgcgccaatacgacctgggcagcgaagaaggcgtgctgctgatgtgcgtggccgaggcgctgttgcgcattcccgaccaggacactgccgacaagctgatccgcgacaagcttggcgatgcggattggaagaagcatatgggcggcagcgattcggtgctggtcaacgcttccacctggggcctgatgctgaccggtcagttggtgcagctcaacgacctcacccgcgccgatgtgccgggcgccttcaagcgcctgatcggccgcgtcggcgagccggtcattcgcctggccgtgcgccaggccatgaagatcatgggccatcagttcgtcatgggccgcaccatcggcgaggcgctgtcgcgttcgcgcaagggcgacaacgccaactaccgttattcgttcgacatgcttggcgaaggcgcgctcaccatgaaggatgcgcagcgctatctgcaggcgtatcgggatgcgattcatgcgatcggccgcagcggtagcttcgtcggtaccgatgtatttgccgcgcccagcatctcgatcaagttgtcggcgctgtatccgcgttacgagcatgccaagcgcgcccgcgtgatggcagagctggtgccgggcgtgctggaacttgcgcagttggccaagtcgtacggcatcggctacaccgtcgacgccgaagaagccgaccggctggaactgtcgctggacatcatcgaggccaccttctccgacccgtcattggatggctgggaaggctatggcctggccgtgcaggcctatcaaaaacgcacgccgtacacgatcgattttcttgccgatctggcgcgccgtgtcggacgacgtattccggtgcgcctggtcaaaggcgcgtactgggacgcagagatcaagcgcgcgcagatcgaagggcatcccggctacccggtgtttacgcgcaagcagaacaccgacgtgtcgtacctggcatgcgcacgtcgcatgttcgcgcacagcgacgcgctctacccgatgttcgccacgcacaacgcgcagaccattgcggcagtccgtgcgattgcggcaggcaagacctacgagcaccagaaactgcacggcatgggcgatgacctgtatgccgaagtgattcctgccgatcgtctcgatctgccatgccgcgtctatgcaccggtcggctcgcacgaagatctgctgccgtatctggtgcgccgtttgctcgaaaacggcgccaattccagcttcgtcaatcgcatcaccgacgaggatgtcgccatcgaagacctcatccgcgacccggtcgaggctgtgacgtcatttacttccatcccgcatcccaagattccactgccagccgatttgctgcgtagccagaaccagaacaggaaaaactccatgggcgccaatctcgccaacgacaacgatctgcgccagctggccgagcaactcaacgccgcgatcaaaccgtggaaggccacgcccctggtgcctggtgcgctgatcagcacgcccagccaagcggtgttgaatccggcagatcgccgcgagacggttggacagtggcacccggccgatccggacaccgtccagaagtcgctggccagcgctgtggccgcgcagccggcctggaaccgcacacctgcagcgagccgcgccactatcctggaacatgcagctgatctgctcgaaacgcgcatgtccgagttcatggcgatctgcgtcaaggaagccggcaagacgctgcccgacgcagtggccgaagtccgcgaggccgtcgatttcctgcgctattacgccggccaggcgcgtgcgcagttcggtgccccggagcgcctgcctggaccgaccggcgaatccaacgagctgcagctgcacgggcgtggcgtctttgtctgcatcagtccgtggaacttcccgttggcgatcttcctcggtcaggtcgccgcagcgctggcggccggcaacacggtcatcgccaaaccggccgagcagaccaacctgatcggctttgcagcggtcaagctgctgcacgaagccggcgtaccggaagcggctgtgcagttcctgccaggtgatggcgctaccgttggtgctgcgctgaccaacgacccgcgcgttgccggcgttgcattcaccggttctaccgaaaccgcacgcatcatcaaccgcaccctggccgcacgcgatgctgccatcggcgtcttgatcgccgaaaccggcggccagaacgccttcatcgctgactcgtcctcgctgcccgaagcggtggtcaaagacgccatttccagtgccttcatctcggccgggcagcgctgctccgcggcgcgcgtcctgttcgtccaggacgacatcgccgacaaggtcatgacgatgctggccggtgcgatgggtgagttgaagatcggcgatccgggcctgccatcgaccgacgttggccctgtcatcgatgccgatgccctcaagattctcgacgatcacgctgcacgcatggatcggcaagcgcgtctgatcggcagcaccgccctggacggtagcaccgcacacggcagctttttcgctccacgcgcctatgagctgacatcgctgtcccagctgcagcgtgaaatcttcgggccggtgctgcacgtgattcgctggaaagccgaccagctcgatgccgtcatcgagcagatcaacgcgaccggttacggcctcacgttgggtgtccattcgcgtatcgatgagacaatcgaccgcatcacctcgcgcgtggcggtaggcaacgtctacgtcaatcgcaaccagatcggcgccgtggtcggcgtacaaccgttcggcggccagggcctgtccggcaccggccccaaggccggcggcccgcattacctgctgcgtttcgcgaccgagaaggtcgtcaccgtcaacaccaccgcggcaggcggcaacgcctcgctattgaccttgggtgactaa

SEQ ID NO: 12623 - protein, 1066 aa, Xanthomonas axonopodis
MNAQLDPLASTSVARPLLAPELPAAPGALRAAITAAWLKDETEHVRELLDQARLPVAEQANVQAIAADLVTRVRARSQDQGAIEAFMRQYDLGSEEGVLLMCVAEALLRIPDQDTADKLIRDKLGDADWKKHMGGSDSVLVNASTWGLMLTGQLVQLNDLTRADVPGAFKRLIGRVGEPVIRLAVRQAMKIMGHQFVMGRTIGEALSRSRKGDNANYRYSFDMLGEGALTMKDAQRYLQAYRDAIHAIGRSGSFVGTDVFAAPSISIKLSALYPRYEHAKRARVMAELVPGVLELAQLAKSYGIGYTVDAEEADRLELSLDIIEATFSDPSLDGWEGYGLAVQAYQKRTPYTIDFLADLARRVGRRIPVRLVKGAYWDAEIKRAQIEGHPGYPVFTRKQNTDVSYLACARRMFAHSDALYPMFATHNAQTIAAVRAIAAGKTYEHQKLHGMGDDLYAEVIPADRLDLPCRVYAPVGSHEDLLPYLVRRLLENGANSSFVNRITDEDVAIEDLIRDPVEAVTSFTSIPHPKIPLPADLLRSQNQNRKNSMGANLANDNDLRQLAEQLNAAIKPWKATPLVPGALISTPSQAVLNPADRRETVGQWHPADPDTVQKSLASAVAAQPAWNRTPAASRATILEHAADLLETRMSEFMAICVKEAGKTLPDAVAEVREAVDFLRYYAGQARAQFGAPERLPGPTGESNELQLHGRGVFVCISPWNFPLAIFLGQVAAALAAGNTVIAKPAEQTNLIGFAAVKLLHEAGVPEAAVQFLPGDGATVGAALTNDPRVAGVAFTGSTETARIINRTLAARDAAIGVLIAETGGQNAFIADSSSLPEAVVKDAISSAFISAGQRCSAARVLFVQDDIADKVMTMLAGAMGELKIGDPGLPSTDVGPVIDADALKILDDHAARMDRQARLIGSTALDGSTAHGSFFAPRAYELTSLSQLQREIFGPVLHVIRWKADQLDAVIEQINATGYGLTLGVHSRIDETIDRITSRVAVGNVYVNRNQIGAVVGVQPFGGQGLSGTGPKAGGPHYLLRFATEKVVTVNTTAAGGNASLLTLGD

SEQ ID NO: 12624 - DNA, 1440 bp, Methanosarcina mazei
  CDS (1)..(1440)
atggtagccatgaaaatgcagattaatggaaaagcggcaggatcatgtggcggcgagtgctttgacgttagaaatcctgcaacatgcgaacttcttgagcaggtcccgagaggcacggaagaggatgttgcccttgcggtagaagccgctttatcagcttttgaaggctgggcttctatctctccacagcagagaggcatggttttttacagggctgccgggcttgtaaggcagaggaaggaggagcttgctgccctgctcacacaggaacaggggaagcctcttgcagaagccagaaacgaactggaaggcttctcgcatgtgcttgaatactactgcgggcttgcaggcagtttgaggggtgactttatccctgttacgggaaatggctattcttttaccgtaaaaaaacctctgggtgtctgtgcagccatcatcccctggaacatgcctgccctgattatggggtggaaaattgcacctgcccttatttcaggcaacacttttgtgctaaaacctgcaagcagcactcccctcacaaacctcaccctggcttctatcctgaatgaagccggtcttccagcaggagtcctgaacgttgtcacaggctctggagagattgcaggagaaagccttgtccgcagccctgatgtaagaaaaatttcttttacaggggaatccgggacaggaaaaaggatatccgagcttgcagccagcgggatgaaaagggttactcttgagctgggcggaagcgaccccatgattgtatgtgatgatgccaatctcgaaagtgcagttgcaggagccatcagggggagattttacaattgcggccagacctgtactgctgtcaaaaggctgtatgtttttgaatccgttgccagggagttcataagaaaactcgaagaaggagttaagagattaaaagtcggaaacggactggataaggatacggatatggggcctctcaataaccacagccagtttgaatacataaaagagctggtagcaggaattgaggagaagggtgaaggcagaataattgcagggggaaaagccccttcattcaaaggcatgggtaaaggatatttctttgagccgactctcgtttcagatgtccccggagattccaggctccttaaggaggaggtgttcggacctttgctgcccatagttacagtaaggaatctcgatgaggctatagaagaggcaaacaggagcatttatggtcttggagcatccatctggacaaaagacctggacaggataaggatgggatgcgagcagttgaatgcgggaattatatgggttaaccagcaccttaaggtagccccggaagttcctttcggaggagttaaagagagcgggtttggaagagaaaacgggcctgacatcctttccgaatacctcgaaaccaggaccataatgttaaaaacctga

SEQ ID NO: 12625 - protein, 479 aa, Methanosarcina mazei
MVAMKMQINGKAAGSCGGECFDVRNPATCELLEQVPRGTEEDVALAVEAALSAFEGWASISPQQRGMVFYRAAGLVRQRKEELAALLTQEQGKPLAEARNELEGFSHVLEYYCGLAGSLRGDFIPVTGNGYSFTVKKPLGVCAAIIPWNMPALIMGWKIAPALISGNTFVLKPASSTPLTNLTLASILNEAGLPAGVLNVVTGSGEIAGESLVRSPDVRKISFTGESGTGKRISELAASGMKRVTLELGGSDPMIVCDDANLESAVAGAIRGRFYNCGQTCTAVKRLYVFESVAREFIRKLEEGVKRLKVGNGLDKDTDMGPLNNHSQFEYIKELVAGIEEKGEGRIIAGGKAPSFKGMGKGYFFEPTLVSDVPGDSRLLKEEVFGPLLPIVTVRNLDEAIEEANRSIYGLGASIWTKDLDRIRMGCEQLNAGIIWVNQHLKVAPEVPFGGVKESGFGRENGPDILSEYLETRTIMLKT

SEQ ID NO: 12626 - DNA, 1479 bp, Methanosarcina mazei
  CDS (1)..(1479)
atgattcgggagtataagttactgataggtgggaagtcggtagactcatcaaccggagaaacttttgatgacatcaatccggctactcttgaaaaccttgccacgttacaggtcgcaggaatcgaagatgtggaccgggcagttgaggctgcagaggcagggttcagggtatggagtgaagttccggctcctggaagggctgaggtccttttcagggcagcgcgcataatgcaggagagaaaagaaggccttgccagactcatgacagaagagatgggaaaggtcctgcccgagaccaggggtgatgtacaggaagcaatagacattaccatttacgctgcaggggaaggcagaaggatgtttggggaaacaacgacctcagaactcagggacaagttctgcatgaccgtgctaaggcctgtaggagttgtgggcatgataacaccctggaactttcctattgcgattcccagctggaagatcatgccagcccttattgcagggaatgcgatcgtgttcaagcctgcaagcgatacgcccctgcttaccataaaacttgtagaaatcctgatggaggcgggcctgcctccaggagtcataaacatcgttcccggacctggaggaagtaccggaaaagcaatagtccagcacccccgaataagagcaatttcatttacaggaagccttgataccgggaaatggatcatggaagagtgtgcaaaatccatgaagcgggtctctttagagctgggtggaaaaaatcctgttattgtaatggatgatgcaaaccttgagcttgcccttgaaggcgtggtctggggagctttcgggacaacaggccagcgctgtacagctacgagcaggctgatccttcacgaaaaaataaaggatgaattcataaaaaggctgctcgcaaaaacaaagtctctcagggtgggaaacgggctcctgcctgaaacggacgtggggcctgtaattaataaagcccagcttgagaaaatagaaaagtacgtcaggataggaaaggaagaaggtgcagctatcctggttggagggaacaggatagatccgggtcttcccggttatttcttcgaaccgaccatatttacggatgtcagtcctgaaatgaggattgcacaggaagaaatcttcgggcccgtgctaagcataatcactgtttcggattttgacgaggctattgaggttgcaaataacatcaagtacggtctctcatctgcgatttatactgaaaatgttagaaccgctttcagggcaattgaaaaactggaagcaggaatcacatatgttaatgcccctactataggtgccgaagtccatcttcctttcgggggcataaaaggaaccgggaacggtttcagggaagctggaacagaggcgattaaagaattcaccgaggtaaaagccgtatatatagattacagcggcaggctacaaaaagcccagatagatacagaataa

SEQ ID NO: 12627 - protein, 492 aa, Methanosarcina mazei
MIREYKLLIGGKSVDSSTGETFDDINPATLENLATLQVAGIEDVDRAVEAAEAGFRVWSEVPAPGRAEVLFRAARIMQERKEGLARLMTEEMGKVLPETRGDVQEAIDITIYAAGEGRRMFGETTTSELRDKFCMTVLRPVGVVGMITPWNFPIAIPSWKIMPALIAGNAIVFKPASDTPLLTIKLVEILMEAGLPPGVINIVPGPGGSTGKAIVQHPRIRAISFTGSLDTGKWIMEECAKSMKRVSLELGGKNPVIVMDDANLELALEGVVWGAFGTTGQRCTATSRLILHEKIKDEFIKRLLAKTKSLRVGNGLLPETDVGPVINKAQLEKIEKYVRIGKEEGAAILVGGNRIDPGLPGYFFEPTIFTDVSPEMRIAQEEIFGPVLSIITVSDFDEAIEVANNIKYGLSSAIYTENVRTAFRAIEKLEAGITYVNAPTIGAEVHLPFGGIKGTGNGFREAGTEAIKEFTEVKAVYIDYSGRLQKAQIDTE

SEQ ID NO: 12628 - DNA, 1772 bp, Arabidopsis thaliana
  CDS (15)..(1619)
caaaaaagttagccatggcatcaagaagagtttcttcgctgctctctcgctctttcatgtcctcctcacgttctatcttctctcttagaggcatgaacagaggagctcaaagatacagtaacctcgctgctgctgtcgaaaacactattactccaccagtgaaagttgaacacacacagcttctaatcggtggaagattcgttgatgcagtgtcaggaaaaactttccctactttggatccaagaaatggagaagtgattgctcaagtgtctgaaggtgatgcagaagacgtgaaccgcgcggttgcagctgcacgaaaggcttttgatgaaggaccatggcctaaaatgacagcttatgagagatcaaagatactgtttcgtttcgctgatttaatcgagaaacataatgatgagattgctgctcttgagacttgggataatgggaaaccttatgaacaatctgctcaaattgaagtaccaatgcttgctagggtgttccggtactatgctggttgggcagacaagatacatggaatgacaatgccaggagatggtccacaccatgtgcagaccttacatgagcctataggagtcgctggacaaatcatcccatggaacttccctcttctcatgctttcttggaaacttggaccagctttagcttgcggtaacaccgttgttctcaaaactgctgagcaaactcctctatctgctcttcttgttgggaaactacttcatgaggctggacttcctgatggagttgtgaatatagtttctggatttggggctactgctggtgcagctatagctagtcacatggacgttgataaggttgctttcaccgggtctactgatgttgggaagattattcttgagttagcttcaaaaagcaaccttaaggcagtgactcttgagctggaggaaagtcaccattcatttgtatgtgaagatgctgatgtggatcaggccgttgagcttgcacatttcgctttgttctttaaccagggacaatgttgttgtgctggttcgcgtacatttgtacatgaacgtgtgtatgatgagtttgtagagaaagctaaagctcgtgcactcaagcgaaatgttggagatcccttcaagtcaggcattgagcaaggtccccaggtagactcagagcaattcaacaaaatcctgaagtacatcaaacatggagttgaggctggagccacattacaagctggaggtgacaggcttggttccaagggttactacattcaacctactgtcttctcagatgtgaaagatgacatgctcatagcaacagacgagattttcgggccggttcaaaccatactgaaattcaaggatcttgatgaggtgattgcaagggccaacaactcaaggtacggtttagctgctggagtgttcacacagaatcttgacacagcacaccggctgatgcgagcactcagagttgggactgtttggatcaactgttttgatgtacttgatgcatcaattccatttggagggtataagatgagtggcattggtagagagaaaggtatctacagtctcaacaattacttgcaagtcaaggctgttgttacttccctcaagaaccctgcctggctctaaaccataccaggtggttacacttatttctcgagtttggtttatgatttgcacttttgctttgaaaacctggagttgtactgtgtctctaggatttctagattttgagagtaatttatcttcaatacattttgcaataaagctacatgacaatgg

SEQ ID NO: 12629 - protein, 534 aa, Arabidopsis thaliana
MASRRVSSLLSRSFMSSSRSIFSLRGMNRGAQRYSNLAAAVENTITPPVKVEHTQLLIGGRFVDAVSGKTFPTLDPRNGEVIAQVSEGDAEDVNRAVAAARKAFDEGPWPKMTAYERSKILFRFADLIEKHNDEIAALETWDNGKPYEQSAQIEVPMLARVFRYYAGWADKIHGMTMPGDGPHHVQTLHEPIGVAGQIIPWNFPLLMLSWKLGPALACGNTVVLKTAEQTPLSALLVGKLLHEAGLPDGVVNIVSGFGATAGAAIASHMDVDKVAFTGSTDVGKIILELASKSNLKAVTLELEESHHSFVCEDADVDQAVELAHFALFFNQGQCCCAGSRTFVHERVYDEFVEKAKARALKRNVGDPFKSGIEQGPQVDSEQFNKILKYIKHGVEAGATLQAGGDRLGSKGYYIQPTVFSDVKDDMLIATDEIFGPVQTILKFKDLDEVIARANNSRYGLAAGVFTQNLDTAHRLMRALRVGTVWINCFDVLDASIPFGGYKMSGIGREKGIYSLNNYLQVKAVVTSLKNPAWL

SEQ ID NO: 12630 - DNA, 1901 bp, Zea mays
  CDS (111)..(1646)
gagacgagtcgagtgagggggcagaggccacaaaacagagagtacccaaacgatcgatctgtgcatctccccgtccgtcccgcaaccatctaattcagaagcagacatcaatggcgagcaacggctgcaacggcaacggcaacggcaacggcaacggcaaggcggctccggcgggtgtggtggtaccggagatcaagttcaccaagctcttcatcaacggcgagttcgtcgacgccgcctccggcaagacattcgataccagggacccacggaccggcgacgtgctggcccacgtagcagaggcagacaaagctgatgtggacctggcggtgaagtccgcccgggacgccttcgagcacggcaagtggccccgcatgtcaggctacgagcgcgggcggatcatgagcaagctggcggacctggtggagcagcacacggaggagctggcggcgctggacggtgccgacgccgggaagctgctgctgctgggcaagatcatcgacatccccgcggccacgcagatgctgcgctactacgccggcgccgccgacaagatccacggcgacgtcctgcgcgtctccggcaggtaccagggctacacgctcaaggagcctatcggcgtcgtgggcgtcatcatcccctggaacttccccaccatgatgttcttcctcaaggtcagcccggcgctcgccgcgggctgcaccgtcgtcgtcaagcccgccgagcagacgccgctttccgcgctctactacgcgcacctcgcaaagatggccggcgtccccgacggagtgatcaacgtcgtccccgggttcggccccaccgccggcgccgcgctcgcctcccacatggacgtcgacagcgtggccttcaccggctccacagaggtgggtcgcctcatcatggagtcggccgcgcggagcaacctcaagacggtctcgctggagctcggcggcaagtcgccgctcatcatcttcgacgacgccgacgtcgacatggccgttaacctgtcgaggcttgccgtcttcttcaacaagggagaggtttgcgtggcgggatcgcgcgtgtacgtgcaggaagggatctatgacgagttcgtcaagaaggccgtggaggccgcgcggagctggaaggttggagacccgttcgatgtcaccagcaacatgggccctcaggttgacaaggaccagtttgagagggtcctaaagtacattgagcatggcaagagcgagggagcgactctgctcaccggcggcaagcctgccgccgacaaagggtactacattgagcccaccatctttgtcgatgtcactgaggacatgaagatcgcgcaggaagagatcttcggccccgtcatgtccctcatgaagttcaagacggttgatgaggtgatcgagaaggccaactgcaccaggtacgggctcgccgccgggatcgtgaccaagagcctggacgtcgccaaccgggtgtcccggtcggtgcgcgccggcaccgtgtgggtgaactgctacttcgccttcgacccggacgcgcccttcggcgggtacaagatgagcggcttcggccgggaccaggggctggcagccatggacaagtacctgcaggtcaagagcgtcatcaccgcgctcccggactcgccatggtactgagttgagccagggaccgatggaaccccatcgatctcttcttgtgcagtgtacatgcgtcatgcgtgcgtgctcacacagctgggttgctgctttgtgcttgtgttcgtctctggtttgtggctcatgtgtgttagtctgcaccctatccttctgtacgtagctgccggacatgcaaatagtatgttaagtacaccatataaactcttgttttataaattcaagtttagcttggagccttcactcccttcagccttg

SEQ ID NO: 12631 - protein, 511 aa, Zea mays
MASNGCNGNGNGNGNGKAAPAGVVVPEIKFTKLFINGEFVDAASGKTFDTRDPRTGDVLAHVAEADKADVDLAVKSARDAFEHGKWPRMSGYERGRIMSKLADLVEQHTEELAALDGADAGKLLLLGKIIDIPAATQMLRYYAGAADKIHGDVLRVSGRYQGYTLKEPIGVVGVIIPWNFPTMMFFLKVSPALAAGCTVVVKPAEQTPLSALYYAHLAKMAGVPDGVINVVPGFGPTAGAALASHMDVDSVAFTGSTEVGRLIMESAARSNLKTVSLELGGKSPLIIFDDADVDMAVNLSRLAVFFNKGEVCVAGSRVYVQEGIYDEFVKKAVEAARSWKVGDPFDVTSNMGPQVDKDQFERVLKYIEHGKSEGATLLTGGKPAADKGYYIEPTIFVDVTEDMKIAQEEIFGPVMSLMKFKTVDEVIEKANCTRYGLAAGIVTKSLDVANRVSRSVRAGTVWVNCYFAFDPDAPFGGYKMSGFGRDQGLAAMDKYLQVKSVITALPDSPWY

SEQ ID NO: 12632 - DNA, 2372 bp, Drosophila melanogaster
  CDS (463)..(2307)
aggaaatcaaatcaaaagcttgagcccttgtcctcaggatatagaaagtatatgggaacttttaccgtctcgctgacatgaacgatctcggtgtgactaattagacggatggcagccagtccatagaagagcattgggcatacacctttttcgagttaccacggacctatgtagcataatccgtttactggacttacccaaattaatcaccttaaggaagcgaaagaacttgtcctccagccaaagatcctgcacctccctcttgctacagtggtacttcatatagggataacaggcggtgcgaagaatgtgatagttggttccgttttccagggtccaattaaagtgagacattcccctctgatcgttggccacatcgtgaaactagacttggagcatatttctcattagatctggtgaaaatattggggcggaaaaaggggagtcttaccttcacgaaatatgatgtccaaggtggctcatggcattgtttcaaatatgcggtcaatacttccgaggctcgaggcttcagtaaaaggcggcctcgtgtctgttagaagtaccagcaagagacccgagctatccgagcactttacgctggatgagatggtggccaacgagaagctgcttcagtatgacgagggctcaaaggaacgcacggaactggaaaccgccctgctgggcgttctcaatagggtagagcacgttcccatcgttattaacggccaggagttccaggccaaggaggacttccaacaggttctgccctacgacatccaacagcccattgcccattacggtcatgcccaccgcgtgctcatccaaatggccatcgataagagtgtggaggcgcaggtgaagtgggacaaggtcaggcttagtgatcgaattgatatttgggagcgggcagcgatgctaattgccggaagataccgctacaacatcattgcggccacgatgttgggccagggaaaaacgctgcgccaggcggagatggatgtagccgagctggtggactttatgcgcattaatcccgtcttcctgcgtgagctggccaactacgaacccattagagacatccaaaacaattgcaggaactccatgcggttgagaggactttcgggatttgtggctgccatcagtccgtttaactttacgggtatcgccgccaatctggcctatacgcctgccttaatgggcaactcggtgatctggaagccctctgactcggccatcctgtccaactatttcgttttcaaggccctgcgggaggctggagtgcccgatggtgtggtgaactttgtgcccgccgaggagacaacgtttgcatccgtagtgacgcaacatccgaaattggcggggattaacttcactggtacctcaacggtgctcaaggtgctctggcaactggtggcccagaatataaatttctatcagaactatccccgtttggtgggcgagggaggcggcaagaatttccacttcgtacactcctcggcggaaccggaaacggcggtggcctgcacgataagagctgcctttgagtacgccggccagaagtgctcctcctgttcgatgttgtacgttccggaatccctgtggcagaatcacatacgagaacctcttcttgagatcactgcatctctggtcgtgcgacaagatgccacgtattgcgatagtttttgctcggcggtgatcaaccgacgggcctacgatcgcatctacatgtggctaaggtacatcgaccagagtcccagttgccagatcctcgttggaggaagctgcgacaagcgacgtggctattacgtagatccaacggtggtactggtcaaggatctggacaatatcatatgtcgggaagagctactggcacccattctcggtgtctatgtctatccagaccataagctcaaggagactatggaaaaggtggcccagattaatcatggattgacaggttcggtgtttgcccaggatcagaacttcatcgaggaagcatacgatgccttcagagtcaatgtgggcaacttaaatgtgaatgacaagtccaccggattgatggtgggtcagcagccttttggtgcgggacacatgaccggcaccagtgataagttgggcactccccactccctgctgcgatggacatcgccccaggtgattaaagagtcctacaagacacacaggaatatcttttatccatatatgcaaataaatgatcaggagcagggcatagcacaaagtgatatggtctcccaggatgaatcctcctttgggcacttcaacagtgatggcaacaaggtggtgtaggacaagctgaaacctttgttttatgatcaaaatttctgtggcaataaatatgaaaattgtgtaat

SEQ ID NO: 12633 - protein, 614 aa, Drosophila melanogaster
MMSKVAHGIVSNMRSILPRLEASVKGGLVSVRSTSKRPELSEHFTLDEMVANEKLLQYDEGSKERTELETALLGVLNRVEHVPIVINGQEFQAKEDFQQVLPYDIQQPIAHYGHAHRVLIQMAIDKSVEAQVKWDKVRLSDRIDIWERAAMLIAGRYRYNIIAATMLGQGKTLRQAEMDVAELVDFMRINPVFLRELANYEPIRDIQNNCRNSMRLRGLSGFVAAISPFNFTGIAANLAYTPALMGNSVIWKPSDSAILSNYFVFKALREAGVPDGVVNFVPAEETTFASVVTQHPKLAGINFTGTSTVLKVLWQLVAQNINFYQNYPRLVGEGGGKNFHFVHSSAEPETAVACTIRAAFEYAGQKCSSCSMLYVPESLWQNHIREPLLEITASLVVRQDATYCDSFCSAVINRRAYDRIYMWLRYIDQSPSCQILVGGSCDKRRGYYVDPTVVLVKDLDNIICREELLAPILGVYVYPDHKLKETMEKVAQINHGLTGSVFAQDQNFIEEAYDAFRVNVGNLNVNDKSTGLMVGQQPFGAGHMTGTSDKLGTPHSLLRWTSPQVIKESYKTHRNIFYPYMQINDQEQGIAQSDMVSQDESSFGHFNSDGNKVV

SEQ ID NO: 12634 - DNA, 2705 bp, Drosophila melanogaster
  CDS (172)..(1896)
gaacgtgcttatcgataataaagtaaactgaaaataaatcagtcatccgctcggttgaccaactgcccaaatagcaaaattctaggtggtacgagccgacgacgacgaagaatctgagagaccgcttatataatccggcagcgaacgagacaggccccaaatcccgacaagatgttgcgaatgatgcgaagttcctcctccagatgctctagtcttcagcagagcttgttgaaaaattcgacacgctgtctgggttccgttataccggaccttaaactgaaggacttcccgatcgccaatgagccaatcctgggatatctcaaggactctaaggagcgtaaggccctcgagcaggctctaaagggcacggcctcgagttgcgaagacatccccatcgtgatcggcggcaaggagtacaagacgccggaggttcgataccaggtcatgccccatgaccaccaacacaagctggccagcttctactacgccgacaagaagcttatcgagaaggccatcaaaacggcggtggaaacacagcccaagtgggaccgtgtgtcgattgcagaccgtctgaagatctgggagaaggcagcggacctaatggcaacgacgtaccgccaggatctcaacgccgccaccatgctgggtcagtcaaagacggcgattcaggcggaaatcgattcagcagcggagcttatcgactttatacgaatgaatgcctattttctgaaggaggtcactaaataccagcccatcagcgagaacataaaggtcacgaagaactccttgcgctatcgtggcattgatggcttcatcgccgctgtcagcccctttaactttacggccatcggcggcaacttgtcctacacgccagctctgatgggaaacggcgtgctgtggaagccctcggacactgccatgctgtccaactggattattttcaagattatgcgcgaagcgggagtgcccgatggagtcgttaactttgtgcccgccgatgggcccgtgtttggagacacgattacggccagtccccacctggcaggcatcaatttcaccggctctgtgccaacctttaaccgcctgtggaagcaggtgggcaacaacattgacaactacgtgaactttcctcgcttgactggtgagtgtggcggcaagaatttccactttatacatgcatcagccgacgttgagtcagtggtgacctccacgatacgctcagcatttgagtactgcggccagaagtgttccgcctgctcgcgaatgtatgtgccggaatccctttggccacagatcaaggagggcctggtatgcgaggcagcaaagctgaagatcggtgacgttcaagacttcagcagcttcacgtcggctgtgattgatgacaaagcatttaaacgcattacgggctacattgagcatgccaaaaaatccccgaacctcgagattctcgccggaggcacttactcagacagcaagggctacttcgttaatccgaccattgtactcagcaaggatcccaaggaccggatcatgaccgaagagattttcggtcccgtgctatctatttatgtgtacaaggagtcggacctccttgagaccatgaaactggtgcacacctctaccaagtttgctttaaccggagcagtattcgggcaggacgaggatttcgtcaagtgcgctctgcaggagtttaaaatggccgctggaaacttctacatcaacgacaagtccactggatccgtggtgggccagcagccattcggaggcggccggatgtccggcaccaatgacaaggccggaggaccacattatattctgcgctggacctctccgcagtccatcaaggagacctttgtgccgctgcgggacgtcaactatccatacatgtgcgagtaagctggccgacagaagatgcgcaaggggaatgggatgagcaaaagtagtgaaaaccagacaggaatctcatataactactaactatataaacatacttaaatgtattttgttgaaatacttttaaacatctccaacacccaaagacctgccccgtaaccctacatacctagttcagatagcttcgatttgtatacacacacactctaagaatctcaaaacaacccatgagaatgcctcgaaagtttgtaaattgatatgctgataccttcgaactacaaacacaccatgacatggatattttaaatgaatactatgtaatatcattattttacgatttaaacgcaatgtgattatttaattatatatgatttataattaaatggcccgccttatgttttattcgttatcgaaattgcttgaattggttgaaccgttttcaattataaaatacttaatgtacacacctatgtatgtgaaatcaaacgacaatacattctgaatactaaatgtgaaagatcatgaagagataaagtgaaacctagttacatgtaacgtaagcatcaaattcatattaataaatataacaaagaattaaaaataattatttgggttccgttttcaacatttcgtttaacccaaaatgctatccgcatcgattggggcagttcctttacccgtagaatttaaacttcaaaacttgatggtctgaagagaacatgcaaaggtttagtttcatttgattcaaatttgtaatcaaactacaaacaattctgttattaaaaaatacatgtaaaaaaaaaaaaaaaaaa

SEQ ID NO: 12635 - protein, 574 aa, Drosophila melanogaster
MLRMMRSSSSRCSSLQQSLLKNSTRCLGSVIPDLKLKDFPIANEPILGYLKDSKERKALEQALKGTASSCEDIPIVIGGKEYKTPEVRYQVMPHDHQHKLASFYYADKKLIEKAIKTAVETQPKWDRVSIADRLKIWEKAADLMATTYRQDLNAATMLGQSKTAIQAEIDSAAELIDFIRMNAYFLKEVTKYQPISENIKVTKNSLRYRGIDGFIAAVSPFNFTAIGGNLSYTPALMGNGVLWKPSDTAMLSNWIIFKIMREAGVPDGVVNFVPADGPVFGDTITASPHLAGINFTGSVPTFNRLWKQVGNNIDNYVNFPRLTGECGGKNFHFIHASADVESVVTSTIRSAFEYCGQKCSACSRMYVPESLWPQIKEGLVCEAAKLKIGDVQDFSSFTSAVIDDKAFKRITGYIEHAKKSPNLEILAGGTYSDSKGYFVNPTIVLSKDPKDRIMTEEIFGPVLSIYVYKESDLLETMKLVHTSTKFALTGAVFGQDEDFVKCALQEFKMAAGNFYINDKSTGSVVGQQPFGGGRMSGTNDKAGGPHYILRWTSPQSIKETFVPLRDVNYPYMCE

SEQ ID NO: 12636 - DNA, 3132 bp, Vibrio vulnificus
  CDS (1)..(3132)
atgtttacagcaacagatgtgttaaagccggagtttgtcgcgcagccgctcgataagctatgggcattgatctccccattgtatatggtggacgaatctcaatggctggagcagctcctgccactggcaaccccttcagcggaagagaagcaagcgatcgccagccgaacgactcagttaattgaagcgattcgcgccgacaagaagtcgattcaattgatcgatgcactgttgttggaatacagcctagacacgcacgaaggcatcttgctgatgtgtttggcagaagcgctgatgcgtattccggatgcggccacggctgacgctctgatcaaagataaaatgagcgtggcagattggaaatcgcatcttaaaaattccgaatctgtgtttgtcaacgcctcgacatggggcctcatgctgacaggtaaagtggtgggcttgggtgatgatgaaacgcaaagtgccagccaagcgctcaatcgcttagtgaacaagctttctgagccggtgatccgcaaagccatgtatcaggcgatgaagatcatgggccatcagttcgttcgtggccgcaccatcgaagaggcgcagaaaaatggccgcccaatgcgcgataaaggcttcacttactcttttgacatgctgggtgaagcggcgctgaccaccgcggatgccaataaatacttcaaagattatttgatggcgattgaggctgtgggccgtgaaacgtatggtaatgacaccagccctgcgccatcggtatcgatcaaactctctgccttgcatcctcgctatgaagtggccaatgaacaccgcgtgatgagcgagctgtttgacaccttggcacaactgctgaaacgcgctgtcgagctagacgttgcgattaccattgatgcggaagaagccgaccgcctagagctctctctcaaactgtttgaaaaactctaccgcagtgaaacggtcaaaggctggggtaagtttggcctggtggtgcaagcgtattccaaacgcgctctgccggtgttggtgtggctcaatgctctcgctaaagagcaaggcgatttgatcccgctgcgtttggtgaaaggcgcgtattgggacagcgaagtgaagtggtctcagcagcgtggttacgataactacccggtttacactcgcaaagaagccaccgatgtggcgtacttagcgtgtgctcgcttcctattaagcgatgacgtgcgcggcaacattttcccgcaatttgctagccataacgcgcaaaccgtttcctcgatcgccaccatggcgactcacagcgactatgagttccaacgtctgcatggcatgggcgattcactttataaccatgtgatggagcagtatcgtcagccagtacgaatttacgcgccagtgggcagccacaaagatttgctgccatacctagtgcgtcgtctgctggaaaacggtgccaacagctcgtttgtccaccgtttggtcgatgcgcgctgcccagtggcagagcttaccaaacacccagtagaagcgctgacctcatttgaaaccctgaacaataccaagatcccattgccagcggcgattttccctgagcgtaaaaactcctatggcgttaacgtggatatcgaaagtgaagccaagccgtttgaagcacaggtcgagtccttcttgagcaagcagtggttagctggcccgatcatcaacggcgcatcgctggccgaaagcatgatcaaggacggtcaagcggaaagtgtcacagcgccgtatgatcgtcgtatccaagtggggcaaattgcgtttgctaaccttgatcatgtttcccaagcgatcgatatcgcacaagcggcttttgctgattggaatcgcacaccgttggtggagaaagcgcgttgcctagacaacctcgctgacttgatggaagccaacttggctgagctggtggcactttgtcaccaagaagcgggcaagacactgcatgacagtattgatgaagtgcgtgaagcggtcgatttctgtcgttactacgccaaacaagcgcaaaatctgcaaccttttgagttagaaggctttgatggcgtgaaacgcattgccagccgtgaaggtttgggggtgttcgtctgtattagcccgtggaacttcccactggcgattttccttggtcaagtgaccgcagcgctcgtggcgggcaacacggtcgtagcgaaaccagcggaacaaaccagtttgatcgcggtacgtgcggtagaactcatgctacaagcgggtttcccagcgagtgttgttcaactgattcctggtcgtggtgcggatattggctcggcgctcacctctcacccatccattgcgggtgtggcgtttacgggctccaccgccacggcgcaacgcatcaacgtaactttggcacaacgtgaagccaaaccggtgccgtttatcgccgaaaccggtggtcaaaacgcgatgatcgtggacagtactgcgctgccagagcaggtggtgcgtgatgtgattcgttctgcctttgcttctgcaggtcaacgctgttcagcactgcgtgtgctgtttgttcagcaagacattgccgatcgagtgattggcttgatccaaggggcaatgaatgaactgagtgttggtgtgccgtatctacacaaaaccgatgtggggccagtgatcgacgctcgcgcgaaagaaaagctgctgcagcatatcgagcagatgaaccaaactcagaagccgattgcgcaactgacactggcggacgattgtcagcatggtgattttgtcacaccaacggcgtttgaaatctcaggtatcgatgtgcttaaagaagagcagtttggcccgatcctgcacattgtgcgtttcaaagcgtctgaactgactcgcgtggtggaacacatcaaccaaacgggtttcggtttgaccatgggtattcacagtcgtaacgaaaccacctaccgctggatcgaaaaacacgctcgagtagggaactgctacatcaaccgtgaccaagtgggtgcggtggttggcgtgcagccattcggtggtcagggcttatcggggactgggccaaaagcaggtggtccacactacttgtaccgctttacccaagtgcaatttaaccagactgagaacgcataa

SEQ ID NO: 12637 - protein, 1043 aa, Vibrio vulnificus
MFTATDVLKPEFVAQPLDKLWALISPLYMVDESQWLEQLLPLATPSAEEKQAIASRTTQLIEAIRADKKSIQLIDALLLEYSLDTHEGILLMCLAEALMRIPDAATADALIKDKMSVADWKSHLKNSESVFVNASTWGLMLTGKVVGLGDDETQSASQALNRLVNKLSEPVIRKAMYQAMKIMGHQFVRGRTIEEAQKNGRPMRDKGFTYSFDMLGEAALTTADANKYFKDYLMAIEAVGRETYGNDTSPAPSVSIKLSALHPRYEVANEHRVMSELFDTLAQLLKRAVELDVAITIDAEEADRLELSLKLFEKLYRSETVKGWGKFGLVVQAYSKRALPVLVWLNALAKEQGDLIPLRLVKGAYWDSEVKWSQQRGYDNYPVYTRKEATDVAYLACARFLLSDDVRGNIFPQFASHNAQTVSSIATMATHSDYEFQRLHGMGDSLYNHVMEQYRQPVRIYAPVGSHKDLLPYLVRRLLENGANSSFVHRLVDARCPVAELTKHPVEALTSFETLNNTKIPLPAAIFPERKNSYGVNVDIESEAKPFEAQVESFLSKQWLAGPIINGASLAESMIKDGQAESVTAPYDRRIQVGQIAFANLDHVSQAIDIAQAAFADWNRTPLVEKARCLDNLADLMEANLAELVALCHQEAGKTLHDSIDEVREAVDFCRYYAKQAQNLQPFELEGFDGVKRIASREGLGVFVCISPWNFPLAIFLGQVTAALVAGNTVVAKPAEQTSLIAVRAVELMLQAGFPASVVQLIPGRGADIGSALTSHPSIAGVAFTGSTATAQRINVTLAQREAKPVPFIAETGGQNAMIVDSTALPEQVVRDVIRSAFASAGQRCSALRVLFVQQDIADRVIGLIQGAMNELSVGVPYLHKTDVGPVIDARAKEKLLQHIEQMNQTQKPIAQLTLADDCQHGDFVTPTAFEISGIDVLKEEQFGPILHIVRFKASELTRVVEHINQTGFGLTMGIHSRNETTYRWIEKHARVGNCYINRDQVGAVVGVQPFGGQGLSGTGPKAGGPHYLYRFTQVQFNQTENA

SEQ ID NO: 12638 - DNA, 3978 bp, Ralstonia solanacearum
  CDS (1)..(3978)
atggctacgaccaccctcggggtcaagctggacgatgcttcgcgcgaacgcctcaagcgcgcagcccagtccattgaccgcacaccgcactggctgatcaagcaggcgatcttcacctatctggaccaagtggagcgggggcagctgccgaatgatgcgggcggtccggcggcggatggcctcccgtccgccgccgcagccgtcgcggacatggccgatgccgatggcaccgaggccgtggtgcaacccttcctcgaattcgcgcagagcgtgcagccgcagtcggtgctgcgcgccgccatcacggccgcctaccgccggccggaaaccgaggcgattccgatgctgctggagcaggcccgcctgccgggcgcgctggcctccgaggccaagcagctcgcccgcgaccttgccggcaagctccgtacgcaaaaggtcggcaccggccgcgaaggtctggtgcaaggtctgattcaagagttctccctgtcgagccaggagggcgtggcgctgatgtgcctggccgaggcactgctgcgcattcccgacaaggccacgcgcgatgcgctgatccgcgacaagatcagcagcggcaactggcagtcgcatctgggccagagcccgtcgttgttcgtcaacgccgccacctggggcctgctgctgacgggcaagctggtggccacgcacaacgaggccggactgtcgaaggcgctcacgcgcatcatcggcaagcgcggcgagccgctgatccgcaagggcgtcgacatggcgatgcgcctgatgggcgagcagttcgtcaccggcgagaccatttccgaagcgctggccaacgcccgcaagtacgaggccgaaggcttccgctactcctacgacatgctcggcgaagccgccatgacggaagaggatgcccagcgctacctcgcgtcgtacgagcaggccatccgcgcgatcggccaggcttcgggcgggcgcggcatctatgaggggccgggcatctcgatcaagctgtcggcgctgcacccgcgctacagccgcgcccagtacgaccgcgccatcaatgagctgtatccgcgcgtgaagggcctggccatgctggcccgcgagtacgacatcggcatcaacatcgatgcggaagaagccgaccgcctggagctgtcgctcgatctgctcgagcgcttgtgcttcgcgcccgagctggccggctggaacggcatcggcttcgtggtgcagggctaccagaagcgctgcccgttcgtgctcgactacctcatcgacctggcgcgccgcagcaagcaccgcctgatgattcgcctggtcaagggcgcctactgggacagcgagatcaagcgcgcccaggtcgacggcctggagggctatccggtctatacgcgcaaggtctacaccgacgtgtcgtacctggcctgcgcgcgcaagctgctggccgcgcccgatgtcgtgtttccgcagttcgccacgcacaacgcccatacgctggcggccatctatcacatggccgggcagaactattaccccggccagtacgaattccagtgcctgcacggcatgggcgagccgctgtacgagcaggtggtcggcaacaagccgggcaagctcaaccggccgtgccgcatctacgcgccggtcggcacgcacgagacgctgctggcctacctggtgcgccgcctgctggagaacggcgccaacacctcgttcgtcaaccgcatcgcggacgagtcgattccgctggacgaactcgtcgccgatccggtggcggtggtggagaacatgcacgccgaggaaggcgcgctcggcctgccgcatccgaaaattccgttgccgcgccatctctatggtgatgtgcgtgccaattcggcagggatcgacctggcgaacgagcatcggctggcgtcgttgtcgtctgcgctgctggccggtaccagctcggtctgggccgctgaaccgaccatcggcgatgcgccatacaccggtggcacgccgcaaccggtgcgcaacccgtcggacctgcgtgacgtggtcggccacgtgaccgaagccactgaagccgacgtcgatgccgcgctgtcggccgccgccgccgccgccccgatctggcaagccacgctgcccgaagcgcgtgccgcgctgctcgatcgcgccgccgacctgatggaaggcgagatgcagcacctgatgggcctgatcatccgcgaggcgggcaagacgctgtccaacgcgatcgccgaagtgcgcgaggcggtggacttcctgcgctactacgcggcgcaggtgcgtggcgggttctccaacgacacgcaccgcccgctgggcccggtggtctgcatcagcccgtggaacttcccgctggcgatcttcaccggccaggtgagcgcggcgctggccgccggcaacccggtgctggccaagcccgccgagcagaccccgctgatcgccgcacaggccgtgcgcatcctgcgcgaagccggcgtgccggccggcgcggtgcagctgctgccgggccgcggcgagaccgtcggggccgcactggtgaaggatgcgcgcaccaagggcgtgatgttcaccggctcgaccgaggtggcgcgcatcctgcagcgcacgctggccggccgcctggatgccaacggtgcaccgatcccgctgatcgccgagaccggcggccagaacgcgatgatcgtcgattcgtcggcgctggccgagcaggtggtggccgatgtgctgtcgtccgccttcgattccgccgggcagcgctgctcggccctgcgcgtgctgtgcctgcaggacgacgtggccgaccgcgtgctggcgatgctcaagggcggcatggccgagctggcgatgggcaatcccgatcgcctgtccaccgacgtcggcccggtgatcgacgccgaggcgcgcgacaacatcgtcggccatatcgaagggatgcgcgccaagggccggcgcgtgcaccaggcgcccgcgccggctgcctgcgcccacggcaccttcgtgccgccgacggtgatcgaactcgacagcctgtcggacctgacgcgcgagatcttcgggccggtgctgcacgtggtccgctggaagcgcacagccgacaacgccggcctcacccggctcatcgagcagatcaacggcacgggctacggcctgacgctgggcatccacacccgcatcgacgagaccattgcgcacatcgtcgagcgggcgcgggtgggcaacctgtacgtgaaccgcaatatcgtcggcgcggtggtcggcgtgcagccgttcggcggcgagggcctgtcgggcaccggcccgaaggcgggcggctcgctgtatctgctgcgcctgctgtcgacctgcccgcaggacgcgatgcgcacggcgctggagttgaccgcgggcgccggcaccgacgtcgagaccgaggagcgccgcgcgctgctggcgccgttcgacgcgctgcgtgactgggcgcgccggcagtcgcccgggctggccgcgctgtgcgaccgcctggcggcggccacggccaccggcgcggttctgacgctgccgggcccgaccggcgagcgcaacacctatatgctgctgccgcgcgacgcggtgctgtgcgtggcggccgatccggccgactggctgcgtcagctggcggccgtgctggcggtgggcagcgaggcggtcgtgcaggaaaaccctgccatcgccgaggtgctgcgtacgctgccgtcggcagtacaatcgcgcgtccggacggtggcgtcgctggaagacgcggcgttcgacgcggtgctgcaccacggcgattcggatcacctgcgcgccctgtgcgaagggctggcgcgccgtgccggtccgatcgtcggcgtgcagggcttgccgcacggcggacaggggctggcgctggagcgcctgctgatcgagcgttcgctgtcggtcaacacggccgcggcgggtggcaacgccagcctgatgaccatcggctga

SEQ ID NO: 12639 - protein, 1325 aa, Ralstonia solanacearum
MATTTLGVKLDDASRERLKRAAQSIDRTPHWLIKQAIFTYLDQVERGQLPNDAGGPAADGLPSAAAAVADMADADGTEAVVQPFLEFAQSVQPQSVLRAAITAAYRRPETEAIPMLLEQARLPGALASEAKQLARDLAGKLRTQKVGTGREGLVQGLIQEFSLSSQEGVALMCLAEALLRIPDKATRDALIRDKISSGNWQSHLGQSPSLFVNAATWGLLLTGKLVATHNEAGLSKALTRIIGKRGEPLIRKGVDMAMRLMGEQFVTGETISEALANARKYEAEGFRYSYDMLGEAAMTEEDAQRYLASYEQAIRAIGQASGGRGIYEGPGISIKLSALHPRYSRAQYDRAINELYPRVKGLAMLAREYDIGINIDAEEADRLELSLDLLERLCFAPELAGWNGIGFVVQGYQKRCPFVLDYLIDLARRSKHRLMIRLVKGAYWDSEIKRAQVDGLEGYPVYTRKVYTDVSYLACARKLLAAPDVVFPQFATHNAHTLAAIYHMAGQNYYPGQYEFQCLHGMGEPLYEQVVGNKPGKLNRPCRIYAPVGTHETLLAYLVRRLLENGANTSFVNRIADESIPLDELVADPVAVVENMHAEEGALGLPHPKIPLPRHLYGDVRANSAGIDLANEHRLASLSSALLAGTSSVWAAEPTIGDAPYTGGTPQPVRNPSDLRDVVGHVTEATEADVDAALSAAAAAAPIWQATLPEARAALLDRAADLMEGEMQHLMGLIIREAGKTLSNAIAEVREAVDFLRYYAAQVRGGFSNDTHRPLGPVVCISPWNFPLAIFTGQVSAALAAGNPVLAKPAEQTPLIAAQAVRILREAGVPAGAVQLLPGRGETVGAALVKDARTKGVMFTGSTEVARILQRTLAGRLDANGAPIPLIAETGGQNAMIVDSSALAEQVVADVLSSAFDSAGQRCSALRVLCLQDDVADRVLAMLKGGMAELAMGNPDRLSTDVGPVIDAEARDNIVGHIEGMRAKGRRVHQAPAPAACAHGTFVPPTVIELDSLSDLTREIFGPVLHVVRWKRTADNAGLTRLIEQINGTGYGLTLGIHTRIDETIAHIVERARVGNLYVNRNIVGAVVGVQPFGGEGLSGTGPKAGGSLYLLRLLSTCPQDAMRTALELTAGAGTDVETEERRALLAPFDALRDWARRQSPGLAALCDRLAAATATGAVLTLPGPTGERNTYMLLPRDAVLCVAADPADWLRQLAAVLAVGSEAVVQENPAIAEVLRTLPSAVQSRVRTVASLEDAAFDAVLHHGDSDHLRALCEGLARRAGPIVGVQGLPHGGQGLALERLLIERSLSVNTAAAGGNASLMTIG

SEQ ID NO: 12640 - DNA, 1653 bp, Ustilago maydis
  CDS (55)..(1548)
ccttctattcaccagagtatccacattcgcccacacccatacccacttttcagcatgccaactctcaacctcgatctgcctaacggcatcaagtcgaccatccaggctgacttgttcatcaacaacaagtttgtgcccgctcttgacggcaagacttttgcgaccatcaacccttccaccggtaaggagattggtcaggtcgccgaggcttccgccaaggacgttgatctcgctgtcaaggctgcgcgcgaggcattcgagactacttggggcgagaacacacccggtgacgctcgtggcagacttctgatcaagctcgccgagctggtcgaggccaacattgacgagcttgctgccatcgagtcgctcgacaacggcaaggccttctcgatcgctaaaagctttgacgtcgctgccgtcgctgccaacttgcgatactatggtggctgggccgacaagaaccacggcaaggtcatggaggtcgacaccaagcgcctcaactacacgcgccacgagcccatcggcgtgtgtggtcagatcatcccttggaacttccccttgctcatgttcgcctggaagctcggccctgcgctcgccacaggtaacacgatcgtcctcaaaaccgccgagcagacaccactgtcagccatcaagatgtgtgagcttatcgtcgaggccggcttcccgcctggtgtggtcaacgtcatttccggtttcggtcccgtcgccggtgccgccatctcacagcacatggacattgacaagatcgccttcaccggctcaacactggtgggccgcaacattatgaaggctgctgcttcgaccaacctgaagaaggtgacgctcgagctcggcggcaagtcgcccaacattatctttaaggacgccgacctggaccaggcggttcgatggtcggcgttcggtatcatgttcaatcacggacaatgctgctgtgcgggctcgcgtgtctatgtggaggaatcgatctatgacgctttcatggagaagatgactgcccactgcaaggcgctccaggtgggtgaccccttttccgccaacacgttccaaggtcctcaggtttcgcagctccagtacgaccgtatcatggagtacatcgagtccggcaagaaggacgctaaccttgcgctcggtggtgtgcgcaagggtaacgaaggctactttatcgagcctaccatcttcaccgacgttcctcacgatgccaagattgccaaggaggagatcttcggccctgtcgtggtcgtctccaagttcaaagatgaaaaggacctcattcgcatcgccaacgactcgatctacggcctcgctgccgctgtcttcagccgcgacatcagccgtgccatcgagactgcccacaagctcaaggccggcaccgtctgggtcaactgctacaaccagctcatccctcaggttccgttcggcggttacaaggcgtccggtatcggtcgagagctcggcgagtatgcgctcagcaactacacaaacatcaaggcggtgcatgtgaacctcagccagcctgcccctatctaaacgaaaggcacgcaagctaatgaaagcgaaatcacacgtctctacttctgtcctgtttcttgtacctttattcccggtgattcgaatatcatcgtgctgtttttg

SEQ ID NO: 12641 - protein, 497 aa, Ustilago maydis
MPTLNLDLPNGIKSTIQADLFINNKFVPALDGKTFATINPSTGKEIGQVAEASAKDVDLAVKAAREAFETTWGENTPGDARGRLLIKLAELVEANIDELAAIESLDNGKAFSIAKSFDVAAVAANLRYYGGWADKNHGKVMEVDTKRLNYTRHEPIGVCGQIIPWNFPLLMFAWKLGPALATGNTIVLKTAEQTPLSAIKMCELIVEAGFPPGVVNVISGFGPVAGAAISQHMDIDKIAFTGSTLVGRNIMKAAASTNLKKVTLELGGKSPNIIFKDADLDQAVRWSAFGIMFNHGQCCCAGSRVYVEESIYDAFMEKMTAHCKALQVGDPFSANTFQGPQVSQLQYDRIMEYIESGKKDANLALGGVRKGNEGYFIEPTIFTDVPHDAKIAKEEIFGPVVVVSKFKDEKDLIRIANDSIYGLAAAVFSRDISRAIETAHKLKAGTVWVNCYNQLIPQVPFGGYKASGIGRELGEYALSNYTNIKAVHVNLSQPAPI

SEQ ID NO: 12642 - DNA, 3702 bp, Rhizobium meliloti
  CDS (1)..(3702)
atgagcccgaacccgcttcagaaacccgcgatcgacgccgcacctgcgcccttcgccgacttcgcaccgccagtccggccgcaaagcacgctgcgccgggcgatcacggccgcttaccgccgcccggaaacggaatgcctgccgcctctcgtcgaggcggccacgcaatcgaaggaaatacgggacgccgccgcaagcaccgcccgcaagctgatcgaggcgctgcgcggcaagcatagtggttccggcgtcgagggactggtgcaggaatattcgctttcgagccaggaaggcgtggcactcatgtgccttgcggaagcgctgctgcgcattcccgatacggcgacgcgcgacgcgctgatccgcgacaagattgccgacggcaactggaaatcgcatctcggcggcagccgttcgctcttcgtcaatgccgcgacctggggacttgtggtcaccggcaagctgacctcgacggtcaacgaccgcagcctcgcggcggcgctcacgcgtctcatctcgcgttgcggcgagccggtgatccggcgcggcgtcgacatggccatgcggatgatgggcgaacagttcgtcaccggcgagacgatccgcgaagcgctgaaacgttctaaggagctcgaggagaaaggcttcagctactcctacgacatgctcggcgaagcggcgaccacggccgccgacgccgaacgctattacagggactatgagagcgccattcacgcaatcggcaaagcctccgccggccgcggcatctatgagggcccgggcatctccatcaagctctcggcgctgcatccccgctatagccgcgcgcaagccgcgcgcgtcatgggcgaattgttgccgagggtgaaggcgctcgctctcctcgccaagaattacgatatcggcctcaacatcgacgccgaggaagccgaccggctggaactgtcgctcgatctcctcgaggtgctctgcctcgacggcgatctctccggctggaacggcatgggcttcgtcgtgcaggcctatggcaaacgctgccccttcgttctcgacttcatcatcgatcttgcccggcgctccggccggcgcatcatggtgcggctggtgaagggtgcctattgggatgccgagatcaagcgggcgcagctcgacgggctcgcggatttcccggtcttcacgcgcaagatccacaccgacgtctcctatatcgcctgcgcagccaagctgcttgccgcgaccgatgtggtgttcccgcaattcgcgacacacaatgcccagacgctcgccgccatctaccacatggccggcaaggactttcacgtgggcaaatacgaattccagtgcctgcacggcatgggcgagccgctttatgaagaggtcgtcggccgcggcaagctcgatcgcccctgccgcatctatgcgcctgtcggcacccatgagacgctgcttgcctatctggtccggcgcctcctcgaaaacggcgccaactcctccttcgtgcatcgcatcaacgacccgaaggtttcgatcgacgaactgatcgccgaccccgtcgaagtcgtccgcgccatgccggtcgtcggcgccaagcacgacaggatcgccttgccggccgaactcttcggcgatgcgcggaccaattccgccgggctcgatctttccaacgaggaaacgcttgcgtcgcttacggaagcgctgagggaaagcgcggcaatgaagtggaccgccctgccgcagctcgcaaccggccccgctgccggcgagacgcggacggttctgaaccccggcgaccatcgtgacgtcgtcggctcggtgaccgagacctcggaagaggacgcacggcgcgccgtgcgccttgccgccgacgcggcgccggattgggcggccgtgccgccctccgagcgggccgcctgcctcgaccgcgccgccgagctgatgcaggcccgcatgcccacgcttctcgggctgatcatccgcgaggcgggcaaatcggcgctgaacgccattgccgaggtgcgcgaggcgatcgatttcctgcgctactatgccgaacagacgcgccgcacgctcggccccggccacgggccgctcggcccgatcgtctgcatcagcccatggaatttcccgctggcaatcttcaccgggcagatcgccgccgcactcgtcgccggcaatcccgtgctcgccaaacccgcggaagagacgccgctgatcgccgccgagggcgtgcgcatcctgcgtgaggccggcattccggcaagcgcgctgcagcttcttccgggcgacggacgcgtcggtgcggcgctggtcgccgcggccgagaccgcgggcgtgatgttcaccggatcgacggaagtcgcgcggctgatccaggcacagcttgccgaccgcctttcgcccgccggccggccgatcccgctgatcgccgaaaccggtggccagaatgcgatgatcgtcgactcctcggcgcttgccgagcaggtggtcggcgacgtgatcacctccgccttcgacagtgccggccagcgctgctcggcactgcgtgtgctgtgcctgcaggaggatgtggccgaccgcatcctgacgatgctgaagggcgcgctgcacgaactgcatatcggccgcaccgatcgtctttccgtggatgtcggcccggtcatcacatcagaggcgaaggacaacatcgagaagcacatagagcggatgcgcgggctcggccgcaaggtcgagcagatcgggctcgcctcggagaccggagtgggcaccttcgtgccgccgacgatcatcgaactcgagaagctttccgatcttcaacgcgaggtcttcgggccggtgctgcacgtcatccgctaccggcgcgacgatctcgaccggctggtggacgacgtcaacgccaccggctacggcctgaccttcgggctccacacgcgcctcgacgagacgatcgcgcatgtgacgagccgtatcaaggcgggcaacctctacatcaaccgcaacatcatcggcgcggtcgtcggcgtccagcccttcggcggccgcggtctttccggtaccggtcccaaggccggcggtccgctttatctcggccgcctggttacgaccgcaccggtgccgccgcagcacagctcggtgcacacggacccggtccttctcgacttcgccaaatggctcgacggcaaaggcgcgcgcgcggaggccgaagcggcccgcaacgccggcagcagctcggcacttggcctggatctggaactccccggccccgtcggcgaacgcaatctctatacgctccatgcgcgcggccgcatcctcctcgtgccggcgacggagagcggtctataccaccagctcgccgctgcgctcgcgaccggcaacagcgtcgcgatcgatgccgcctccggtctgcaggcttcgctgaagaacctgccgcagaccgtcggcctgcgtgtctcctggtccaaggactgggccgccgacggcccgttcgccggtgcgctggtcgaaggtgacgccgagcgcatccgcgcggtcaacaaggctatcgccgccctgcccggcccgctgctgctcgtgcaggccgcatcgagcggggagatcgcccgcaacccggacgcctattgcctgaactggctcgtggaagaggtttccgcctcgatcaacacggctgcagccggcggcaatgccagcctgatggcgatcggctga

SEQ ID NO: 12643 - protein, 1233 aa, Rhizobium meliloti
MSPNPLQKPAIDAAPAPFADFAPPVRPQSTLRRAITAAYRRPETECLPPLVEAATQSKEIRDAAASTARKLIEALRGKHSGSGVEGLVQEYSLSSQEGVALMCLAEALLRIPDTATRDALIRDKIADGNWKSHLGGSRSLFVNAATWGLVVTGKLTSTVNDRSLAAALTRLISRCGEPVIRRGVDMAMRMMGEQFVTGETIREALKRSKELEEKGFSYSYDMLGEAATTAADAERYYRDYESAIHAIGKASAGRGIYEGPGISIKLSALHPRYSRAQAARVMGELLPRVKALALLAKNYDIGLNIDAEEADRLELSLDLLEVLCLDGDLSGWNGMGFVVQAYGKRCPFVLDFIIDLARRSGRRIMVRLVKGAYWDAEIKRAQLDGLADFPVFTRKIHTDVSYIACAAKLLAATDVVFPQFATHNAQTLAAIYHMAGKDFHVGKYEFQCLHGMGEPLYEEVVGRGKLDRPCRIYAPVGTHETLLAYLVRRLLENGANSSFVHRINDPKVSIDELIADPVEVVRAMPVVGAKHDRIALPAELFGDARTNSAGLDLSNEETLASLTEALRESAAMKWTALPQLATGPAAGETRTVLNPGDHRDVVGSVTETSEEDARRAVRLAADAAPDWAAVPPSERAACLDRAAELMQARMPTLLGLIIREAGKSALNAIAEVREAIDFLRYYAEQTRRTLGPGHGPLGPIVCISPWNFPLAIFTGQIAAALVAGNPVLAKPAEETPLIAAEGVRILREAGIPASALQLLPGDGRVGAALVAAAETAGVMFTGSTEVARLIQAQLADRLSPAGRPIPLIAETGGQNAMIVDSSALAEQVVGDVITSAFDSAGQRCSALRVLCLQEDVADRILTMLKGALHELHIGRTDRLSVDVGPVITSEAKDNIEKHIERMRGLGRKVEQIGLASETGVGTFVPPTIIELEKLSDLQREVFGPVLHVIRYRRDDLDRLVDDVNATGYGLTFGLHTRLDETIAHVTSRIKAGNLYINRNIIGAVVGVQPFGGRGLSGTGPKAGGPLYLGRLVTTAPVPPQHSSVHTDPVLLDFAKWLDGKGARAEAEAARNAGSSSALGLDLELPGPVGERNLYTLHARGRILLVPATESGLYHQLAAALATGNSVAIDAASGLQASLKNLPQTVGLRVSWSKDWAADGPFAGALVEGDAERIRAVNKAIAALPGPLLLVQAASSGEIARNPDAYCLNWLVEEVSASINTAAAGGNASLMAIG

SEQ ID NO: 12644 - DNA, 3801 bp, Burkholderia cepacia
  CDS (1)..(3801)
atgcagatctcccagaaacactcgacagtcatggacattcactcaaagttcgatccggcatcgcgattccgcgggttcgccagcggacagccagccgcatccgagcttcgcgaacgcatcaccgcggcctgtcgaacggcggaacctgtagccgtctcagccttgcttgccatggcaaagatggagcctgaagtcgcgcgcaaggccaaccaactgtccatgcaaatagcgcagcgtctgcgtgagcgcaagaactccgcgggtcgtgcgggaatcgtgcagggcctgctgcaggagtacgcactctcttcacaggagggcgttgcgctgatgtgcctcgcggaagcactcttgcggattcccgacatggcgacgcgcgacgcgctgatcagggacaagatcgcgcgtggacattggcaggagcacgcaggccggagcccctcgttgttcatcaatgccgcaacgtgggggctgtttctgaccgggaaacttgtctccacctacagcgagtcgtcgctgtcgaccttgctcacgcggctcatcgccaagggcggcgaaccgctcattcgcaagggtgtcgacatggcgatgcggatgatgggcgagcagttcgtcaccggagaaaccatcaaggaggcgctggaccacgcgcgaggcctggaggcgcaaggtttccgctattcatacgacatgctcggcgaggcggcgatgacggccgaagacgcagaccgctaccgccagtcctacgagcgagccattcatgccatcggcgaggcatcgaacggccgaggcgtctacgagggacccggcatctcgatcaagctctcagcgctgcatccgcgttacagccgcgcgcagtacggccgagtcatggacgaactctatcccgtggtgcgcagtcttgcgctgctggctcgacgttacgacatcggtctcaacatcgacgccgaggaagccgatcgccttgaactgtcgctcgacttgctggagaagctttgcttcgaacccgccctcgcagggtggaatggcatcggcttggtgatccaggcttaccaaaagcgttgcctcttcgtgatcgaccatgtgattgaactcgcgcaacgcagccgtcatcggctgatgatccggctcgtcaagggagcctactgggacagcgagatcaagcgtgcccaggtggaggggcaggacggctttccagtttatacgcgcaaggtctacaccgacgtttcgtacctggcctgcgcgcgcaagctgctggttgctcccgcagagatctatccgcagttcgccacgcacaacgcgcacaccatggcagcgatctacaacctggcggagcccgcgacctaccagcctggtcagtatgaatttcaatgcctgcacggcatgggtgagccgctgtacgagcaggtggtcggaagcctggcggatggcaagctggggcgtccgtgccgcatctacgcacccgtgggtacacacgagacgctgttggcctacctggtgcgccggctgctcgagaacggggccaacacgtcgttcgtcaaccgcatcgccgacccgtcgattccacttgaagcgctggtggaggatcccgtcgcggccgtggagcgcatggcccaggaagagggcgaagcggggcggccgcatccttgcatcccgagcccgagcgcactctacggccaggcgcgacgcaattctcatgggctggatttgtccaacgagcagaccctgcgggggctggagccaatcctggtggacagcgcacgaacaggatggacggctgaaccgctgctcggagaatctgccgaagccgaacccacagcctggaagccggtactcaatccagccgaccatcgtgacgtggtcggaaaggtgcgcgcagccagcgagcaacaaatcgaagccgcgcttcgttcggcgacggggttcgcgccgcagtgggccgcgacgtccgccggcgatagggctttcgtactcgagcgcgccgccgacctgttgcaggaccagcttccgtatctgctggggttgctctgccgcgaagcgggaaaatcctatgccaacggtgtcgccgaagtgcgtgaggcgatcgactttctgcgcttctacgcagcacacgcacgcacggacttcgacgatccggcgcataagccgttgggacccgtggtttgcatcagcccctggaacttcccactggccatcttcgtgggccaagtctccgcggcgctggctgccggcaaccccgtcctggcgaagcccgcggagcagacatcgttgattgcggctgaggccacacggctgatgcacacggccggcgtcccgcgtgcggcgcttcaattgatcccgggccgcggctcggtcgttggggcacggatggtcgcggatgcccgggttcaaggcgtcatgttcacaggctcgacggcagtggctcgtcagctgcagcgaacgatggccgaacgactgggtccgacgggggcgccggttccgctcattgccgagacaggcgggcagaacgcaatgatcgtggactcctctgcattggtcgagcaggtcgtggcggatgtcatggcgtccgcgttcgacagtgcaggccagcgctgctccgcccttcgggttctatgtgtgcaggacgacgttgcggatcgcttgcttcatatgcttcgtggcgcgatggctgagtccaatgtcggcgacccgtcctccctgtgcaccgacgtgggacccgtgatcgaccttgcagcacgcacgacgatcgagtcccatatcgaactcatgcagagtcgcggccgtcgagtcaaccgcgcggggcgtgcagcgcacgaagtccttgaaggtggaacattcgtcctgccgacgatgattgaactggagagcatctccgagcttgagcgggaagtgttcgggcctgtactgcacgtcgtgcgatatgccaggcaggacctggacacgatgctggcgcagatcagcgcaaccggctatgggctgacgatgggcattcactcgcgcattgacgagaccatcggccgtgtggtctccagtgccaaggtcggcaacgtttatgtgaaccggaacatggtcggggcagtcgtgggtgtgcagcccttcggcggcgagggcctgtcgggcacggggccaaaggctggagggcccctctatatgtacaggcttctcgctgaaagtccgcacgatgtgctcgtgcgcgcagccgagcggggattgccaggctctgttgctgacggcagcgtgacgcaagcatcggagccgttcgaggcactgctctcctggattgagacgcatcgggaacgacctttgaccgcccgatgccggcttctcaagcggaccgccggatccgggcagatgcgcgtgctggtcgggcccaccggagagcgaaacacgtactccttgcagcctcgagttgctgcactgtgcctggctgaagacgaggactcattgttgtttcagttggctggcgcgctcgttgtgggctgccgtgccatctggccatcgaacaccgatacccaggcgctgcgagccaccttgccgttggacgttcaagcggagatcgctctcgcgcgggactgggcagcgccgaccgtggaattcgatgtcgcgctctatcaaggcagccgtgagggcctcctggcggcttcggcccggctggccgagcgccaggggccgataaccagcctgtggcggttcccgacggacagcggcaaggtgccgctggaagccctggttgtggagcaggccgtgagcacgaacacggctgccgcgggcggcaacgcaagcctgatgacgatttcttga

SEQ ID NO: 12645 - protein, 1266 aa, Burkholderia cepacia
MQISQKHSTVMDIHSKFDPASRFRGFASGQPAASELRERITAACRTAEPVAVSALLAMAKMEPEVARKANQLSMQIAQRLRERKNSAGRAGIVQGLLQEYALSSQEGVALMCLAEALLRIPDMATRDALIRDKIARGHWQEHAGRSPSLFINAATWGLFLTGKLVSTYSESSLSTLLTRLIAKGGEPLIRKGVDMAMRMMGEQFVTGETIKEALDHARGLEAQGFRYSYDMLGEAAMTAEDADRYRQSYERAIHAIGEASNGRGVYEGPGISIKLSALHPRYSRAQYGRVMDELYPVVRSLALLARRYDIGLNIDAEEADRLELSLDLLEKLCFEPALAGWNGIGLVIQAYQKRCLFVIDHVIELAQRSRHRLMIRLVKGAYWDSEIKRAQVEGQDGFPVYTRKVYTDVSYLACARKLLVAPAEIYPQFATHNAHTMAAIYNLAEPATYQPGQYEFQCLHGMGEPLYEQVVGSLADGKLGRPCRIYAPVGTHETLLAYLVRRLLENGANTSFVNRIADPSIPLEALVEDPVAAVERMAQEEGEAGRPHPCIPSPSALYGQARRNSHGLDLSNEQTLRGLEPILVDSARTGWTAEPLLGESAEAEPTAWKPVLNPADHRDVVGKVRAASEQQIEAALRSATGFAPQWAATSAGDRAFVLERAADLLQDQLPYLLGLLCREAGKSYANGVAEVREAIDFLRFYAAHARTDFDDPAHKPLGPVVCISPWNFPLAIFVGQVSAALAAGNPVLAKPAEQTSLIAAEATRLMHTAGVPRAALQLIPGRGSVVGARMVADARVQGVMFTGSTAVARQLQRTMAERLGPTGAPVPLIAETGGQNAMIVDSSALVEQVVADVMASAFDSAGQRCSALRVLCVQDDVADRLLHMLRGAMAESNVGDPSSLCTDVGPVIDLAARTTIESHIELMQSRGRRVNRAGRAAHEVLEGGTFVLPTMIELESISELEREVFGPVLHVVRYARQDLDTMLAQISATGYGLTMGIHSRIDETIGRVVSSAKVGNVYVNRNMVGAVVGVQPFGGEGLSGTGPKAGGPLYMYRLLAESPHDVLVRAAERGLPGSVADGSVTQASEPFEALLSWIETHRERPLTARCRLLKRTAGSGQMRVLVGPTGERNTYSLQPRVAALCLAEDEDSLLFQLAGALVVGCRAIWPSNTDTQALRATLPLDVQAEIALARDWAAPTVEFDVALYQGSREGLLAASARLAERQGPITSLWRFPTDSGKVPLEALVVEQAVSTNTAAAGGNASLMTIS

SEQ ID NO: 12646 - DNA, 1808 bp, Pisum sativum
  CDS (126)..(1637)
tagagaataacactttatcttagctcagttgagtgaacaatttcagcaactttcaaggtgagatctgatctatctatctccatatccatcaaatcaataatagattggagagagaaagtactagaatggatattccgatcccaactcgtcagttgttcattaacggcgactggaaagctcccgtccttaacaaacggattcccgtcatcaatcccgccacccaaaacatcatcggcgatatccctgccgctactaaggaagacgtcgacgtcgccgtcgccgccgctaaaactgctctcacgcgtaacaaaggcgctgattgggctaccgcttctggcgctgttcgtgcacgctatctacgcgccattgccgctaaggttactgagaaaaagcctgaactagcgaagcttgagtctattgattgtggaaaaccactcgatgaagccgcgtgggacattgatgatgttgctggttgctttgagtattatgctgatcttgctgaaaaattggatgcaagacaaaaggctccggtgtctcttccaatggatacattcaagagtcatgtgcttagggaacctattggtgttgttggattgataactccatggaattatcctatgttgatggctacgtggaaggttgctcctgctcttgctgcgggctgtgctgcaatattgaagccgtctgaattggcatctctaacctgcttggagttaggcgaaatatgcaaagaagttggtcttcctcgtagtgttttaaatattgtcaccggattaggccatgaagccggtgctcctttggcatctcatcctgatgtagataagatttcttttactggtagctctgcaactgggagcaagattatgacaactgcagctcagctcgttaagcctgtttcactggagcttggtggaaaaagcccattagttgtttttgaggatgttgaccttgataaggctgctgaatgggccatctttggctgcttctggacaaatggtcagatatgcagtgcaacttcccgtcttattttacatgaaagtatagcaacagagtttttgaataggattgtcaaatggatcaaaaacatcaaaatttcagatcccttggaagaaggttgcagactaggacctgttgttagtgaaggacagtatgaaaaaatattgaagtttgtctcaaatgctaagagcgagggtgcaaccattttgactggtgggtctcgaccagagcatctaaagaaaggattctttattgaaccaaccatcataaccgacgtgactactaacatgcaaatttggagagaagaagtatttggacctgtcctctgtgtaaaaacatttagcactgaagaagaagctattgatctagcaaatgacactgtctatggcttaggtgctgctgtaatatcaaatgatctagaaagatgtgaacgcgttactaaggcttttaaggccggaattgtatgggtcaattgctctcaaccatgcttcactcaagctccatggggaggcgtcaaacgtagtggttttggccgtgaactaggagaatggggacttgacaattacttgagcgtgaagcaagtgactcagtatatctctgaggaaccatggggctggtaccagcctcctgcaaaactgtgataggcatctaaaaattcacacgagaataagggttgggtcataccaaattatggccgatcttgaaatgagaaggcatataaagtcttgtaaaacagtgtaactggttgtactcaagtttatgcttgtagtgtttttatttgacttggttttaaaaaaaaaaaaaaaaaaaaa

SEQ ID NO: 12647 - protein, 503 aa, Pisum sativum
MDIPIPTRQLFINGDWKAPVLNKRIPVINPATQNIIGDIPAATKEDVDVAVAAAKTALTRNKGADWATASGAVRARYLRAIAAKVTEKKPELAKLESIDCGKPLDEAAWDIDDVAGCFEYYADLAEKLDARQKAPVSLPMDTFKSHVLREPIGVVGLITPWNYPMLMATWKVAPALAAGCAAILKPSELASLTCLELGEICKEVGLPRSVLNIVTGLGHEAGAPLASHPDVDKISFTGSSATGSKIMTTAAQLVKPVSLELGGKSPLVVFEDVDLDKAAEWAIFGCFWTNGQICSATSRLILHESIATEFLNRIVKWIKNIKISDPLEEGCRLGPVVSEGQYEKILKFVSNAKSEGATILTGGSRPEHLKKGFFIEPTIITDVTTNMQIWREEVFGPVLCVKTFSTEEEAIDLANDTVYGLGAAVISNDLERCERVTKAFKAGIVWVNCSQPCFTQAPWGGVKRSGFGRELGEWGLDNYLSVKQVTQYISEEPWGWYQPPAKL

SEQ ID NO: 12648 - DNA, 1866 bp, Arabidopsis thaliana
  CDS (76)..(1680)
ataaacagagttctcacaccaatacaaaagagaccatcaccgtgagaaagagaagaagaacaaaaaaagttagccatggcatcaagaagagtttcttcgctgctctctcgctctttcatgtcctcctcacgttctatcttctctcttagaggcatgaacagaggagctcaaagatacagtaacctcgctgctgctgtcgaaaacactattactccaccagtgaaagttgaacacacacagcttctaatcggtggaagattcgttgatgcagtgtcaggaaaaactttccctactttggatccaagaaatggagaagtgattgctcaagtgtctgaaggtgatgcagaagacgtgaaccgcgcggttgcagctgcacgaaaggcttttgatgaaggaccatggcctaaaatgacagcttatgagagatcaaagatactgtttcgtttcgctgatttaatcgagaaacataatgatgagattgctgctcttgagacttgggataatgggaaaccttatgaacaatctgctcaaattgaagtaccaatgcttgctagggtgttccggtactatgctggttgggcagacaagatacatggaatgacaatgccaggagatggtccacaccatgtgcagaccttacatgagcctataggagtcgctggacaaatcatcccatggaacttccctcttctcatgctttcttggaaacttggaccagctttagcttgcggtaacaccgttgttctcaaaactgctgagcaaactcctctatctgctcttcttgttgggaaactacttcatgaggctggacttcctgatggagttgtgaatatagtttctggatttggggctactgctggtgcagctatagctagtcacatggacgttgataaggttgctttcaccgggtctactgatgttgggaagattattcttgagttagcttcaaaaagcaaccttaaggcagtgactcttgagcttggaggaaagtcaccattcattgtatgtgaagatgctgatgtggatcaggccgttgagcttgcacatttcgctttgttctttaaccagggacaatgttgttgtgctggttcgcgtacatttgtacatgaacgtgtgtatgatgagtttgtagagaaagctaaagctcgtgcactcaagcgaaatgttggagatcccttcaagtcaggcattgagcaaggtccccaggtagactcagagcaattcaacaaaatcctgaagtacatcaaacatggagttgaggctggagccacattacaagctggaggtgacaggcttggttccaagggttactacattcaacctactgtcttctcagatgtgaaagatgacatgctcatagcaacagacgagattttcgggccggttcaaaccatactgaaattcaaggatcttgatgaggtgattgcaagggccaacaactcaaggtacggtttagctgctggagtgttcacacagaatcttgacacagcacaccggctgatgcgagcactcagagttgggactgtttggatcaactgttttgatgtacttgatgcatcaattccatttggagggtataagatgagtggcattggtagagagaaaggtatctacagtctcaacaattacttgcaagtcaaggctgttgttacttccctcaagaaccctgcctggctctaaaccataccaggtggttacacttatttctcgagtttggtttatgatttgcacttttgctttgaaaacctggagttgtactgtgtctctaggatttctagattttgagagtaatttatcttcaatacattttgcaaataaagctacatgacaatgtgtgattaataaacacaaactcttattagtttc

SEQ ID NO: 12649 - protein, 534 aa, Arabidopsis thaliana
MASRRVSSLLSRSFMSSSRSIFSLRGMNRGAQRYSNLAAAVENTITPPVKVEHTQLLIGGRFVDAVSGKTFPTLDPRNGEVIAQVSEGDAEDVNRAVAAARKAFDEGPWPKMTAYERSKILFRFADLIEKHNDEIAALETWDNGKPYEQSAQIEVPMLARVFRYYAGWADKIHGMTMPGDGPHHVQTLHEPIGVAGQIIPWNFPLLMLSWKLGPALACGNTVVLKTAEQTPLSALLVGKLLHEAGLPDGVVNIVSGFGATAGAAIASHMDVDKVAFTGSTDVGKIILELASKSNLKAVTLELGGKSPFIVCEDADVDQAVELAHFALFFNQGQCCCAGSRTFVHERVYDEFVEKAKARALKRNVGDPFKSGIEQGPQVDSEQFNKILKYIKHGVEAGATLQAGGDRLGSKGYYIQPTVFSDVKDDMLIATDEIFGPVQTILKFKDLDEVIARANNSRYGLAAGVFTQNLDTAHRLMRALRVGTVWINCFDVLDASIPFGGYKMSGIGREKGIYSLNNYLQVKAVVTSLKNPAWL

SEQ ID NO: 12650 - DNA, 1746 bp, Drosophila melanogaster
  CDS (1)..(1746)
atgcttaagctgggactcgcggtccccactcgatggtccttcagatgtcgtcgccttggtggaatggctatcattaaaggcgagacaaaaatctccgtggacaagcagaaagcagtccagccggaacaggatgaggaccaacaagaggtcgagccggattcccagccggcggaagaaaatccaagtattcacaggaaccagagagtattagttaatcatgccattcaggagattcagcacaggccgttggaggtgcccacaattatcggcgatgatacagtgtacaccatggacactcagcgtgtttgctgcccgcatcacctgcagacgaacttggctcacgtctactacgccaatcgcaagcaaatcgaggcggcaattaagtctgctctttcggcgcaaggaacttggagtctagttcccatcgcccagcgactggccatttggcgacgtgccgccaccattatcgaggaggacgagctgcggctgagagtgttcctcatgatgacgctgagcaaaaccgccgacgatgcgacgcgggacattcggcggctactcacatcgctgagggccaatgctgactatttggagcatctgtccgagctgcgctttgagatccagggtgatatgaatgtattccccagctttcatttgcgacccatggatggatttgtggccgcactggcaccatttgaatcggtggccttgtcatccagcttggccctctgtccggcgctcatgggcaacacggtgttgtggaatccctcattggaagtggcaccagtgagctatttaattttcagagccttccaggaggcgggtttgcccagcggcgttatcaactttgtgccggccaacgagcgtctgttcttggacaccatcacggatgccgtgcactttgccggactgaatactcaagcgagtgcagctttttacaggcatgtgcacaagctggtgagcgatcgaatggagcgatacatctgttttcctcgtctggtggccgagtgcccgggtcagaactttcattttgtccatgccagcgctaaggtggaatctgtcgtctcagccaccgtgcaggcggcctttggctttgccggacagtatgccaactcgctctcccggatgtatgtgccctcgtcaatgtggccacgcctcagggaggagttggtggaggccacggagcaactgaccatcggagaccccatcgaatcggaaacggatataggagcgatggtgcatataaatgacttccggcggatgcagaaactactgcagcgcaccaagaacatggagcagttgtgcggaggcagctgtgatgacagcactggtagattcgttgatccaacgattgtccgggtgtcggatccattggatccactgctgtgtgagccctgctgcggaccgttcttgccggtgttcgtctattcggacgattccttcagtgaggctctcaagcttgccgccaatcagtccagatacgcgctctccggctccatattcgcaagtcaggatgaggttatccttcactgcctgaaccaactgcgaatgtccgctagtaatctctacgtgaatgagcgatgcacgggtagcacgtacgggctgactccctttggtggaaatcggttgtccgggacaaacgataaatccggatctgcctacttcctaatgcgctggagctcgccgctgctcatcgaggagactgttgatggtccacctcccatgcgtggatcaaatacgtttccctga

SEQ ID NO: 12651 - protein, 581 aa, Drosophila melanogaster
MLKLGLAVPTRWSFRCRRLGGMAIIKGETKISVDKQKAVQPEQDEDQQEVEPDSQPAEENPSIHRNQRVLVNHAIQEIQHRPLEVPTIIGDDTVYTMDTQRVCCPHHLQTNLAHVYYANRKQIEAAIKSALSAQGTWSLVPIAQRLAIWRRAATIIEEDELRLRVFLMMTLSKTADDATRDIRRLLTSLRANADYLEHLSELRFEIQGDMNVFPSFHLRPMDGFVAALAPFESVALSSSLALCPALMGNTVLWNPSLEVAPVSYLIFRAFQEAGLPSGVINFVPANERLFLDTITDAVHFAGLNTQASAAFYRHVHKLVSDRMERYICFPRLVAECPGQNFHFVHASAKVESVVSATVQAAFGFAGQYANSLSRMYVPSSMWPRLREELVEATEQLTIGDPIESETDIGAMVHINDFRRMQKLLQRTKNMEQLCGGSCDDSTGRFVDPTIVRVSDPLDPLLCEPCCGPFLPVFVYSDDSFSEALKLAANQSRYALSGSIFASQDEVILHCLNQLRMSASNLYVNERCTGSTYGLTPFGGNRLSGTNDKSGSAYFLMRWSSPLLIEETVDGPPPMRGSNTFP

SEQ ID NO: 12652 - DNA, 1482 bp, Thermoplasma volcanium
  CDS (1)..(1482)
atggatggaaaactgtacatagatggacaatgggttgattcgtccaatggtgatactttaacgaaatacaacccggttactggcgaagtcattgggaaatttgcagcagcatcaagggatgatgttgatagagcatttgatgcagccgaggacgccttccaaaagtggatggatcttgggtcagtcgagcgttcaaaaatcatatacaaagcgaaggagctcatagaggaaaaccggaaggaacttgaaaatataataatacaagagaatggaaaacctgttaaagaagccgctgaagaagtcgatggtgtgctcgatcaaatgcaatactatgcggaatgggccagaaagctgaacggagaggtcgttgaagggactactaaccaccgcaagatattccaatataaagtcccgtacggtactgtagttgcccttactccgtggaatttcccagcaggtatggttgcgaggaagcttgctccggcactcctcacaggcaatacggtcatattgaagccaagcagtgatacaccaggaagcgctgaatggatagtgaaaaagtttatccaggctggcgttccaaagggcgctctcaattatataacaggcaggggttcggttatcggtgattatatagtagagcataagaaagttgcattaatcaccatgactggctctaccagcaccggccaaaggataatgcagaaagcttctgctaacatggcaaaacttatgctcgaattgggaggaaaggccccctttatggtttggaaggacgccgacataaacaatgcgcttaaaaccctgctctgggcaaagtactggaacgccggccagtcctgcatagcggcggaaaggctctacgtacacgaggatatatacgacacgttcattaacaagttcgtggaactgagcaagaagattgtagtcggcgacccgtcaagggcagacatgggcccgttgataaatactactgcattgaagggaacagaagaggtcgttgaagaggctaaagaaagcggtgcacgcatactatatggcggatccaaacccgatctttctggtccatacaagaatggatacttcttcctgcctacgataattgacaatgtcgatcagaaatcaaagatattccaggaggagatatttgcaccagtaataggcgcaagaaaggtgtctgacgtagaggaaatgtacagccttgccaatgattccaagtacgggcttgcatcgtacttgtttactaaagatccgaaccttatattcgaagccgcagaacgcataaggtttggcgaactctacataaacatgccaggcccagaggcatcgcaaggataccacacaggtttcaggcttactggtcaagcaggggaaggaagcagatacggcatacttgagtaccttaaaataaagaacatatacgtagactactcaggaaagccgttgcaaataaatactgtaagagatgatctatttcagtaa

SEQ ID NO: 12653 - protein, 493 aa, Thermoplasma volcanium
MDGKLYIDGQWVDSSNGDTLTKYNPVTGEVIGKFAAASRDDVDRAFDAAEDAFQKWMDLGSVERSKIIYKAKELIEENRKELENIIIQENGKPVKEAAEEVDGVLDQMQYYAEWARKLNGEVVEGTTNHRKIFQYKVPYGTVVALTPWNFPAGMVARKLAPALLTGNTVILKPSSDTPGSAEWIVKKFIQAGVPKGALNYITGRGSVIGDYIVEHKKVALITMTGSTSTGQRIMQKASANMAKLMLELGGKAPFMVWKDADINNALKTLLWAKYWNAGQSCIAAERLYVHEDIYDTFINKFVELSKKIVVGDPSRADMGPLINTTALKGTEEVVEEAKESGARILYGGSKPDLSGPYKNGYFFLPTIIDNVDQKSKIFQEEIFAPVIGARKVSDVEEMYSLANDSKYGLASYLFTKDPNLIFEAAERIRFGELYINMPGPEASQGYHTGFRLTGQAGEGSRYGILEYLKIKNIYVDYSGKPLQINTVRDDLFQ

SEQ ID NO: 12654 - DNA, 1548 bp, Thermoplasma volcanium
  CDS (1)..(1548)
atgccatttgaaaatgagaatacttatctccgtatgtcggaggcaggaaaagaggcggagtttcataggttatacgaagaaagcctgaaagaaatagaggcgtatttcaataaggagtatccaaacataatagatggcgatgttatagagtctaagaaaataaaggatataagcccaattgatgggaaggagatagccactttccaactagcatcggattcatccgtagataaagctgttgatatgctgtacaaatcttacaaggcatggtacagcctggggtatatgaaaagggccttgatattcctaaaggccgcagatatgctaagtgaacagaagtttaagtttgcagctatacttacttatgaaaacgggaagaacagatacgaagctattggagatgtggatgaagcaatagactttatgagatattatgccatgaatttgatagaaaaccagggtttcataaggttcacaggaaaagcctataggaatgaagaatccataagcattatgaagccgtacggggtatttggcgttatctctccattcaacttcttttccatcggagtaggcatgagctcagctcccttggtgaccggcaacgccgttatactgaaaccttcaagtgatatacctctctccctctatctctgggttagattgatgcatgaggcaggcgtcccgaagaatgtgttagcgtttgtatcaggttcaggcggcctagtaggaaggcatatagttgagaacaagaaggttgcaggcatcgtgtttactgggtcgagggatgtgggtctggacatccagaggaaatccatagacaacggcccgaaggtagtcataactgaaatggggggaaaagatgctataatagtttccaacaaagccgatatggacaaggctgtggaaggtgttgttagagccgcatttgggtttgctgggcaaaagtgcagtgcttgttcactactttacgtacataaggacatatatgatgaatttatgaagaggctcaaggcaaggacagaggccattaagccagacgatccaaggaagaaggatacattcctcaatcctataataaataaggaagcttacgataagttcataaaattaaagcctgaattcaacaagggcaagatacttacgggcggccacgaacttaacaaacctggcttctatgtagaaccaacaatagtgacggatctgccgaaggatgcatacatagcaaggaatgagatattccttcctgttctcagcgtgttcaagtgcaatagcatagaagaagctgtagatgatatcaacagcatggactacgggctcaccggaggtatattcacggaagacccgaaggagatacagtattacttcgacaatatagaggttggggtaatctacgctaacagaaagagtggcggttccactggatcaatggttggatcgcagccttttgttgggtggaaactgagtggcgtatccggcaaaggaacaggatcattctactatctacagcagttcctgagagaacagtcgcagactatagcccactga

SEQ ID NO: 12655 - protein, 515 aa, Thermoplasma volcanium
MPFENENTYLRMSEAGKEAEFHRLYEESLKEIEAYFNKEYPNIIDGDVIESKKIKDISPIDGKEIATFQLASDSSVDKAVDMLYKSYKAWYSLGYMKRALIFLKAADMLSEQKFKFAAILTYENGKNRYEAIGDVDEAIDFMRYYAMNLIENQGFIRFTGKAYRNEESISIMKPYGVFGVISPFNFFSIGVGMSSAPLVTGNAVILKPSSDIPLSLYLWVRLMHEAGVPKNVLAFVSGSGGLVGRHIVENKKVAGIVFTGSRDVGLDIQRKSIDNGPKVVITEMGGKDAIIVSNKADMDKAVEGVVRAAFGFAGQKCSACSLLYVHKDIYDEFMKRLKARTEAIKPDDPRKKDTFLNPIINKEAYDKFIKLKPEFNKGKILTGGHELNKPGFYVEPTIVTDLPKDAYIARNEIFLPVLSVFKCNSIEEAVDDINSMDYGLTGGIFTEDPKEIQYYFDNIEVGVIYANRKSGGSTGSMVGSQPFVGWKLSGVSGKGTGSFYYLQQFLREQSQTIAH
